United States Patent Application Publication US 2004/0031072 A1 - sequence listing, part 4

SEQ ID NO: 14344 - DNA, 1244 bp, Glycine max
  Clone ID: PAT_MRT3847_112960C.1
gattccgattgttgtgatccgtacaacacagcacaacaccatggctggccccaaccccatccccaagtggttgtttctctctctgactctgatcctcagtctctctgtctccgtcggcgcccgccacttcgtcctcgtcctctcccaggaagactacaaggacgacccccccgccgatcccgactccgccgccgagtgggacgagttcggcgacggagactcccacaaatccgaggacgacctcgaccccggctcatggcgccccatcttcgagccccccgccggagatccccaacccctccccgaatccgacgccgcctaccactccgccgtccacaagctcatgtccggcgaccccgacctgatccaggacggcgccgccgagatcggcgccttggccgagaccgggcaccccgcgtctcaatcggtgctagggtttttgtggggaatggggcttttgagggagcgaagcaaggggaaggcctttctgtaccaccactttgccgcggagggtggcaacatgcaatcgaagatggcattggcatacagctacacgaggcaggacatgttcgacaaaggtgtaaatctgtatggcgaattagccgaagtggccgtgaacagctttctgatatcgaaggagtctcctgtgattgaggcggttaggcttcacaacggggcagaggagaacaaggaggctcttagaaaatccaagggtgaagaggacgaggactttcagatacttgagtaccaggcccagaaagggaatgctgctgccatgtacaaagttggtctcttttactactttggcctcaggggtttgaggcgtgaccattccaaggccctctggtggttcctcaaggccgtggacaagggagagcctcgatccatggagcttcttggagagatctatgcgagaggagcaggtgtggagagaaactacaccaaggccttcgagtggctcacccttgcttccaggcaccacctctattctgcctacaatgggatggggtatttgtacgtcaaaggctatggagttgaccagaagaactacaccaaggccaaagagtattttgagaaggctgctgataatgacgaggttggcggccactataaccttggcgtcatgtatctcaaggggattggagtcaatagggatgttaagctcgcctgtaagttctttgttttcgccgctaaccatggccaaccaaaggccttctaccagctcgctaagattttccatactg

SEQ ID NO: 14345 - DNA, 539 bp, Glycine max
  unsure (1)..(539): unsure at all n locations
  Clone ID: PAT_MRT3847_112961C.1
tcggcacgagggtatgttgctgtttttttttcttcttcaatttcatctcgaggaacaattatgaaagaagagctttgaatggaagaactttagctaggtataagaagcaagttgatgatgagggttgactacaacatgataatccacctccatctagcgaaaatacttctgcaagggccaccacctaaacgccaacgcattgtncatttattacccggtttattgaaagtttcaacgacaaaatggatgcgctgatgacccatttggaaagattgctgacaaatgccagattattcacagttggatccttcaaaaagggatttggttggagaggttaacaaattaggattaactgaagaacaggaaattgaattggctttaaagttttctgaaaacccagaatatgtaagtatttttgggagttccagggtcggcaaagaatgacttatgtgaagaagttaataggaatgcgacaatgaaggagagaacttgaggatgttatttagaaaggttgtatgacgataacaagttataatttg

SEQ ID NO: 14346 - DNA, 274 bp, Glycine max
  Clone ID: PAT_MRT3847_112962C.1
cagagaccgaaatacttcgagatggcccgtacaaagcaaactgctcgtaagtcaactggaggaaaagctcccaggaatcagcttgcaaacaatgctgcacgtaagtctgaaccaacaactggtgctgtgaagaagcctcatcgttatcgacctggaactgtgcccctccgtgagattaggacataccagattagcgctgtgctcctaatcaggaaccttcatatccaaatgttggttcgcgaaattgcccaggatttcaagactgatctgcgtt

SEQ ID NO: 14347 - DNA, 466 bp, Glycine max
  Clone ID: PAT_MRT3847_112963C.1
gctcctagtcggcggcgccttttctgggccttcctttttactttttttttgcggcatatttttattgaaatgggaatattaacccaggcaggcctaaagatcttaattacatttccaaaccccaactaccaacaataaccttacctgcttaaaaatgcccaggaatttatcaattactaactgcttcatgcaaggaatttttttatttttaccactgagttaagcaaaacagaataaaagagctgccctaaatttactaaaccccctaacaaaatgaactgaaatacaggtacttattaaatggaaccttttaaagggccctcttgataaaaactgtccccaaaaccggaaatttgggggcccctcaatttttctatccaacctgacaaaaaaaaacaaatattgccccaacccccatgacgaaaggaacccccttttcctctgaaaaacatgattgcttaaaccc

SEQ ID NO: 14348 - DNA, 501 bp, Glycine max
  Clone ID: PAT_MRT3847_112964C.1
tttttttttttttttttttcggcaaatcaagcacagctctaacattaaaccaaaaatcatgccatggcaataactatatacacaaatcactatcattacataaaaatgtaatatatacccccaaaaaaactaaagaaaaataaaaaaaataaatataatgtaggtagtaatagtaatagtagtaattaaggattcggctctgcacagctcagtctctcaatttgccttaatttggtcccaagcggcagctaccccaacaccacaaacttaaaataaaaaagaaaaactggcataaaaattcaaccccacaatgaaaaatctaactttggatttcttccctctaatctcccttgtctgtttctggttttaactactggaggacaaagtggacaaggtagtggcagaggaagttctgctgggtgagggtgaggcattattgttcttcaacaccaccattactaaaaagctagtttttcttctctctagctccttaattaactt

SEQ ID NO: 14349 - DNA, 220 bp, Glycine max
  Clone ID: PAT_MRT3847_112965C.1
ctttcgtgttggttgaagtggagggcatcatctgcgaccatgtttggaatattttaagtcacgacggaagactacctggacttgcgctgtgaatgaatcacactgatcatggaactaagtcaggggatggtggccttattgctgtggaaggatgagtagctgatggcgaggtgtgttgtcatatgacatatggtgctgcatgcgatattacttgatgacg

SEQ ID NO: 14350 - DNA, 309 bp, Glycine max
  unsure (1)..(309): unsure at all n locations
  Clone ID: PAT_MRT3847_112966C.1
ncgangcaggcgtagtaagctcggaattcggaagannggannnntngtgcctcanntntccnatncgcagcantcccnaacacaagcggagtcatcctnatcggcgagggncctcgcggactcgccgccgcnagcnnanctgaagtcccagnacatggccttnntnnncntggaagcctncgacgccgtcggaggcngcgtncgcaccgacattgtagangggntntctngaccgcgggttccaantcttcatcanngnctacccggaagccanaagctctcanttatcaatntntcaactcnagaagt

SEQ ID NO: 14351 - DNA, 340 bp, Glycine max
  Clone ID: PAT_MRT3847_112967C.1
gtcatacagtgatgccaagggtctttcatatatatatatatatatatatattcaacaatcacaagcgtgtgtaggttccattctagaatccaaacttaaaagcaacattagtcattccttgatccacatgggctttattgggcttttaacatggtaaggggtaacagggctatgaaagaaaggatcagagaggctcaaagagtttttaagggttacattgggtaagaacctcaagagcgttgcttgtaccttttggtttgggctctactccttttgtcttatacattaatccttactgcacttttgtgcattgtaaaatctgaagatcttttgtctctct

SEQ ID NO: 14352 - DNA, 278 bp, Glycine max
  Clone ID: PAT_MRT3847_112968C.1
ttacagaaggatacagctgggagaagagataaattgggaaagtgcaatagtttgttgtaatctataagctattttagcctgtggagactacgaagctgtatgttttctatgatgctgcagtaattctgtgaacatgtgcattctatggctcacgatagcatatgttccctctccgcatgaagtctggttatcatgatcgttgttcgcaggtaaaatgcacaagttctatgcttgctgtacaatcccagaacattggatcctttaaagccattcctgaa

SEQ ID NO: 14353 - DNA, 1054 bp, Glycine max
  Clone ID: PAT_MRT3847_112969C.1
ccacgcgtccgcggacgcgtgggttcacttaatatgagtgagaaggaagagaaaaaaagaagaaaataagtcctacatacttccgtaacttttccgtaaattacgaaagaagggggtgaacttatcaaaatagggggtgcaaatagcaattttcaaaatttgaatctaaggaagcaacccagctcgccccctttttcctatataagggcaaaagggggctgttctaagggtcctggattcccctggctatgcatttaagatgttttgagtgaaaaaaattattttcgtgaagaaaatcaaagccgaagtgcttccgtaacgcttccgagaggtttccgtaagcaaatccgtgaaggttttcctccgttcttcaccattcttcgtccgttcttcatccgttcttcgttcttcaacgggtaagtttccaaatccaagacttttaattcatttcttggttttttggctttcatctttatttcgttcaatttcagtttctttttcttccgtttttaacgagctttaaccgatcgtttaagccgttttctcacctagtaaatgataaaatgaatttcaaccgatcatttgtgttgtaaatctcgtttaatcactgtgaaaacaaaatgtaaccgatcgttcacgctgtaacctcggttaaaccaaaaaaagcaaaataataataaaataatcaaaatatcttgtaaaataaataataaaataatcaaaatatctttgaataaaataatcaaaaaaatcaattagacgtttttctttggaagtttccttggatcaattgacttataaccaaagtgaaactaaggctaaaatcaactcacaaatcaagctttgtccgcaaaaaatcactaaaaaccattttaaggtccaacgccttaaacgatcctctttgcttttatcggttaacatggaccgttcaaaagcataaaatcaacatgtaactttaccgcttttgcgagaactacgtaggtctgatttcctcttcgatggaggatacgtaggagcaaaagccccacttttgtcgacctcgtgagatggttag

SEQ ID NO: 14354 - DNA, 554 bp, Glycine max
  Clone ID: PAT_MRT3847_11296C.1
ttccctttgtattttgtctcacttaaagaaaataaaatattagatgggaagcgttttatctctttctctgttatgaattctattagcctgaaatgaattttctttttaagattatatggccgagtggctgagttgatttcaattgatataaacctctatttcccatatgatattttccaagcatgttttctactaaaagtattgtgatcactgacagaaaatgtttttaaaagttcatcgtttattgtattcaagagattttcccctagtatatgattggccgtttatatgtgattgctggacactggtgtttatgtagtaggtatactgtgaacattggagttaactttggatttgtgagcatcgggtagctcatttttattcaagtttgatataattttaatttgtttgttcatattttaatgtctacaagtgcaacccttaatctattagccattgatatgtcttgtctatattgttaaatttcttacacatctttttccacagccaataggtttggggaaaattgcaaagtttattaatgctgggaagat

SEQ ID NO: 14355 - DNA, 509 bp, Glycine max
  Clone ID: PAT_MRT3847_112970C.1
cccacgcgtccgaaaaaaacaaaagcaaaacacaataaaaaaaaaaaaaaaatttttcgtttcccgattgttgtttcattcgagcaacgcaatagttaagttaattatacaaaatttgactgaattatatattctgcagtaatgtatgaaaattctgatatcattaaaaaattgtttcaattcttgttttcttctaatgggatttataattttgtgtttaaaggtacgaaattttaacatatggtattgcctcagttaatgtgtgaatgatttaacttctttggcttaatgctttattgatgagattgttctccttcattgatcaccacgaggagcaattgcaatgaggggcaagaatttatagtctttgcaatagagagaaatcatattatgttattctttattcaacttacaatccaatatttgcagattgattctcgttgcattgatgacaaaaaagaagacaatgaaatgaaatctgccgaagaatttgaagatatatttggaga

SEQ ID NO: 14356 - DNA, 479 bp, Glycine max
  Clone ID: PAT_MRT3847_112971C.1
tacgctgcgagaagacgacagaagggaggctaagatggtctctggtaatcgattaccaaaggggtgtaatcgattaccaggcttgaaaacgaggtcaggaagttatgagggcttctggtaatcgattaccaagggggtgtaatcgattaccaggcttagaaatgaaggcaacaggttgtggaggcctctggtaatcgattaccaatctgtgtaatcgattacacagaggaatgggtcactggtaatcgattaccaggtatgtgtaatcgattacacagtgcctttttcaggttatcatgtcctgaagctgtgtgattcaagtttggcctctggtaatcgattaccaaggttgtgtaatcgattaccagggaggaaaagccttgagatacccctttttacttgcatgtagtgggtatgagacgaattgtgtgcgacgcagttagatttttgtgaaagagtctacccctttcttttctttc

SEQ ID NO: 14357 - DNA, 109 bp, Glycine max
  Clone ID: PAT_MRT3847_112972C.1
taggtaagctcggaacggagttcggctcgagggctaatctgaatcacgaatctctgcagacaaagcctagctgcggaggtaactgtggctgcggaagcgccatcaaatg

SEQ ID NO: 14358 - DNA, 1458 bp, Glycine max
  Clone ID: PAT_MRT3847_112973C.1
gcgccagcgtatcgccgtggcctccccgggctgtcgtatgagtggttccccccccctgccccggtttgcggggcgctcgtgtcagcgccccttggttcggtttccccccgtatgtttggtggccgcggagcgttgcagctgtgggtctctctaattctgctgcttatgttcggatcccgcgcccagtcccgacttttgtcgctcgtgctttctccaatcctcctcatgtgatgactcatcatgcgtgtcacttcagtactgctggcacgggccctatttcatggctagtggatggacctcaaaccttgcaccatgacttctctgcatcgttctgtgaaataagtctgaagatgcatatttacaattcttctggtgccactgcttttgtacgcattgacaccttagattctgctggtaatggtggacacatgaacagtgtaaatgtggttcaatcagcaactactgataaccaagcagggtggcatgatattacaccagtgaatgaactgaaagtcacatcaaatgttcttgaaacccaaccaggaaaggcaccatcattggaaagtgtgtcctcatatatttggtctggatcaatctcaaccaatctccacattgatgctatgtcctctgcagaaattcctcttcagatctgtgtgttctctcctgggacatacgacctgtcaaattatgttttgaattggaaacttccatccaatggtaagggagatagtgatgaaacgaggcagcattcaggcaagtgccagggctataaatactatcttaccgtgcttcagtccacttgagaagttagtgagtgttttgttgtccgtttatctcatgctagaagtttagaagtgatttgtaaccgggggctgtatatattatatacgtttccatgtatttttaaaatgtcattaggaaatagggacagtgtaaaagttcggtggaaaaagtggtaaactcaagttcttttttgtccgaacaataatgacgacggcggtataaaattcatcgaacaggcaagcgtaattggactggccaagtttgagaaaggaagtatttttatggaggcaagaaagtacttttatgaagacaatcttaacaattttttgcatgccccacggataactagggatggaatggctgagtggaccacaggtaatcaaatgagaaattttcactccttactcctgtaggcggggtgcacgcgttagcagcgcaggaattggttacacttacaccaaatgttgcgttgaagaatcatttggagcatttgttctttctaattttgctacatatgatcggaagcagttcagagtgcctactttggtgactgttccaaattttaagacaagaagattttactacactgtaaaaagttattttaaaattagtggtataattttatcaaaagatttgaaatttttataataatgtgatttcttttatttagtgttt

SEQ ID NO: 14359 - DNA, 1163 bp, Glycine max
  Clone ID: PAT_MRT3847_112974C.1
cacgcgtccgcaatgggtcaatacctattgaggtttatgggttgttggggctaactgatctattgcttcaaaccaacactttggttggttcaatctctcccttcatagggaacctcactaacatgcagacacttgcattgtttcacaacaatttgcagggtgatctccccagagaggttgggaggcttgggaaattggagataatgtttctctatgataacatgttgtcagggaagattcctttggagattggtaactgttcaagcttgcaaatggttgatttgtttggaaaccatttcagtgggagaattcccttgactattgggaggctgaaagagttgaatttctttcaccttaggcagaatgggcttgtgggtgagattcctgccacccgcacttgggaactgtcacaagcttggtgtgcttgatttggcagataataagctctcaggtagcattccttctacatttgggttcctccgggagttgaagcagttcatgctctacaacaattctcttgaaggtagtcttcctcaccaacttgtaaatgtagcaaacatgaccagagtgaatctttcaaacaacacactgaatggtagtttggatgcattgtgtagctctaggtctttcctttcttttgatgtcacagataatgaatttgatggtgaaataccttttctcctggggaattcaccctcccttgataggctgagattaggtaacaacaaattttctggtgaaattccaaggacattggggaaaatcactatgttgtcattgttagatctctcaggaaattcactcacaggaccaataccagatgagctttctttgtgtaataaccttactcacattgatttgaacaataactttctatctggacacataccatcatggcttggaagtttgtctcaattaggagaggttaagctctccttcaatcaattttctgggtctattccactaggcctattgaaacaacccaagttgctggttctttccttggatacaatcttattaatggaagtctcccagctgatattggtgatcttgcatctctaggtatcctcaagcttgaccataataatttctctggaccaatccctcgcgcaattggtaaattgaccaaatcttatgagctgcagctatcgaagaatcgcttt

SEQ ID NO: 14360 - DNA, 1049 bp, Glycine max
  unsure (1)..(1049): unsure at all n locations
  Clone ID: PAT_MRT3847_112975C.1
ttgggggatgtttttttttttttttttttggggggctcttatcttttaaaaatacttttaattttatcctttgtattttaaatttggattaatttcgtcctttcatcaatctaaaatagatgttaataattttagcataatggcatttaaaaatgattacaaaataatactttattgcctgattctgtttccgtatacgtaacatagtgatagtttttttaacaacacatagtgatattttttaactatcataataatattatacaaattaaaaataatttgcaaaaagaactttaaaattgtcatgctcaatttctttgatacgattttatgcatcttaaaattcattgaggagtttggttatcctatgtgtttggatcaatatatagtaaaaattcaaatgatttcgttggagcatgtgtgagcataaaatatgttcatgtcatagattttaagacattcaatttatttcgatctatgatttgagggtacattttttgcaattcattgagggattaattcaggttgccgctttagatctcatgcaaataacattaaaaaaattattgttgggttggagaaacccttttttgtagcatgggtttaacataatatggtcaattcatttgatctaggcatccatttggtacaaattttagggccttttgattggaatgcaccaatctagagtaacccttgatcaaatttaagatatatgaatcggtatagaagaatttgagcacaaaaaatttaaagttctttcctaagggggtttcatttttataattttaaaatattattgtgatagttaaaaaccaccaccatgttaattatgtgtgtggaatcacgttcaaagtcgtatgtattctttttataatgnnttttnncagttaaaacccttnacagaagagatttnancgatgaaaaaaccaatttgatccaatttttaaacataaaagaataaattaaaaacttttaaaaatatgatttaagaatatgacgaaggacccttctgtcgtcttctcgcagccgtacggacgcgtgggcgc

SEQ ID NO: 14361 - DNA, 267 bp, Glycine max
  unsure (1)..(267): unsure at all n locations
  Clone ID: PAT_MRT3847_112976C.1
gngccggnnanacgacgagcngcgagtgngtggcggcgtgggacgaggtggaggagctgagcgcggnggcgagcnacgccaantacaagcaaaaaggaaaaggantccgacccgctcgagacctactgcaaggacaatcnngagaccattgagtgcaaaactttcgaagattganaaanggttttaaggggcnanangngcnccaaaggcnannnaaaaaaaaaacannggagngncacgaagagaannaaatncggnacaaggnat

SEQ ID NO: 14362 - DNA, 1984 bp, Glycine max
  Clone ID: PAT_MRT3847_112977C.1
ccaatataactctttcttgtaactaaagccaaacgcgatattctcaacgcttcattgaattgattcgatattatcccaatttcacaaaccccaacctcgctttctctgtcatccaattcacaccgccatggatcccaaccccggaaccttccctctcctctcctacatcatgtcgcgcctcccttccctcactcccagacccgccgccccggcaccctccgattccgaccaattcgacatcgaacagccaccggagattgtgggccaaatgccgcacctggcggacccggagctggtggcctctatgggccgggccgtggcacaggtgacgcaggcccgctcggtcctcaccctcatcggggagcgacccacgcacgaggaggtcgacaatgcccgggcaaagttggccgacgtcgaggcccagctctcccgagaactggaagagatcgtgctgcaggcccggcccgcggagatcgagatccaggggtggcgggcccagcaggccgagagggagagggagtgcagggagcgggccgagacggagaggcgggtgtggagatcggtgctgcagctggacgagatgcacgaggcttacgagaagcttctgaaggacgcggagaagcggttggtgaagatgtacgagtccaaagaagacggcggcggcggcgatgccgacctggcttatggcgaggaagtcaacgaagaggttgtggggattctgcaggaggcttacggcaaaggaatggaaagaattgatctttctggacgccagttgaagctcttgcctgaggcttttggtcgcatttctgggcttgctcgttttgatctttcacccaatcaactctcggcaattcctgattcaatagctggatggcaaaaccttgaggagcttaatctgtggctcgagcttttggaatcattgccggattcaattgggttgttacaaaagttgaaattgctcaatgtctctggaaacaagctgactgcgcttcctgattccatctgtcagtgcaggtcattggtggagttggatgtaagctttaacaatctctcatatttgccaacaaacattggatatgaattaccgaacttgcagaaactcatgatttatttgaacaagattcgatcttttccctcatctatctgtgagttgaagtccttgcactatttggatgctcactttaatgagctacatgggcttccaattgcaattgggagactgactaatcttgaagttctcaacctgagcagcaacttcagtgacctcaaagaacttcctgagacatttggtgatttggctaacctcagggaattggatctcagcaataatcagattcatgctcttccagacacatttggtcgccttgataatttaatcaagctcaacttggagcaaaatcctcttgaattgccaccaatggagattgtaaatcaagggcttgaagccataaagacttttatggccaagaggtggcttgatatattgttggaggaagaaaggaaaagcaaccaagaaatgcaagaaccagaacagggtggttggttaacacgaagcaccttctggttgaagaatgtttctggaaatgtaatcgggtatattggaactaccgttggatctcccatgtcacccaaatctcccagagatgcatatcttgatcagcagctatgaggtgaaggtccaacacattgggactgtcatacttgtaatttagaggaataatgtagatactatgtgctgctaagcaacaattctctgccactctctcttttggttctctgccccacccgaaatagcgtgggttgctttgcttacagatatttttgttttgcttaggttatatctggatgagaaatgccagtaaaatacactttcttcccccacacatttttgtattcggtgaaactcacgtagattttactaaatatctgagtattatatgaatttcaattaaatgaagaaatagtagagagtattatgtacaca

SEQ ID NO: 14363 - DNA, 328 bp, Glycine max
  Clone ID: PAT_MRT3847_112978C.1
gacagaaacgcagaagctctaattaactatggaaaataagcgggcacgcaatgacccatgactacccggtttgaccacttgaaacgaaaggcaaacacagctctatttgtctccacatgaactttacaaaagcactacatcacttattcagcctgactgaaacccttgcaatcatcagatttttcagctggttcctgctctgtcaactctcccatggctgcagcaggagcaccacactcagccgtgggagccgcagcatcagcgactgtagatttactcggatgcttgagatactccttgaccgtgtacgcctcacggaaagaataat

SEQ ID NO: 14364 - DNA, 646 bp, Glycine max
  Clone ID: PAT_MRT3847_112979C.1
ccgggctcgacgagcctacactagtcgtgtcggcccgcccgtttattttgttgtgtgtttttttatttatttctttattttcttatttattttttctatcttctttttttcttttctttttcaaaaagcgccccaaccccgaaataaatcctttaaatttttctttggggggaaaaacaaaattatttcgcaccacccttttttttaaaatgaaaaataactttgaaaagggggggccaaaccaaaacattattcccctcttttaaacgcaaaaacaagtttttaaaaacttcgaccatttttttcttttaaaaaaattttttggcccacaagggagaaaggtgtttttttttccccccccccaactggggggcctttggaatgaaaaaaaaatggcctggaacccggtcgacccccgcttaaaaatcttttaaaaacacagagggggtccaacaaataccttggacaaaaaaggctatgggggcgctatatgcgatgggcggctacctctgaaaaatctcccaaaaaagggcccttcttcaactgtgaacccccaagcggggtccttgctgggggcgccgcgccggggtccaccaccagtgaaaccggaaaaaaaatccccctacccgggggtacacccaaaaca

SEQ ID NO: 14365 - DNA, 711 bp, Glycine max
  unsure (1)..(711): unsure at all n locations
  Clone ID: PAT_MRT3847_11297C.1
ctgtcctgtctgtgaagctgcgcgtcgggttttgaaagggtttccgatcaccgaacggatcaaggaggatgaagatagcggtggaagggtgcatgcacggggacctggacaatgtctacagaacccttcaacagttggagaaatctgaaaacacgaaaatcgaccttctcctctgctgcggcgatttccaagccgtgaggaacgagcatgacttgaagagcctgaacgtccctctcaaataccgctccatgaactccttctggaagtactattccggcgccgaggttgccccctaccccaccatcttcatcggcggcaaccacgaagcttccaattatctctgggaactgtactatggaggatgggctgctcctaatatctacttcttgggagctgctggggtggtgagggttgggaatgttcgaattggtggcctctctgggatctataaatctttcgactataaattaggacactttgagaggcctccctatgatcataataccattaagtccgtgtatcatgttcgtgaatatgatgttcgcaaattgatgcaagtcaaggagccaattgatgtttttctttcgcatgattggccagtgagaatcactgattatggggattggagggaagcttgttcggcgcaagcattattttaagcaagagatagaggaanaaagactagngtagtaaacctgctgctgaacttct

SEQ ID NO: 14366 - DNA, 350 bp, Glycine max
  Clone ID: PAT_MRT3847_112980C.1
ggaaattggagctggataactattatatggaaaattacatcagagagaatataaaccaagttgtcatggtttggacgttgaatgatgcctttctcttgaccatagaagatagttgctctacctctaccatgatgttaaatcaagttcggaaagttcatggagaagagaacttgaaaattttgttgttagagtctctacttggttgttttgaagcagaggagagtctgatgccaagtgcaaagtgtgagatcaaggaacaatgcagggaacttgacttgggttcggaatgaggagacctacatgagcatgaaatatttgaagactggataactgcagaagaacaaacattc

SEQ ID NO: 14367 - DNA, 603 bp, Glycine max
  Clone ID: PAT_MRT3847_112981C.1
agggaacaaaagagaagtggaaacaaggaatacaaagtgcttgctaccactagcatccaccttctattgttgactactaacaatgcacaaactgaagagagaaaaattgagcagcccaagaagaaagatgtgtcttgttaattttctctgggtttgcctacagaatgaaaggattggtttttgtttttttgttattatctcagcaggtgcagaggccagagtgtgctgtgttgggttagagaggcgttgaggtgttgtaattattatatatgtaaggcaaatgtcgaaaaacaggttgcttagaatatagtataagaagtagagacaaccttttaattacattacgtaagagagagggaaaatgggtggaatttagggtgtcacaaatctgagtgtctcagagagagaaagagagtcgctaaaagttgaaggacaatactcaatttatgagattattgtgtattatgggactattatgttcttaattttcatatgatataaaactgaagttctattaaaaaattaaattgataatttctatttatgtgggggttgattaaaattatggatatgtggatagctttgaattgtttaatagtttgg

SEQ ID NO: 14368 - DNA, 187 bp, Glycine max
  Clone ID: PAT_MRT3847_112982C.1
attaacaaaaatagaagttggaacatcaacacaatggggaattttttgaccacatagtcccatacaagaataacattaaactttttggggattaaaccttatttcatacaaactttatggggctcttttttaacaaagtatatcaccacggtttaaaacaattaaatgattaaaaacttttttaaac

SEQ ID NO: 14369 - DNA, 701 bp, Glycine max
  unsure (1)..(701): unsure at all n locations
  Clone ID: PAT_MRT3847_112983C.1
gcatgcccacgcgtaccgtaagncttggnatccttcttagnagcgnngccgccctcttttcttttttttttttttcttttttttgctcatacgaattaacttttacactatttgatgtaaacactacatggggcatataaaatatttttttcctattcaatataaatttatccactacactaagttagtattaatttatccactacactaaattagcagtaaataatacaaatttacatagcagtaggtgactcattaagaatagatactataagaaataaaaataaaaaagaggaatctttggaaaagggttagcaaaagcaggagtagcacaccatgaaagccaaaagagccaataatgtcttcaaatccacatctcctggaacaaagatgatctttggtgtgcttgaatttgtgttatcccaagagtggaagcatatattgaactgtgttattccaacaacttcttgaaggcatcatattggtactaataaaatgaataggcaagtctgaaacaaactctcgccaagagtaagcagtttcctcaggacaacacaaagatgccaccaaaaatggagctcaagctgctgctggttcagtgaattccaaagatgaagttattcatgaacctttttgttcactcatgatcaaattgatttcatttcaactctgaagtcaaactacttctttagaaagtacat

SEQ ID NO: 14370 - DNA, 859 bp, Glycine max
  Clone ID: PAT_MRT3847_112984C.1
catccaatcgttcgtctattattaatcaaaagatttacaggggtaaaaagagattacggtatatataagcgtactaagatgtctagaaaatgagtttccaaaaatcattactagctgttatataagtgagaatcattacgaataagggagaacatagtgtgtttggtagacgagtttaatgcttattacagtacccacggaaactaaagtgacaattcaggtttccatattcatcaccaagcacagcacaacatcaacgccagaaacagagaaacattaaggatatatgacgtagtttcatatatagggacacactgcatgcatgcacttgaacacaaaagcctgtttagttatggttctggaagtagatgtagtctacgtcagcttcctccataaaccttctactggagcactcttcgttcttcacgtcgcattcctgcatgagattaggtagtgaaagaaagagaagtaaagaaggcaatgaggggtaagaaaattagtttggcttttaacttgtgtgaatgagagaaaaagagaggagagtaaacagttggcaagagcgatatcattgacttttacttctttctcaaaccttggagaaaaacaactagcaagggaacaacgttgttttggtagtacaaggatacgggcacaagttaagaccgagtaaaaaatgagaagagagaaaaacaagacgatttgttgttacttcatcgattcactgagagaaatcaaatcttattatgcgtctaagaagatgaaagaagggaataaataagtagaaggctatcgctcccttatgggcactgtatatggaaacactttgagacgcaccttctcttaggtgggcactcgagcc

SEQ ID NO: 14371 - DNA, 249 bp, Glycine max
  Clone ID: PAT_MRT3847_112985C.1
agccatatattcccattcgtgtgtgtccttcggcgcttgcttccgtgacttgagaaaagagagaggagggtcttaagggtgggatcctcccgcatcaaacatgcgacgaggcaacgggcaaaaggcaaagatggcacgcgagaagaacctcgagaagcaaaaggccggcttatagggaagccaggtggcttcaaacaagaaagcaatgcacatacattaaatatggggctccgaatccctgacagctac

SEQ ID NO: 14372 - DNA, 195 bp, Glycine max
  Clone ID: PAT_MRT3847_112986C.1
caaaagagatgaattacgcccgtctgacttccggcggaggatggcgtctccggcgactgtacacggcggttgagactctcgcgggttgggggccgctcgaccgaatgtccttcacgctggatttcacaggcgagtcccgtgcttttgctccatggctcagtggggcagcatgctttacgtcaccgttctgtaggt

SEQ ID NO: 14373 - DNA, 536 bp, Glycine max
  Clone ID: PAT_MRT3847_112987C.1
ggaattcaggggccgagggaaacaaatgaagacccaggctgagctcctgaagatgcccgtgattcactgacacgggacgtggtcaaacagcaaagccaggcaggggactgctgtgcagctggcactttcggggcctcccttgaggttgtgtcactgaccctgaatttcaactttgcccaagaccttctagacattgggccttgatttatccatactgacacagaaaggtttgggctaagttgtttcaaaggaatttctgactccttcgatctgtgagatttggtgtctgaattaatgaatgatttcagctaaagatgacacttattttggaaaactaaaggcgaccaatgaacaactgcagttccatgaatggctgcattatcttggggtctgggcactgtgaaggtcactgccagggtccgtgtcctcaaggagcttcaagccgtgtactagaaaggagagagccctggaggcagacgtggagtgacgatgctcttccctgttctgagttgtgggtgcacctgagcagggggaga

SEQ ID NO: 14374 - DNA, 202 bp, Glycine max
  Clone ID: PAT_MRT3847_112988C.1
tgcttttctcaacacaataccatacccactaatacgaccttttttataaccctgctacctcttatttttacatcctctttcatcattcttaacaatctttcatcatactacataccaatacctaatccacctttctataattcttcactctactagccctacaaatacaatccttccttttattaaccaaaaccacccattt

SEQ ID NO: 14375 - DNA, 314 bp, Glycine max
  unsure (1)..(314): unsure at all n locations
  Clone ID: PAT_MRT3847_112989C.1
ctgacaaatcaaaggttagggggatatgggacttttttactatctagatctaccatgaanggagtcacataataattaataaaggaatggacttatcatcaggtggccccaactgctacacgttttttaaattcttcacacaaacgcatcaagattccgggcatatgagccacctacagactccaggggctttgcattcattttccactagatgggcgtattattttaactgggtttaattttgggcctaatgtattttccaataagcacttttttacatcggtttctgataatccactttattttgatccata

SEQ ID NO: 14376 - DNA, 367 bp, Glycine max
  Clone ID: PAT_MRT3847_11298C.1
cttttgcagaaaaaaaatgaaagagctgctataaaagttgaagtgcctaaattggttttgacttgtgggagaaacttaactcattttacttatgttattctttcataagtatttattgagccaaacaaggccataattgaaggtgttatttagcaacggaggaaatcttacagtaattaggtggaaaggaaagaatagttttagcttatttcataattttgttggagtaactaagcaatgaaatcaaatttggtctcttttgtcgtagactgttccgggctacgatgtagcgggtgtggtggtgaaagttggtagtcaagtgaaggactttaaagtgggtgatgaagtgtatggagatgttaatgag

SEQ ID NO: 14377 - DNA, 445 bp, Glycine max
  Clone ID: PAT_MRT3847_112990C.1
gaacctttggtctgatttatgtgcttgcatagtcgtgacaagatgatagaccgggcgcactggagcaacgaccagtaaggatgagctaggacgtcgacggcggaaacggcccctagagcacagcgacactatcgaaagatattccccacgataaagttgaagtaccagccggggcccatagagatctcgaaagaggtcgcctgagaatctctatacccgacccgatcaaacattgagagcctcaaaacctacttacaaggcatagccgacaagttgttcgccacacgcattgtacctagaggccggccgtacccccaccctccgctcggaggcggttaaatcaacgcgaacttcctcccccattttctcctaaccctccgcgccccaagccattagccgggccatccccaaaatcaaccgcaacaggacccttccagcacacgca

SEQ ID NO: 14378 - DNA, 250 bp, Glycine max
  Clone ID: PAT_MRT3847_112991C.1
catatttgtaacactaggctaggctctagaaatttaccacaaccaatataattatctcacagtttttacccctgctgctccattaaaagccaatattctgtgtttcataaaaaattaccaaatggtacattcttttgggtgaatctaaggtatttgtttcaatttaattatttttcattagtattgatgaattaaatattttttttataaaaatagaggtaatatttttcatgtgaaaatcaatgactaa

SEQ ID NO: 14379 - DNA, 143 bp, Glycine max
  Clone ID: PAT_MRT3847_112992C.1
ccaggctggtgggactaacgccataagctcctgctagtgcctccttgccaacgttgagcctgctctgtacaggctgtttacctaatgcatatcaaggatgctacgacagactgccctttatctgaacgatatcagacaaaatg

SEQ ID NO: 14380 - DNA, 170 bp, Glycine max
  unsure (1)..(170): unsure at all n locations
  Clone ID: PAT_MRT3847_112993C.1
aaggaaacgcctttcctgagaagtcggaaggaagagagtgagagtnaganagntggagtttgganttttgggnttccgggnnaannggntaagncnnngncattccatccngtnangcnatggcttcaaggtcacaatttggaacagaaccctccccaggggtgatgacc

SEQ ID NO: 14381 - DNA, 1483 bp, Glycine max
  Clone ID: PAT_MRT3847_112994C.1
catccctcatcttctctgttctatagcaaaaaaacagtaatcataacttgatttagatctcaaaaatcttgatcatcaccatcattacctttagatctttctcccttttgctcactatcactctcagtctctcacctatccacccaacatgccttctagggtttccattctctgtgtcactgggacaatacaacagtcccaattctcaccctttcacaccaccattctctgattcaccctccaccctcatatccaccaaaaaagcatgcatctttggtgccactgcctcaaacccacttcagattctcctctgaaacccactgagggtgttgttggcggtgtctcttagtgttcattggtgttcactgttcaatttgggggttttaatctggaatctgaaattggatcaatttggagtttatttttggttgcaaaatgatttcttctgggattaacttggtgatgactgtgattgggttcgcggtgagcaccatgttcattgttttcgtctgcaccaggctcatatgtgcacgaattcacctgaatgctgcaaggagatcctttcctattgcctccagatccaatctcagcatgatggagcgtggttgccatggtcttgaacgcgtaactgtagccaaatttccaacaaagaagtacagtgacaagttttttgctgcagcagaaaattctcaatgcacagtctgcctctcagaataccaaggtgaggatatgctgcgtatcctcccctattgcggacactccttccatgtgacctgcatagacttatggctgcagcagaattccacttgtcctgtttgtcgaatatcgttgcgtgaatttcctgatagaaagcggttaatgcaacccctgttcagctctgctttgcaacctcactatgacatagaatcctttgacaatcgtcattatcactgtatgatagctgataatggattatcatcaagaacccctgacaaccatgcggtgaatcctatagaagaagatcattttccatccgagggtgatggagcagttgctatggacaatatcacctgtttaagtgagggtgacttcattaaagatgaagggaagaaacatgtagagagcccttcaaacttccggatttgattggtttcatggaagttgaagcctcaatatgatactttgaaatcacaaattgagtataaagttaatgttccaaaattggagtgaaaatgtgaaatgcattagcatgctgaaggatggttgatatcttttactgtatatatagctgagaacaccccccaccccccgaactgcactttactgtcttctcctttgttcttttcttgatcttcaatactagatagtatttgaaactctctctctctctctctcccttcctaattgtaattgttgtaagactagaattagttgaataccccttcaaaactttgtattaatgcaaatccgtacagtgcaattaatgtatcttgtttttttgtcc

SEQ ID NO: 14382 - DNA, 715 bp, Glycine max
  Clone ID: PAT_MRT3847_112995C.1
aaggaaaagagggtccacttctatcaaagaatgtggtatacagccatggataggaccaatcatcctagcactcactataccccaatcaataactacaagcatattcgtcttttacacagccgctggtcttttatgaacaataaaaagacaatatacaacagattctgagtagtcacacttttgcagaaacaacattctcaaaccacaatctataaaaaaaaaacaatttagagcttgacaaacccttcttttttctttggcaaaattacctattcagaaaaattcagtcaggactaacccaaacaagtatgtaatataagttgtttggtccagaccataagttgacatgctccgtagacatgcacctttatattattgttataaactgcaccccggcatgcacatggtttgaaagataccatcatctgaatttaaccacaacacaagatatatcatctttactatctctttttaatgcttcagctgttagttgcttagctgctttctgcgggtctctcgttcttctagcaatatccactgcctcttgattagtcattaccttcatcaaattctcacttgcaaggattagaatctcagtatcaacatctacatcagtattctgtacatcagggtctgatcgcaaatgggacttgagactcttgtctccaaatgcacgagaaacagcaagttttccatttactctaggcacatcacc

SEQ ID NO: 14383 - DNA, 330 bp, Glycine max
  Clone ID: PAT_MRT3847_112996C.1
tcgcccacccctgcgaatccgtcccctgcgttaaacataatacaaacttgacgggttgagctgggtggggaccgctttgataatctagtccatacctctgtttttactatgctcctaaggcacaaatgcttctcccttgtatgttctttgttctaattatactgacccttattatctatcccttgcccttacccttcaggcaccggatggaagactgaactgcactaaataatatctgacgctacctatctcataattataagaagaactataagactcgatggctataacttgcttatagatggattcaacaagtctctacaacgataa

SEQ ID NO: 14384 - DNA, 247 bp, Glycine max
  unsure (1)..(247): unsure at all n locations
  Clone ID: PAT_MRT3847_112997C.1
aggtaccgctgccaaaaaaccaccaaaagggtccggttccaaaaaaccaccgaaaggtaccggttccaaaaaaccaacaaaaggtaccggttccaaaaaaacaccaaaaggtaccggttgcaaaaaaacacaaaaaggtaccggttgcaaaaaaacacaaaaaggtactggttccaaaaaaacacaaaaagggacctcangtcaagccgggctacccgcctaatttaaacatattaataacggaagg

SEQ ID NO: 14385 - DNA, 380 bp, Glycine max
  Clone ID: PAT_MRT3847_112998C.1
atgctcactagccggcggtcggcattcggctctagaactttgactgagggtggtttgcacagattatcattctatctaaaaattggcgatggacagtgactgatacatttctctcacctgatcaacgctctctaatctatgccagtatctcacctattgtacacatagtgaatgcccgatctcattgaactgactccatggttaatgttacacacacacatggaggtttggattactcatcaaacgactatttgaagatactccttctgaatcttgtgcgtgccacgctcaatcgatgggaacctctaatttgccggaagtaatggtgattctatatatgcctaccatcttgtagcacataagctataacttagaatttt

SEQ ID NO: 14386 - DNA, 166 bp, Glycine max
  Clone ID: PAT_MRT3847_112999C.1
gttcaggggcatgtcactccctacataattggcaccatccaggatcgctgtcttactcatgtttatatcactagtagagatggtacatacaaaggaactactgcttttcactatgaagttttaccgcagtgtcagtttctcacaattgccgttattcatatgtcca

SEQ ID NO: 14387 - DNA, 320 bp, Glycine max
  Clone ID: PAT_MRT3847_11299C.1
ggaaaaaaccggtaaatgtttatttttctgattagctagcgaggaaaaatgattattaacctcactggggggaatctaatcaaaatttgacctggattatttattcggcaacggttgagggaacgcttacttttttactggctctaacaaaaaaggtgttggtggtaactcaaaaaccctattcgaggtctctttattgcaaaattcgcggccgatatgaaaaatgggggggttttttttttaagcagacctttcgttgaccaaacattttcctgtttgcctagggagggaatggaaatggcccttttctggggggggga

SEQ ID NO: 14388 - DNA, 503 bp, Glycine max
  Clone ID: PAT_MRT3847_1129C.1
agctcggaattcggctcgaggccctgacaatgcttatgtgaatgtatgggaagttgacactggtgtactaacaaattccttgctttgctctttaactgatggtgctggatctggctgtgatgccatggttgtagatgggtgtagaattactacaactagctattctgaagattcgggtgttttgtgctttagggactacaaccatgatgccacaaatcctgttacgaaactagaaaacgaaccgtcatcaaaattttggatttctatgtccgatgatgacagtgatgactgataatctaggtagctcccaaaattgtattgatcaatatttttgttttcagttggttagaatgttactttagtacgggatttttctcaagtgaaatctccctgtctaagatcaaaggatgatctccaaatgctgctaaggatgtcagttctatttggatcacaaatccttcaatataatcaaatgtgtttttaagtcaaaaaaaaaaacgaag

SEQ ID NO: 14389 - DNA, 412 bp, Glycine max
  Clone ID: PAT_MRT3847_112C.1
ccaatacttggcaccggagatctttagaggcggcaggccaaggcaactgcagaatgattgggggacttgtggcatctatctatatgagctggtgattggtaaaacgactgtcgagggatctgggaaccgagctacattgtctacacatgtccctgcaccactgccttttccacaaccaccctctgcgactttggcggtgagggatcttataacggggttgcttgtaattgaacctcaacacacattggcatataaaatatgcgctactgcagacgatcaacgcccctcttttgaatgtgagaagagtccattgatcccatgagctacccctccctatattcccaaggatgcaccacttgagaatataccctcgccgacttcttcttgtggaggagatagagctgcttcccct

SEQ ID NO: 14390 - DNA, 178 bp, Glycine max
  Clone ID: PAT_MRT3847_113000C.1
tctatgggaatgtttaaatatcttttatcgaattgaattaaggtatttaataggcaaagttcataagaaatgataaaataaaatcgatagcatatcatatgatatcataagtgagtgtctcattatcgaagcatctcctagttacctactcaagtagctataataattcttgactcct

SEQ ID NO: 14391 - DNA, 655 bp, Glycine max
  Clone ID: PAT_MRT3847_113001C.1
gccacgtgtccgtgagctgcttccagaaaaatgttaacatgcccatgtgtttagaaagcgagcatgccccattgattccttaagtttgagattaagtttgttggagaaagttttgaggagttttcttgaccataagatacttaaagatcagctttttggccttcttaaagcaaatattaaagcatcagctgttgtaaagttccccttagaattagaaagggacataagtaataatgccactcttaatcgtacgattcctgattggagaacaaggcccggttttgaaaggttctggtttgagatattggccagagttgaggaaaacaagctcaagcctcttttaatcaaggaagtaagaccttttatcgaatcagtttcagtttcctgggcgaatttgatgtccaatatgtcatacacaaagttgagaccagtgttttttcttccggagcctcttacactggatgtgaaatggattggttcttgtaaataccaaaataggagaggagaaagaaggaagtgtaatttgcgtttacacgatttggtaatcttttaggatatgaacctaattctttctgatgaagcagtctggactaagctggtggctatttcgtaatgtgttagtttttaccatgttaggtggttgtgctgattatgc

SEQ ID NO: 14392 - DNA, 1099 bp, Glycine max
  Clone ID: PAT_MRT3847_113002C.1
cccacgcgtccgctctcgtgttctggctgcgttttctcaattcgttcccaaaacgcattggcacccacacgacggtgcagcctccctgtagctgcctcacctcaccactgcagcctcctcgccggcgaaacctccatttccggtggcgacgaacgtttaatttggccagctcctcctggaatcgcgatggtgacgcactgagaccagtggcgacgaagacacagtaagcagccggcagcggcgacggagacacactgctgaggtgacaaaagctatggcctcaaagctgcttttgaagagaaggctctttaggtttttgcaactgtcacaaccttctttttcttccattcatgcagccccaatcctttctgtaaaagcttcagaattcatgttcccctacaaggagaatgcccttcttcctcctctctcttcttcttctagaaacttctgctctcgcagttttaatcttgatgaatctcaaggccccctgactatcgattacagtttctctactgcacgtgggtgaagtccacggagtggctgattccacaatacatagcctccaagagatagcagtggactatggagacccagttggagttgatgggtttgccattgccttcggcaatgatgctaggattactttctgctgcgtttgtttatcttctttatctgctgtacttaattcagatggcattcaatatctgaacatatgccggaataggtattatggatgatctaggggtcatgatcttttgggcttgtcttatgcgctggtccttcaaggtttgtttgggatcgggatactaaagcttgggcttttaggcggaacaaagcatacttgtacataattttggaaggcgagtctgcctagtcctgttgctgtattagtgatccaacccaatcgggaccagccgttgtgcctcctctgtacttgttggttttttgccttctgtcttgtgtcgcccctctggtgcccgctggtccgtgccgctttttccctttcttccgtcttgtgcctcactcacgccatctttgctgttgcggttataccgcgtctgctgtcatggcgtgattgtatcttctaaataatcagcaa

SEQ ID NO: 14393 - DNA, 366 bp, Glycine max
  Clone ID: PAT_MRT3847_113003C.1
cccctgcccccatccatcaggaccttgatgagccttacgtcccccacagtggggtctacgaccagcggggttttccccaggctcgggacgaggtccgggtggacacattgggcgaatgtgataggcttgtccgaccactgcacatatactggcgccaccacctttaccgagcagaccttgtggggctcttgtttgcgatgccgaggcgaggcattcgctgcatgacctccaccaatgataaagcactcacggacctcagggaattcttctgctttgggatctaggcttttgtggtcatctcgggccctgacaccctctgcaaggggcccccccttgtagaagttgcccccgagcatagacccctcc

SEQ ID NO: 14394 - DNA, 1341 bp, Glycine max
  Clone ID: PAT_MRT3847_113004C.1
tacggctgcgagaagacgacagaaggggaaaagtgaagaaaacagaccaaaaatagaaagaaagagaaataccaaaaccttggcgcatcatattctttattccctcacttggatcgttaattccgcgaacgagcttctgcccttcaaattaaccatggagaatattggtgaggagtacggctactggccggagaacgacatgcttttccaaaacgaagaccttggcagctgggcgataatggatgaggcagcgttatcagggtcagggtactatgattcaagctccccggacggtactggtgcttcttcatcggtggcatctaagaacattgtctccgagaggaatagaaggaagaagctcaacgataggctttttgctctaagagcagtggtccccaacattaccaagatggataaggcttctatcattaaggatgctattgagtacatccagcacttgcatgaccaagagaagagaatccaagctgagattttggatcttgaatctgggaataaactcaaaaacccaacctatgaatttgaccaggacctccctattctgctcaggtccaagaagaagagaacagaacagctattcgattctgtcagttcaagaaattctccaattgaaataattgacctgagggtaacatacatgggagagaagacgtttgtggtgagcttgacatgtagcaaaaggacagacacaatggtaaaactgtgtgcggtgttcgaatctttaaagctgaaagtcattacggccaatatcacttctttttcaggcacgcttctgaagacagtcttcatccaggttagtcttccattttgcccttcttaaattaataagtaaataaataaattgttaattgtttaatatttgtgtttaaagattaaattagtttttttaaaaataatactcatcggctagaattttgggggccacatactaggaaacctatggaccactttaataaaagtgggaaacccatttatgggataatgggcattttagggtcaatgatgagaattaaggaccttatggcagtgtcctattcaaatcagctgatgaggcaattaacaaggaaggaccacgtgaatcttgtgctttaaacaaagattgatgggaggaccacatgaatattgtgctttaaacaaagattgatgggaggaccacatgaatattgtgctttaaaaatagagaaaaaattatgtgagtattatatgattattttggtgatttttatgcttagaaagaaattaatttctacttatcggtagaagatattcttttgaaaataaataaataataaaagactcaatttcatgacgtaggggataaaa

SEQ ID NO: 14395 - DNA, 792 bp, Glycine max
  Clone ID: PAT_MRT3847_113005C.1
ctgaattatcactctttaatttctatctccaaaacatacccttttggattaatgtccattatttattgtccttgtttacataatgaaaatgtgatttcaattcttctgcttgtaacataaccaaatgatgatgccattcttctattctatgccacaatcatgagtttggttcactttggatacatagtgtgcaataattctaatgggtggttttgttgaacacattaattcaggtgaccatcatgaaactcaaggttgatcttgagtgtgagaaatgctacaagaaggttaagaaacttctcggcaagtaccctcagaaattcgggaccagaagttcgatgagaaggaaaacattgtgttcatcacagtggtgtgttgcagcccagagaagataagagacaagctttgctacaaaggtggaggctcaatcaaaagcattgagatactggaaccgcccaagcccaagcccgccgggcccgagaagaaggaggccgagaaacccaaggccgagcccgagaaaaagaaagacccagagaagcctaaagcagaccctcccaaagccgaaaagcccaagaccgagcccgagaaaaagaaggacggtggcggcgagaagcccaaggaagagcccgaaaaaaagaaggacggtggggagaagcctaagcccgggcccgagaagcccaaggataagccaacacccgcgccgttacctgtgcagccacatatagcggcaccgatggcggtcccagttgggatgctctatgctcctcctccgtgctacggaggcaggccccg

SEQ ID NO: 14396 - DNA, 1210 bp, Glycine max
  Clone ID: PAT_MRT3847_113006C.1
aatttctttaccgtcctgcggcggggcttcaaattccagtttctattcaagaaaagccattacctagcacatggtctgcgatttcgccttcagtgttcaatcttcgcggtgaaaattttttcagagataagcagaagtgccctgctccagaatcctgcccttacataccaataggtgttgatttatttgcctgtcctaagaagataagtcacatagctaagcatcttgaacttccacttgtcaaagaaaatgagagtgtacctttcctcctcattgttaatatacagaagccaacatatgctgctagcgtgttccttggtgatgccaatggggaaggcttgagtcttgtactatattttaaattgtctgaaaattatgagaaagagatctcaccacatgctatggggatgatcaagagattaatagatgacgagacagaaaaggtgaaagggtatacaaaggaaagcctggttccctatagggagagactaaaaattttggctggagtagttaatccagaggaccttaatctgtattctgccgagaagaagcttataaatgcctacaatggcaagccagttttgtcacgtcctcaacacgagttctataagggacctaactactttgaaatagatctggatatacatcgctttagctatatatcaaggaaaggacttgattcacttcgagaccgtgtaaagcatggaatacttgatgttggcctaactatccaggcacaaaagcaagaggaacttccagaggaagtgttgtgctgcttaagattgaataaaattgattttgttaaccatggccaaattcctacacttatgactcttgacgataactcgggcgtgcattagttgatcgatggggagagcagaaaagaaaagagaagagattcattgatatttatgaaagaatggggtgccaaatctatttaataaaacgagggaaaaaaaaagaaaaaagagaagcaaatttgaagaaatttgaggcttctctgatatgcaaaattgttttttttattatttatgagatgatgtaattaaagtcctatatgttactttacatgacaattttcttcctccttgtgttgtcaagatgactaattgaaaaggtgacaattgtaaaagagacatcttggattattaaagaaacaattatagattatagaacaaattatactaatattcttaaaatttgtatatgt

SEQ ID NO: 14397 - DNA, 670 bp, Glycine max
  Clone ID: PAT_MRT3847_113007C.1
gatgccattcttctattctatgccacaatcatgagtttggttcactttggatacatagtgtgcaataattctaatgggtggttttgttgaacacattaattcaggtgaccatcatgaaactcaaggttgatcttgagtgtgagaaatgctacaagaaggttaagaaacttctcggcaagtaccctcgtgagtgccatcaccccttgcttttttttttcatgcatgtaattttatatatattagaatcagaattgtgaaatgattttttttttttcaatttgcatgcatttatttggagttaaaaattaagagggtatcaaattgagttaatttttgggtgttgaaattttgtgaacaagagaaattcgggaccagaagttcgatgagaaggaaaacattgtgttcatcacagtggtgtgttgcagcccagagaagataagagacaagctttgctacaaaggtggaggctcaatcaaaagcattgagatactggaaccgcccaagcccaagcccgccggtcccgagaagaaggaggccgagaaacccaaggccgagcccgagaaaaagaaagacccagagaagcctaaagcagaccctcccaaagccgaaaagcccaagaccgagcccgagaaaaagtaggacggtggtggcgagaagcctcaggaagagc

SEQ ID NO: 14398 - DNA, 147 bp, Glycine max
  Clone ID: PAT_MRT3847_113008C.1
ggaaaagagattagacagaggattttcccctatccgagttcatgagctccttgactcggtcaggcaactcggtggaactcagtaacccattatcgagttccaccgagttgggtgaccgagtcaaggagctcatgaactcgggtaggg

SEQ ID NO: 14399 - DNA, 586 bp, Glycine max
  unsure (1)..(586): unsure at all n locations
  Clone ID: PAT_MRT3847_113009C.1
gattgctaataccatgtactgctatttggcaagtggtaccaaaagaccattggttgctagaaccatgatcaatagaaacatgatgccccttcctaacggagacgtccttgttcacgaaaagaacatgcttgttattatgcacgaaatgacacacgctttcggattcagtcacagcctgttcacccacttcattgatgctaatgctaatcccttacaaggacagctcaagaccgttaatatgggtggcatgactcgcaccgttctcgatgtatctcctctcactgataagctcagaagcttctatggatgctcttcccttgaaggtgctcctttggaaaattctggaggtgacgccactgctgcttctcacttcgaaagacaatttttcctctacgagtacatgacttcaggagccatcttaaacatgagaatttctgagttcactttggctttgctcgaaggctctggttggtatgctcctgactatagctatgccgatcctttcttcgttggacaaggccaaggctgcggnttcctgaactatcagtgcagtagtggaggtaccagtagctttgatgagtactgt

SEQ ID NO: 14400 - DNA, 356 bp, Glycine max
  Clone ID: PAT_MRT3847_11300C.1
gaaaccctaaaaacaaaacgaaaattgctttaacttcaaaaacccagttacaataatgtgggtagagaatgataaactgaacgccgattttttttaaagttaaaatggctaagggaaaaaaaaagcgagccgaataacctccttaagtattaaagcttagttggattaaccttacaaaccttttgttttgggatcttagccaaggacctaaggttgctagctatgatggaatgagcaaaagaacccgtttcgtggccgatactccccaacgggacatccaccggggacgactctattgccaccgttttaccaccgtattccttttactcctgaagcaaaggaatcggtgaactata

SEQ ID NO: 14401 - DNA, 1010 bp, Glycine max
  Clone ID: PAT_MRT3847_113010C.1
cttccagtctccttcactcacgctcctctttcaaattcaatccttggcttaaactgaatcatccttctcatgctgcaattggacttagactcagactcaaaccctacccaaccaatttcacctgcaaggcagttttctccgacgatgccccctttgccgccgcaatcggtgcttgcatgttcacttctttgcttttaccagtctctacttcctccgaagacgacgatgccgactccgccgtcaccacaaccgacgcaaggctcgccgtcatggggattctcagtttcatcccttatttcaattggctcacttgggttttcgcctggctcgataccggcaaacgccgttatgctgtctacgcacttgtttatttggctccttatctcaggtcaaatctatctctgtcgccagaagaaagttggctgcctattgctagcattctgttctgcattgttcacattcagctggaagcaagcattagaaatggagatattcaggggtttcaactattcaggaatgtcgcagatcagctatcatcaaataataggaagaaagatcatttaaatctgcatcaagaaatgtctgaggagggaatcaagaaagaaaagaagaacctgccacatgcccaggaacaatcaagggatattggaggttgggaagattcacagaggcctttacaaccccggcagcacttgaatgaagacttagatgatgacaaagaaagaaacaagcactaaacatggaaaactcactcaagtttcatgcccgatgctggtaccactcagctgcatgatgattagttttgaatcgttttaatggaactattgcgttgtcttaatgttgctcagttcctatgttaccatcttggattcttttcatggctggtgtttatctcatacttgtttactagatgatattgaaggtgccatagtataaaaacagagatatgcatacacctactctacggtctctacctctacctttcttccacctcattttttttcctctgt

SEQ ID NO: 14402 - DNA, 590 bp, Glycine max
  Clone ID: PAT_MRT3847_113011C.1
ggctcgagattttaaagacatgaaaggaatgagattggagttctcaaatgcctgaatgcattcaaaactctcattggaaaagaaatccatgtcaatgaactttggatcaataatggaatgagaagagaaaatatttgtgtaccgtatccgttgttcttcagatgagaacaatgaggaagaggaaatggaggagggaatttgcgtttcttgagtctcggaatgtcgttggcttcgactcgaagaaccctttcgcttctttgatggttccgccatttgagggagtcatttgaaatttcaatcggcttaaatgaaagagaatgaaacaaatgaagtttgggctttgtgcggagtgatctggacaagaaatgagttgagatctggacgacagaagaattgggaacgaggggtttcccgagaaaatgaggagttgcagttgtcagattttgaaatctgaatatatatgggtagggacgcgtttgtatcgattacagcatttggtaatcgattacactcttcttgactgcctgtattcgattacacttttattgtaatcgattaccaaagagcatttcaaccaaactaaatgctga

SEQ ID NO: 14403 - DNA, 594 bp, Glycine max
  Clone ID: PAT_MRT3847_113012C.1
cgagttttttttttttttttttttttttttttagactcaaacatttggctagataattttataagtgatatatgtatcaaatttaatacactatgtgcccaaaacaatatttacttgacatgcacaaacactaataattaaaacacaacctttagaaataaaggtcaacttacaatagaggaaacatgagattacagacacggacaaatttaggcatttgatacggagtggatatagcaaatgcctagatttaatttatctagaccaaaagagttaagaagcagcccaatttattgagaatccacttaatctaattaatcccaaccaaaaatcaacagttaaccgaaacttactaagtaattagaccaacccaaataagtttaacaaaataaacaaatttttgactgataaatggctcttatggacaatacaatttttttgtcaattattttttcaacaagcctttgagacttccgatcatatacttggttggactcccagccttttgcacaccgtgtgatcctttcataccggttgctgaatgagccagagatcaatatccgagcattattctcgtgccgaattcggcacgag

SEQ ID NO: 14404 - DNA, 265 bp, Glycine max
  unsure (1)..(265): unsure at all n locations
  Clone ID: PAT_MRT3847_113013C.1
tttttatactcattattgtgaaacaaatgaatatttaaatgttacgcgttttaacaaaatggttcagaggaaaggtgaggaagagaagatagaaaattttgaaatttaaatttaaattgaagaccaaatagaagaaaaaattgaacttttacttttaaaggtcaaatnnnnnnnnnnnnnnnnnnnnnnnnnnnnnnntctcttttattaaacaaaagaaagtacatcattactcatctctttttcctgattttntcctgtgctc

SEQ ID NO: 14405 - DNA, 508 bp, Glycine max
  Clone ID: PAT_MRT3847_113014C.1
cacaaaaaaagcaccataatattttattattttggggggaagggggaacaagcctattggaaaaatcttgaaaatcccttagaacataaaaaacaaatgtcaaaaaccccggggagggaagtgcctaaccccaaaaattttacaatacaaaaataactccccaaccttaattttccccaaaaatcttacaccactcattgcaccttgagaggccccaaccatttttacagttccttccaccattcctggaaaaatgttcctagccagtccagtgtgaacccctatgaacgaccctgtttcctccaaacacttggtaaaaccatttcacaaccaaaagaactggttaaaaaataagcccaagccaaaaacacaaaagccaaaaccaccttttaggctaaaattttagcttaccacttattaatccgccccgtatatttttaaggggggtaaataaattgaatcaaaatacccacaggaacaacaaaaagccggcccttattttttaaaa

SEQ ID NO: 14406 - DNA, 285 bp, Glycine max
  unsure (1)..(285): unsure at all n locations
  Clone ID: PAT_MRT3847_113015C.1
gtgnacatccacactcaacttcanagaaccaattnccaataatggcggancttatctatgtcatctngatcntaatccccgtcatcagactcgttctctattctacgattcanaatcaaaacccaacaacttcnactnctccaatctntatnctcnattcaaccctttnggnggcaanttctattnatgctacaaaaaatgctgcgantgcacntgcncacngcactcttttcactttgnttccaaggtctacaccttttcctctcacacccgnttccgttaccg

SEQ ID NO: 14407 - DNA, 339 bp, Glycine max
  Clone ID: PAT_MRT3847_113016C.1
aaaacggtaaaatataatcatatttatgcagcatatttatatgctatggacttaaaattttaaaaatatatgttcataattctactatacatcttgcattccttaaataaattacactctatcaagcttatgcaattttgtttgagttggaattgatcacacaacattcccaaatttaattccttgtacatataatgccggtcatcaatcctctctttagttggtctttcttcttgaatatctttttaatcttcatcctttccttttcttactgcttggtctttcaatatccaatttaatttcttctagtcagctttttttttgaaaaaacattttttt

SEQ ID NO: 14408 - DNA, 166 bp, Glycine max
  Clone ID: PAT_MRT3847_113017C.1
ggcggtggtcatccatttagggccaatgctctggcttaccttgccaggttttgcagaaacctgaaagtcctaaatctttggggatgtgttaaagctgcttccgatactgctttacaggcttttggacaatactgcattcagctacaatctttgaaccttggatggt

SEQ ID NO: 14409 - DNA, 724 bp, Glycine max
  Clone ID: PAT_MRT3847_113018C.1
caagggaaatctcaaagtgtctgattttggattaagtgcattgcaaaaggtagcattgttcctttgaaccttatcctcagttccatcataagtatttttttactgagtcaaatttggatacgttatcagcataacgatgtcttaaacacgcggtgtggatccccaggctatgtggcacctgagctgctattgagcaaggggtatgatggagcagctgctgatgtttggtcatgtggggtgatcctttttgaattacttgcaggctatttaccatttaacgaccggaacttgatgaacttatatggaaaggtaaaatctatagtcataaaaaaaaaaaaacaaaactagtgtttgtaacaaataattcacattttctgataaatttcatgtgtaaaaagatatggaaggcagaatatagatgtcccccatggtttactcagaatcaaaagaaactaattgccaaaatacttgaaccacgtcctgtaaaggtagaaattcaagaactactataacactatatacttaaagtgtaaataatagataatgatttacccttcctccctatctctcatgcagcggataactataccagatattgttgaagatgagtggtttcagactgactacaagcctgtttttgcatctgaatttgatcagaacattaacttggatgatgttgatgttgctttcaattcaattaaggagaatatcagagagtcaacga

SEQ ID NO: 14410 - DNA, 538 bp, Glycine max
  Clone ID: PAT_MRT3847_113019C.1
accagatgagggggatgaaaaaaacaacccctaccttgatgatggatatgtaccacctggggactcatcacgagacgcaaatgatgatgatttttttgtttaaaaaaaaagtcacaaattattggcacacactgaattgaggcaaacacctacaattggggaactattatatatttcatttggaatgatcttacaatcacgtacctcttatttttatattcttaataatggatgcgccaactgacaggaacatcaccataaagtttagttacctgagacccaccataagcgcctggctgctttgggttgtccatgaaaaaatggcaccaccaattctgaagctgaaacctcattaagaggcaaatggctgaaagccttggaaatgaaagaggaacaattagctgctaaaaaaagaaatggggacaagaagccattacacataaaaattggtacaattatcttctcacacaagaaattggttaatgccactaacactgttctacttatagagtacaacacaaattttccctttcctttt

SEQ ID NO: 14411 - DNA, 390 bp, Glycine max
  Clone ID: PAT_MRT3847_11301C.1
gtaattgttcatcgggccggaaaagggaaatatacctgggactgggaaaaagttcccaagtttttttgtttaatgaaaaaggaccaccattttttggtttttaccgggatttatttcaaataatttcagagaaatcttggtttaaaaagattgataaataacactgaatattacacaacttgtaaaatttgtaacaaaaaaaaacggtttgggatgcgggaaaaaaaaataaaaaaggatccagtctctcttttccaacccaaaaacttacaacttcctaatcacatgtgttgaataaaaaacaggacccttacatgacttttttgggcttaagaaagtttgacttgatttccttgtgagggaaaaataccccaccttgtttgtttgagc

SEQ ID NO: 14412 - DNA, 189 bp, Glycine max
  Clone ID: PAT_MRT3847_113020C.1
tccaaggtccttcccttccttcctgccgattcccaggggcgctagcctccaacggcattagacttcacaccacagtcaccacacctgttcttccagggcaattctcgaggttactacacttagttcgagttctcaaacgacactgctagatcaagaccaatgttcgtgctggtcggttactccttcagc

SEQ ID NO: 14413 - DNA, 479 bp, Glycine max
  Clone ID: PAT_MRT3847_113021C.1
aattcggctcgagacggctgcgagaagacgacagaaggggggattatattcttcaacacctaagtccttcgaggttagagatctgttttgtgcttttgaaaattttaatgttagattctgcttctaattttataacttgtcttaagcttctttgatttctttgaattaggacttgagcatggtttagggtttgtaacatgattaaatcgattttcatttccattatctttctttttagtttctgttgatttccaaatcgggtataaaatatgaatctgggaggaaagaaaaacattaaaataacgaattatctccacattgtctttctaaaatcaaacgtaggataaaagaattttttttatgtaaggataaaagatgtttaatttatcaaagttgggattaagtaattaaagtaatattaatagaatatggatttagttggaatattttaaactgttttctaatcatgaattatatat

SEQ ID NO: 14414 - DNA, 254 bp, Glycine max
  unsure (1)..(254): unsure at all n locations
  Clone ID: PAT_MRT3847_113022C.1
cttttgggtaagatgtcgagtttcacagcagcaatggtgtacgtcaaagaaaaggngtcaaaagcctacttcaagagatatcaagtcaagttcaatagaagaagagagggaaaaaccgattaccgtgccaggattcggttgattaatcaggacaagaacagatatcgcactccgaaataccgatttgttgttcgctttagcaacaaggacattgttgcaccaataatgtctgctagcattgctggcgatattgt

SEQ ID NO: 14415 - DNA, 751 bp, Glycine max
  unsure (1)..(751): unsure at all n locations
  Clone ID: PAT_MRT3847_113023C.1
gttgtcttgtgttgtatgcattaaccaacaaaccaatgcgcgttctgcagaacgccgggatccgcgtttttcgatcactccattccaccctatcttaaccctcaaaacctccctccttcttctaattacccacattagcaccttattattataaatgccgaattgccgttaaggtaattagttaatgtgtgtgattgtgtcgtaatttaggattctgttgcaactaacgaaacagttaaaccgaggattaaaaagcagaaggcgttggttggtgtgtggtattcggagaaattgaggttgatcggcgccaacaatgtctgctcgaagtgaacaccaatcggttcctctttcggtgctgctgaagcgcgagttggcgaatgagaaaattgagaagcccgaggttgttattttgcacggccaagctagtgagaataagaaaggagaggatttcacgctattgaagacggaatgccaaagggtgcttggagatggggtttctacctattctgtttttgggctattcgatggacacaatggatctgctgccgctatttatgccaaggagaatcttctaaataatgttttaagtgcaattccttctgatcttaacagagatgagtgggtagcagcgttgcctacggctttggttgcaggctttgtaaaaactgataaagattttcaagagaaagccanacatcaggaacaactgtaacctttatgattgtagaaagatgggttttaacagttgcat

SEQ ID NO: 14416 - DNA, 261 bp, Glycine max
  Clone ID: PAT_MRT3847_113024C.1
gtttgaagtctgaaagcatcaactgagattccaccaacgatcggcagtgcgacggttttttacgagttgggttatgctaaactacgattcacaccgtacgcgtaccagtttcgttcttccaatgctctgcacgtctcttgctgccaatgcccatttcgagtgcgaaaatgttgccttgtgataggaatcaacgtaagtacttgtatgtggattttggtggtattgattttcaatatccgctttatggtttgagcttctatt

SEQ ID NO: 14417 - DNA, 842 bp, Glycine max
  Clone ID: PAT_MRT3847_113025C.1
gctgagtcgaaaccatgcacctgaagagcgagtgggagaggcagaaagaagagaaaaaaggggaatggcatggttgcagttgcagagaatcgtgaccaagggaggtgctaatttgatctcaccactcccactttcacgattcttctcgaaatcttcttccccctatgttgtgaaagttggaattccagagtttctaaacgggattgggaagggggttgagtcccacgttcctaagcttgaatccgaaatcggtgatttccagaagcttctcctcactcgcaccctcaaactcaagaagcttggcattccttgcaaacacaggaagttaatattgaaatacacacacaagtacaggctgggattatggaggccacgtgttgagtccatcaatgcctgattggtttctaattagtaagtagtcgctgtttgttagaccatattgcaaatgtttagccgcagcagaatgaaaagttcagctcactgtcttttaaggccacccatctttttcatcacattcatctctagtggacaaagtttggtttttgcaccggttatgtacaatggatttgtcttaattgacagtttgtgttagttatttcataattcatatcccgtgacatcattgcatattatgtaatgtatcagttgtttttagcgataagagtattgagggcttaggagtccgcaatgctttcatttatttcattgtagctgcgtttaaatccaaagatgctattgcagttttttgcatcccttattagttgttccatgattgaccggatactctgttgtgcatgataagactagacattacttatcttaaaaaaaaaaaaaaaggccct

SEQ ID NO: 14418 - DNA, 337 bp, Glycine max
  Clone ID: PAT_MRT3847_113026C.1
ggaacaaacctaaaacctttttacttttgggaagttaaaatcttttgggggattgaaaacgggggctttttttatccagacataatcaacttttggcttgccctaaatataggaacattgatcccttgggcagggggggtcattcaaggggacaactttttatcccaaccgggggggccccccctttttttaggttaaaaactggtcgggcttttttgaccaggatttaccccataaccttgacggggggaaataccccttgatgtaccaggattgggggaaccactcctttgataagttttttttgcaccaccaattgaccccccggatacaaaac

SEQ ID NO: 14419 - DNA, 334 bp, Glycine max
  Clone ID: PAT_MRT3847_113027C.1
tttacggtttgttaaccgcgatcacaggaacgcacacctcctagcctggaaccaacgcaacccattcttgacacaaagaatcactcaatctccgccgactacttcacgggccactacgaaggggaaggaagattactctttgtgcaggtcacatactttccaaaaaactgtcttttcgactctgaatacattggcagaacactcggccatatgatagaggacttcgggggacaattcaacatttgaggtctttttctcattggtttgttaaaaagcaagctgaccctcgggtaccaatggctttgtgctagcgctctcctacatggaataggat

SEQ ID NO: 14420 - DNA, 296 bp, Glycine max
  Clone ID: PAT_MRT3847_113028C.1
aagggtggcaaaaaaacaaaaaaggggagactatttagagacttgccatggacgtttcattgggagtgtattgtcctctgcttggtcttcacgacaatatggcacttactgttgctcatgcccaattcttcccgttcagatgggcacccaagtcgaaacttgcctccgtcgttggaagtcaatgcgcctcctccccttttggtgtgaaaaaccctaattgtaatcgacctgaaacttttgatcttcatccgaatacgctcgcttatcacattcatgcgttccaatttaggaaacat

SEQ ID NO: 14421 - DNA, 486 bp, Glycine max
  unsure (1)..(486): unsure at all n locations
  Clone ID: PAT_MRT3847_113029C.1
cccacncgtccgaagacgccagaaggggtgctagagtactacttgagggggagcaagactgaatactctaacattatggctcccaagggttgaatctgtttggctgctcaccgcaaaacagcactgtgactgagtcactgtcgtgccggagactacggactgggcatgaactgctgcagaggctgatgcacttaccctgactacatctacactgaacaaaccaccctcgtctcctagcgcatcaggaaacactgccttgtctaacgctctaataaacatctctcataacgtgtctgcccactagataacgatgctctactgatggctgcccatactcatgactgcaacccgtgtcactaacgaaacaggatgtaagctagagcaatcttaaatcacaggtacatcctaaaccatcaataatgctaaactatggaaatgcccactgaaaacttatctgtgctgatatcctaggtctctctgcactat

SEQ ID NO: 14422 - DNA, 310 bp, Glycine max
  Clone ID: PAT_MRT3847_11302C.1
aaaaaaaataaaaacaataaaaataaaaaaaattaaaaaaaaaaaaaacaaaaaaaaaagggagaaaaaataaaaaaaaataaaaaaaataaatctaaaatacataaaaaaaaaaaaaaaaaaataaaaaaaaatggtgaagccattttaataaaaataacttaacatacattttattccaactgaaatattttattatctgatcccataatttaatttcattgacctcatttaaaaaactcacatattggaaaacccaagcctttcccaaatttaattacttcaaagaaaatacatttttgcccaacta

SEQ ID NO: 14423 - DNA, 1003 bp, Glycine max
  Clone ID: PAT_MRT3847_113030C.1
ttgtgggtgcattttcaagctttgttaaggtatgctgttattgttactctacaaactattgtctgttaattggaataataagtcacagatcataagcatcacgaagtaatctatatataacttcaccacggctgcgagaagacgacagaagggggaacaatgattatctgcctacccttttcaaggctaactaccctccttatggaagggactttagcaaccatcaacccactgggaggttctgcaatgggaaactagctaccgatattactgctgaaacactgggttttaagagttttgcacctgcatatcttagccctcaggcatcagggaagaatcttcttattggaggaaactttgcttcagctgcctctggtaatgatgaaaaggctgctattttgaatcatgcgattccattgtcccaacagttaaaatattacaaggaataccaaggcaagctggccaaggtagttggcagtaaaacaagcagcattgattattaagaatgcactctacatattgagtgctggcagcagtgactttgtgcaaaactattacgtcaatcctttgatcaacaaagtcttcactcctgatcattattctgcataccttgtgggtgcattttcaagctttgttaagatcgggtgctaggaaaattggagtgacttcactcccacctctgggttgcctacctgctgcaagaactctatttggtttccatgagaaaggttgtgcctcgaggatcaacaatgatacccaaggatttaacaagaaaatcaaatcagccgcagcaaatctccaaaagcaacttcctggtcttaagattgtagtctttgatactttcaaaccactctatgaccttgttcagtccccttcaaaatttggtaagcaatactttggctagaatacaatggcatggctttcatctgtttgtgtaaaagggtgctattgattcttctaaactgtcttgtgatatattcaatcaatatgttttgtggaggtt

SEQ ID NO: 14424 - DNA, 672 bp, Glycine max
  Clone ID: PAT_MRT3847_113031C.1
acaaataagttagggtgccttaaccttcttctgtctccagaacttgatacagtttatataaaattcacaagatactgcaaatcatagacaaaggcacaagttaaccatggtaaaatacacactgaatcatagacaaatcatacaagaatgatccaatcgaattctcaatattcacttcacaacctaaagggttgcaaatagttcccatcaaggcctttctcaaaataatgtgctgcgacatcttttacagtagtgtccctatagacaggtggattatcttctgataacagttcttttattggaccaactaccttcgatgaactctgtggagatgagtttgcaaagaaacttgcaactgaaattctggggcctgtatacctcgataagacccgatgatagacactgacaaacatgtcatttgttataagctgcagaagatccccaatgtttacaacaagagatccatgcaccggaggaacatcaacccattgattctgatgaagaacttgaagaccacccatctgcatactgctggtatttcttcgggatacggaggatcaggagtaacaaaaaaacaattgagtccctccagtttgcagcagggtctctataaagagtaccattggagaaatatctaactttcttattcatatccctcgagtaaaagctttt

SEQ ID NO: 14425 - DNA, 499 bp, Glycine max
  Clone ID: PAT_MRT3847_113032C.1
tggtttggaacctttgggctgatttatgtgcttgcatggtcgtgatgatagaagggggccaactcgaagactcccaacgcgctagtaaataagtcggtcgtctccttcgaacttaccgtctcccgtaggctatcagctgaaccggacgtaagtcccaataatccaacgcgctcgttaatgaatacgggccccggatccgccaattccgagaagtctccgacttacccgaataagacatgaccctcctttgttcttaccggagaaacgaaactctctaggtactccgacgcttaccctaacgagtcctacggttcattctaacttaccgggaaatctataaactcggaacactcgaacgccagtagcaatcccagcgatacgatagagtcattcgaaatatccggcgactcggctaatccaagggagtccgattctagtaataattaaacttgagtctccttccatctgcctggcaggtccgaaaaaacgataaagtcta

SEQ ID NO: 14426 - DNA, 1608 bp, Glycine max
  Clone ID: PAT_MRT3847_113033C.1
ggctcgagcttatctaactattgtacctttgcaaaataacattctttcgtccgttcgaattcgtgtagcacagagagaagagaagaggacttgtattttctgccagtttcccagtatggtggccacaagcacaaatcaatccgagttagaaacaagtaagaaggattccacttatgacagaatagctgaagtcaaagcctttgatgaaacaaaacttggtgtgaaaggcctcttcgattctgggatcacaaagataccacgcatgttccatcatgccaaggtggaggaccacactgaaaccatgccaaatgactcaaacttcagtgtccccatcatagatctccaagatatagacacaaactcatcccttcgtgtgaaagcacttgacaagattcgaagtgcatgcaaggagtgggggtttttccaggtggtgaatcatggtattgctgttgatcttttggatgagatgatatgtggaatccgtaggtttcatgaacaagatgctgaggtgagaaaacgcttttactcgagggatatgaataagaaagttagatatttctccaatggtactctttatagagaccctgctgctaactggagagacacaattgctttttttcgtactcctgatcctcctaatccagaagaaataccatcagtatgcagagacattgtgattggttattcagagaaagtaagggcattaggctttacaatctttgagctattctcagaggctcttggccttcattcttcttatcttaaagaattggactccgttgatggacaatttcttttgtgtcactactatcctccatgccctgaacccgaattaactatgggtacttcaaagcacactgatattagcttcatgacaattcttctgcaagaccagatgggtggtcttcaagttcttcatcagaatcaatgggttgatgttcctccagtgcatggatctcttgttgtaaacattggggattttctgcagcttatatcaaatgatatgttcgttagtgtctatcatcgggtcttatcaagtcatacaggccccagaatttcagttgcaagtttctttgcaaactcatttcaacagagttcattgaaggttgttggtccaataaaagagttgttatcagaagacaatccaccaatctatagggacactactgttaaagatgtcaaagcacattattttgagaaaggccttgatgggaacaattccttgcacccctttaggttgtgaagtgaataatgagaattcgattagagcactcttgattcctttggagttggctttagtgtgcattttatcatggttaactttttcctttgactgcgattttcagtatcttgtaacttctaaataaacaacatcaagttctagagacagagcatggttaaggcacccttaattatttgcactgcacaagagcaaagtttctagtttctgtattatgataatataatatagagtggtgagtatattattctcacagtatatatggatttattttatgtaagagtggttggaagtggatcatcctcctacttcaatctatatagtatagactgtaattccctgtatgcactttctttagatgagttagg

SEQ ID NO: 14427 - DNA, 562 bp, Glycine max
  Clone ID: PAT_MRT3847_113034C.1
tattaatctttcctcatcatgaaaatgagattgcacagagctgggctgctgaccatgatagccatgtcagttattggatgcataatgggcatgtcactaataacaatgaaaagatgtcaaaatccttaggcaactttttcactattcgtcagatcactgagcgttaccattcacttgctttgaggcactttttgattagtgcccattacagatctccactaaattactcaatttcacagctggagaactcatcagatgctatttactatatatttcaggtaagcagcctccaaaattgtgtcaggaattctgtgttgttgcttaaaagttgatgggtgagtttctctcttaaggttgacagagacagagtcttgtcattatgtaatctgaaattgtttttattcagtgttatgtcctgcaaatgttttttcgtgaatagatctgaaattttgtatcctaattctgctgcgtaagtaaagcatgttgtgtcttggatttagaattgccagtgcttctttccttctacctagatttttttgaggaagaagattttactaatgtg

SEQ ID NO: 14428 - DNA, 470 bp, Glycine max
  unsure (1)..(470): unsure at all n locations
  Clone ID: PAT_MRT3847_113035C.1
cggctcgagccaaaaccaaaattcctaatatcaacgtacgccttcccctcgataaggaaagtaaaatccacaagtacattcagcgataaattccttgctccgctactaaaactctctctttcaagttttaacaacaccccaccaccaactccatctcttctatccccaacatcactcaaaaaaaaaattaaaaaatttccctcatacaccttctcccatgatctgcaagcgaagctttgatttcacaaaagctaaatttagttaaacacctgcatattaaatttttctgctatatatgcatcacatgtccctctcacactaaacaaaaacaccaccctttgctttttgcttttcataagaacttccataaatagtcaacgactcagccttcctttggtttttttttaaattaaggtgaaagggtagtgctcatggccagngagaagattcanattaagaaaatcgacaac

SEQ ID NO: 14429 - DNA, 1423 bp, Glycine max
  Clone ID: PAT_MRT3847_113036C.1
agaagctgtttgggccgtgcgaatgggagaggtttgatttgcttgttttgccgccgagttttccttacgggggaatggagaatcccaggatggtgttcttgacgcccactgttattaagggggatgccaccggtgcacaggttgtggctcacgagcttgctcacagttggactgggaatttgatcactaacaagatacttgaacatttcaggttgaatgagtgattcactacttatgcggagaggaggattgtggaggctgtccaaggagaacaaagagccgcgttgaatattggaatcggttggaggggtttgaatgaggacgttgagaggttcaaggacaacttggagtttacaaagctcaaaaataatcaggaaggaattgaccctgataatgtctattctcaggttccctatgagaaaggttttcagttcttatggcgcattgagcgacaggttgggagacctgcatttgatgagtttctgaagaaatatattgctaccttcaagttcaaatccattgataccgaaacattccttgacttccttaaagccaacatccctggcatagagaaccagattgacctattgctgtggactgaaggtaccggcattcctcctgatgcttatgaacctgaatccactgcttataaaacgattgtatcactggcaaatgagttcacaaatgggaggatgccaagggaggatgaagttgctggttggcaaggtcaggagtgggagctctacttggacaacttgccaaaatccattgaagcttctcaggtcatagacttggattcacgctacaagctatctgagtcaaaagattacgaggtaaaggtgtcatttctccaaagggctatttcatgtggatgcaaaacttactataatgaggtagagaaaaccttaaaaggagttgggaggatgaagtatcttcgtccactttatactgctcttgtgaaaggcagtgggaaggaagatggtaaagtatttgccaaagaatattttcagaggctcgtgagtgttaccatccaattgctcagggtgttgttgaggccatatttgccaagcatctctagaaggaataattctcagaatgttttatgtatttgaacatctgcaagttgtctgagtgtactcctttacaataaacataaggtttaattttctttaacagctgcagcaacccaagttctttcatagttcttcctgttggagcatctcatctagtggtttatagggttatgagaagaggaagaagactagataggaattggtgatgaagatttcaactgtgagaattttatcctaataaggaggatataagaattttttgtgctaaaatttgctcggacggcttttgcttgtgtttataccttgtactcaactttcattatattagagattttttcgtcttgcgtagg

SEQ ID NO: 14430 - DNA, 504 bp, Glycine max
  Clone ID: PAT_MRT3847_113037C.1
tgttcctgaacaatgttcatttccaaatgagtttactttgttggttaagtttggttttcttaaaaaaaaaaaaaaaaaaaaaaaaaaaaaaaaaaaaaaaaaaaaaaaaaaaaaaaaaaaaaaaaaaaaaaaaaaaaaaaaaaaaaaaaaaaaaaaaaaaaaaaaaaaaaaaaaaaaaaaaaaaaggggggggccgtttaaaaggttcttttttaacgaccccgggcaggcaaggtaaaagcttttttatggggcccccaaaatcaaatccccgggccggggtttaacaacggggggacgggaaaaacccgggggtaccccaattaaatcccctggaaaaaaacccccttttccccagggggggaaaaacaaaaaaggccccccccaatccccttcccaaaaagtggcccaccctaaagggaaaagggaaccccccctgtacgggcccataaagccgggggggggggggggttcccccagggggaccgttacatttgccaggcc

SEQ ID NO: 14431 - DNA, 186 bp, Glycine max
  Clone ID: PAT_MRT3847_113038C.1
tcgtgccttatcgctgtggttttcatcgtcttccttctcttatatttcttctccctcctgtctccgccgtacgccgaaacaatggccgtaaaaggagagggccctgctctcggaatcgatctcggaaccacctacccttgtgtcggtgtgtggcaacatgaccgagttgacatcatcgccaacgac

SEQ ID NO: 14432 - DNA, 723 bp, Glycine max
  Clone ID: PAT_MRT3847_113039C.1
gaattaccgggtcgacccacgcgtccgacaccactcctttacaccctcttcccaattcccctcacgagggcgtgcccgtccatgattcaattcgggcacgcttttctccatgttcatctgtcagattccgcgcagaagaagaaaaaaaactctcctttctaaaatgggtctctctctctctgtttattccccttgatgtgtgtttcactgcaccgtgtttgctggcgctcttagatctgtttcttaagcagtgcccacgaggttagatcgcaacatttccctgccaaaacttcgtttgctactttaccccctttggcgctgtttgaaggattttttttttttttttgattcagacccactttgcaagacagtgttttgacctctttttatgctactttatcccgaaacagcaaatgggtcgcatcgctttcagcctcggaatttgatgacgacgatgatgatggagcatggtggtgacatgtgtaatcatggggttgttaataattaggggtatattaggttttggactggtttgtatttgtatctggtaatggtgtttaggttcagagaccttgtggagttggcatctctgtgtcaggggtgtttgcatttgttgcaataataataataataataataataatgggcaacggcacttctcgtgttgttggctgtttggtgccatttaatggcaaaagtggggtgatttgggagtttctagag

SEQ ID NO: 14433 - DNA, 335 bp, Glycine max
  Clone ID: PAT_MRT3847_11303C.1
gcgaccttgcttgagctctttctttctctcaccacctttgttctttgtccatgtgcccaaagctctccaggccttcatatcaggatcacttattgtttttcttgccccttattcacggagctggcgcttctttatgccatccactccattgggcatcatctatacgtgtacatcgatatgaccacaaactcaccggcttttcatgcaagacgagaaaatgccgcctgagctcacgcctgatacattccaccagaccacagcggacgatcttatggtccacaaccgtaccagatcctggaatgcctggatcatggccatttatgtcaataactatg

SEQ ID NO: 14434 - DNA, 328 bp, Glycine max
  Clone ID: PAT_MRT3847_113040C.1
tatttcttacctgccaaacctatatgaagatcattaggaaacggaagattattaccttgttgggaaaggagggatgacttgtgtgtactctgaaccggcgcacggggaaaggggccaacaacactgcaagcctgcgttatgctgcgaagcacgctattcaacattactggagctggctgttgctgggtgggctgttgctcctgaagtgaagaatgagcattaggaggcattgactgcataccccaacggcttcatccgtatcatcggattcgacaacgttcgccaagtgcagtgcatcagcttcatcgcctacaagcccccaggcttc

SEQ ID NO: 14435 - DNA, 215 bp, Glycine max
  Clone ID: PAT_MRT3847_113041C.1
aaaaaagggcaaattttcattcgaaggttgttaaaaaaaaaatcattcggcattaattttaccccccccgggaattattttattattcttcacaagagaagggaggggcgggaccataatctatttggtttcctatttcttaaccttacccatggttgaacctttaaaccaattaagggccccttttattggcctcccaacttttaaggtttttt

SEQ ID NO: 14436 - DNA, 498 bp, Glycine max
  Clone ID: PAT_MRT3847_113042C.1
gtatgctattgaacaaagggcgaaagaatgtagattgggcagtaaagacgcacataacattaaattatgatagacagggcgatgcggttgaggagaagagacaagaagggggacgggcgaggagtcgcagcgatttgaccccaagggagcacagatcgtgaacctgaaattccaggcatccggtgccagatcgcatttcacgttggacaccggagggagggtacagtaataacacaaggacagaaactatacatctacctaagatctacttcgttgacgaggcaagagggttgacggtctgattgtctaacgtctttgcatcttgtatacgtgttttcgacggggtgttgatctatccccgcttactacagagtctcctccactgcttatcaccttcacggccaactccgtagcctcttcagtaatactccgtactgagacaaccttttgcagtccaatctattaacgtagcgtacaatctgcattctgcgccgagcc

SEQ ID NO: 14437 - DNA, 152 bp, Glycine max
  Clone ID: PAT_MRT3847_113043C.1
gtatttttaagctgttttaacatatacaaattcggggaatttgggggacttcttgaagcaaatatgtctttcattgctacaattgaagcggatactacaaaactatattgacaagacatctctcattggtaattgatcactcattatgattg

SEQ ID NO: 14438 - DNA, 1474 bp, Glycine max
  Clone ID: PAT_MRT3847_113044C.1
cagattgaatatgatgaggagaagcaaacttcaaaggatagatggggtggacttgcctatgacacttcagatgaccagcaagatatcactagagggaagggaatggtggacactctcttccaagctcccatggaaagtggcactcactatgctgtcatgagttcctatgattatatcagtgccggacttcgccagtacaatttagacaacaccatggatggcttctatattgctcctgcatttatggacaagattgttgttcacatcaccaagaactttttgaacttgccaaatattaaggtccctcttattttgggtatttggggaggcaaaggtcaggggaaatcatttcaatgtgagcttgtctttgccaagatgggaatcaaccccatagtgatgagtgctggagaattggaaagcggaaatgctggagaacctgcaaagttgattaggcaaaggtatcgcgaggcagcagacattatcagaaaaggaaagatgtgctgtctcttcatcaatgatcttgatgcaggagctggtaggcttggtggaaccactcaatacacagtcaacaaccagatggtgaatgcaacccttatgaacattgctgacaacccaaccaatgtccaacttcctggcatgtacaacaaggaggagaatccccgtgttcccatcatagtcactggcaatgacttctcaacattgtatgctcctctcattcgtgatggacgtatggagaagttctattgggcacctactcgggatgacaggattggtgtctgccaaggcattttcagaacagatggtgttctaaaggaggatattatcaagcttgttgacaccttccttgggcaatctattgacttctttggtgccttgagggccagagtctatgatgatgaagtaaggaagtggatttctggtgttggggtggagaatattgggaaaaagctggtgaactcaaaggagggacctccaacatttgagcaaccaaagatgactcttagcaagctccttgagtatggaaacatgcttgtccaagagcaagagaatgtgaagagggttcaattggctgacaaatatctcaatgaggctgcacttggagatgcaaatgatgatgccatcaagactggaaacttctatggacaaggagctcagcaagttcatgttcctgtccctgaaggttgcactgaccctactgctgaaaactatgatccaacagccagaagtgatgatggaagctgcacatacaaattttaggtgattcttaggtaaattgtgagtagataaatatagttttgaaacagcaaaataaaagaatgttacaatgttttccacattagaattcacttttttatgtaagatgtagattttgtgttattgccggtgtaaccctttgttgggttttatgggtgacaatatgacatcttatagctagcatagttggaaatatcatttcctttttgtttctctgttc

SEQ ID NO: 14439 - DNA, 361 bp, Glycine max
  Clone ID: PAT_MRT3847_113045C.1
ccttaagctacttagtgctgctccttgcagctctaagtatatcccctcgagtgattgcaaactatgagaatccaccagtgcacaagttgttccactgcgaaaccaccagattatacgcccgccgtggcgtagccttctgtgtacaaacctacagttgaaaatcccgccttcaatgagtgttcagatgcgaagccactaaggtacaagccgccagttgagaaacccgcagcgtacaagccctcagctgaaaaaccaccagtgtgcaagccgccaggtgagtagccaccagtgtgcatgccgccacaggcgaagcctccaagttacatgacccagggggagaaaccccgagtgtacaagcccc

SEQ ID NO: 14440 - DNA, 277 bp, Glycine max
  Clone ID: PAT_MRT3847_113046C.1
cccaactgttaggtgaaacatcaccaatggctgaactaagagaccttagctcttgcaataactaaagcttctacataaccaagctgtaaattgaagaaaatgcacgtctattctaacttaattttactactttaaccattgatgttcttctgattttgaagtgaatttaattaacatatggaggctcgtttaagcttttggtgcgagcaatgagtgagctgagcttttatttgtgcagttctgcgtggcactagccttagtttacctgtatttttcc

SEQ ID NO: 14441 - DNA, 465 bp, Glycine max
  Clone ID: PAT_MRT3847_113047C.1
ccccggaaaggagttcgacggggaggttaaacattcgttacaaagaccaatgaattttagccttccttgacttaacatttggcacacaaaaatgacgttctacaagccactacttgcaaagggggtaaaatacttactatttttatagggaataaaaaaaaaatcccttggttggacaaccagggtttgagaactgattgaaacccttttaacggaaacccaagggcgggttagctaacataaaatatcagttacgtagggctaagcgcttgcaaggttcactacttgggaatgtttaaggttatccagggggggagggaaaatttctgtgggattctgatttattagaattatccccaaatcaaatcatatccgttttgtccaaacaaacaaaatagtcctccatagcttaaatattttttcaccagcctccacaagaccccattggaattaagggatataaat

SEQ ID NO: 14442 - DNA, 239 bp, Glycine max
  Clone ID: PAT_MRT3847_113048C.1
gaaaaaagcatgaacgtagaaaatttgatgaggcataaaaacaaaaaaggaaagggggggaataacaaaagagagtgattccactactaaaaaataaaaatgaagattctataggttcaccaaagtgatagttgattggttaggtgatgtaaaattgttgtgcttggtaattctttaaaggtttctcggggtggtggcttttgggggtgatccgtttttttctcgtttgggtgatagtt

SEQ ID NO: 14443 - DNA, 263 bp, Glycine max
  Clone ID: PAT_MRT3847_113049C.1
ggctcgagccttaacagaaataatctccatgactacattacatattgaaagggttaagattggaaccacgcgggcaactgtgccaagaagaagaacaccaccaacaacaccaacaacaagaagcatggagacaccactaataataatgatggcacaaagactggcgctgagaagaagttcaaagcgcatacaccatcacagtctgtgcctaaaaatgaaaccattggaagctacatgtttgattgcaacaaagatgccatggg

SEQ ID NO: 14444 - DNA, 835 bp, Glycine max
  Clone ID: PAT_MRT3847_11304C.1
ccacgcgtccgcaacccaccgcgaccggagctccgctctgccgcgtccgagctcgcctctgttctgaaccagttttgttttgttcctttgcggcttgtttctctgcttgtgcgagctattgttccgaaaagcaatggcaagtgcattgagtagcagagttgaatctgttcgaaactccccctttctaagattttcgctcaacttcatcagagcccttagctcttcttcgtcttcttcttctgccgtttcttctgctgagaaccttaagaaatcaaagcgaaggaagaagaagaatttgttcgaggtggctcagttcttacctaactggggaatcggctaccacatggccaagactcactggaatgaggtttcttacgaaatcactaaaataaatctctacaaggatggaagacatggaaaagcatgggggattgcttttaaaaatggcttgccgttagcagatgctcccaaaaagattagtggagttcacaagcgctgttggaggtacataccaaatgtagtaaaagcattagaaagctcaacaaacttaacgagctcaacagacagtggcttaaaagttgaaactgaagcaagttgatgctttctagtgactttgggtatttaggtcatcgacattataccatgccttagagttgattttcaatcggcattgttgttttcgaccatggttgcattttttagtcgaccatgaaatgtgctctgagggagtaatctagttggatttggttctttctttgtgtttgtctttgacccatattttcgaagttggtattaccatcttcaagaaacataacgaaacgaggatttgagaatc

SEQ ID NO: 14445 - DNA, 422 bp, Glycine max
  Clone ID: PAT_MRT3847_113050C.1
cctatcttttgtgggccacacacagtaatgatttagatgcttgatttctgctctttagtcaatctgcttcaaagttcttatttgaagtatggatttcttttgtttgttttatttcttggtgtgtagtttatgatcaagctggtcaatactatccttttggctataaggatctcttattcgttactatgctctggcattattctcttaatgcagtttccttgacgaaatataagtttctgaccgttcaatgcaaactcctgagcaagagttcaaagtagttgaatgctgtgaaagtatggttggccttcaattttccaagttcctaagaggagccaaaattttcaagttcagcaactcgtggcaggttaagttcttccattgagttcatggaaagttcaacatatggctaatttccttttatg

SEQ ID NO: 14446 - DNA, 447 bp, Glycine max
  Clone ID: PAT_MRT3847_113051C.1
tcctttcgtccggaaatcaggatgaaccgcgatcataggttgacacaaccttaaaacgggcaacgaaagcaagagtttcttgattccaagaatctctcaattgctcactacttttttgggtacgatttcttacgggaaggaaaaccactctttgtgctggccacagacttcgcgaattattttcttttgcattcttagtttatttgctgaacactctcctatttgatataggacttcgtgtcagatttaaactagttctgtgtctttttcagagctctggttaattacaagttgaagctggagaaaccttggattagtgctcccactctcctatgtggaataggacttagtgggtagacttttctatctctctcctttctatcactctctacttctcactgatccgaattggcgctcaaagcggtcttatttgaaaaacacttgggc

SEQ ID NO: 14447 - DNA, 383 bp, Glycine max
  Clone ID: PAT_MRT3847_113052C.1
gcgatcctctctattcttgaacgcagtttaactctgcttcctgggctctattcgaaatcaacgacgatgagtccacagaggcagcagccacaaaaaaaggggaagagggaaaccgaagactcaaagccgttcccgttcctcaaagctggccttcagtcccgtcggcggtcctcgctacctaggccggcgctacgcccagcgcgttggctccggttccccggtatctatcgcggtctcgaatacctcgctgcgagtttggagctgcgggaacgctgcaggacacagaagacagatcgtccgaggcacattcaactgcggtaggacgacagagcgacagctgaggatctggaccattgcaacgggggtctgctacattcacagaa

SEQ ID NO: 14448 - DNA, 1154 bp, Glycine max
  unsure (1)..(1154): unsure at all n locations
  Clone ID: PAT_MRT3847_113053C.1
aacaaatcgttcctaacattcatttttgtaaggcttctatgatatttcaccnnngaaaaaaaataaaaaaaaagccaactaagctaaattaaaatgacacgatgagtattgaatactgtttatctaaacccaccaataaaatataactgtacagtctgtagaaattaaaaaaatgtcataacattaacattattgccacattcatatatatatatatatatatatatatatatatatatatacccactgcaattctctcccaccaaatggagtccatgacgaccagactcttcctcttcgcagggactcttctactgcttctactctcacgcgccacgcacgtgtcatccgccaccttatgtccgccgtgcggcaacacgacggtgccgtttcccctgagcacaaccccaacatgcggcgacccgtcgtacaaaatccgatgcagcagctccaacaccctcgtcttcgacacgcttaacaactcctacccgatcgagtccatcgacccgaactcccagcgcttcgtgatccgacccgctccgctgttaacgaacacgtgcgtgtccaccgataaagtgcaccaggggatccagctcaacaccaccctccccttcaacatcacaagctccaacaccatcgtgtatctcaactgcaccaccacgctcctccagtccccgctcaactgctccgccgccagcgcctgccattcctacatcaaggccaccgcctccgccgccgcatgccagggagctgggccactctgctgcacctatcgcaccggcggctccagcaactcctacatgcttcgtgttagagactctggctgtagcgcttactctagtttcgttaacctcaacccggctctcccagtgaaccgctggcccgaaccgggtttggagattcagtggctttcgcccaaagaaaccgtgtgtgggtcccagcaggactgcgactccgccacgtcgacttgcgggcctgatgcttcttctgcgctcgggatcaggaggtgcttttgtaacgatgggctcgtctgggaccctatccaaggggtgtgcgctaaaaaaattacttgccataaccctggtggttgtgacgactcaacaagcagaacggccataatagcaggttcagtatgtgggggttgggagctgcac

SEQ ID NO: 14449 - DNA, 106 bp, Glycine max
  Clone ID: PAT_MRT3847_113054C.1
cggactctttcgaccaagcgcaggcgcgttcttaccaggtagaaatgactggggtgcacacggtatgacctaactaatggtgtctgacgatgccaggattggtgtt

SEQ ID NO: 14450 - DNA, 716 bp, Glycine max
  Clone ID: PAT_MRT3847_113055C.1
ttacggctgcgagaagacgacagaaggggagcatagtacagtggtagtggcaaagaaaagaaaaaacgaaatcaactattgacagcgggaataacgtattaacatcaacaggcctcgctttgagaaatcagacggcggggagaatgggtttatcactcttacggtgggttctgccgctgactctgttgctcacctgcgccctaggtttccaatcggacgagcttctcctcgacgacgaagagttcggcatcgaaggaggacgaacctcctttgattccgattcgcatccaccttccaccgcctccacctcgaggaagaggctttccgactcctcctccgattccaagatccagttccctctccaacacgctttcggcgactccgatttctccgacgccggcaacttctccgctcgcctcaagacttggagccacggcgcccagacgctgacgaagctgcggtttaagcgtgatcttttgactgacgttgagcagaggaaatttaaagagctgttgcgagaagatgatttctataggattagactgccgtccaatgttttgagtcctcccggccgggaatatattatttcttcagtgaaagcacgatgtcttccaggggatggattggaggagcattttgtaatacaaatggaaggtgttaacatcttggctgtcagttatggtgccccaggggcttgcccttatccccgacaactg

SEQ ID NO: 14451 - DNA, 1598 bp, Glycine max
  unsure (1)..(1598): unsure at all n locations
  Clone ID: PAT_MRT3847_113056C.1
tacggctgcgagaagacgacagaagggggaggaacttaatggtaccagagtagagtagtgcggaagaaaagaaaaacgaaatccctcgctttgagaaatgggtgtattactcttccggtgggttctgccactgactctgttgctcacttgcgcgttaggtttccaatcggacgagcttctcctcgacgaccaagagttcggcatcgagggaggacgagcctccttcgattccgattcgcacccatctcccacctccaccttgaggaagagcttttctgactcctcctccgactccaagatccacttccctctccaacacgctttcggcgactccgatttctccgacgccggcaacttctccgctcgccttaagacttggagccacggcgcccagacgctgacgaagctgcggtttaagcgcgatcctttgactgacgttgagcagaagaagtttcaagagctgttgcaaggagatgatttctatacgattagattgccgtccaatgttttgagccctcccggccgggaatatattatttcttccgtgaaagcacgatgtcttccaggggatggattggaggagcattttgtaatacaaatggaaggtgttaacgtcttggctgtcagttatggtgccccaggggcttgcccttatcctcggcatctcaagcttcctgcaaagtggtctttcaagtcacacacagttctaaagagcagtgaacaggcaccgagagctccaatatttgctgaagaggcacttggcgggcaggagggagatggtgaggctgtacagccaatagaaaggtccttttgggctaaatactggatgtacctgatccctcttggactcatagtaatgaatgccgtcactcaagctatgaatatgcctgaggaacaagctggcgggcaacctggtgctccaatacagcagcagccaggatctgcagttatggtgccccaggggcttgcccttatcctcggcatctcaagcttcctgcaaagaggtctttcaagtcacacacagttctaaagagcagtgaacaggcaccaagagctccaatatttactgaagaggcacttggcgggctggagggagacggtgaggctgtacagccaatagaaaggtccttttgggctaaatactggatgtacctgatcccgcttggactcatagtaatgaatgctgttactcaagctatgaatatgcccgaggaacaagctggcggacaacctggtgctccggcacagcagcaaccaggatctgcagtacagcgtggaccaagttctggtggtgtgcgtagaagatgataagttagcttcctctaccgcagaaggcattatttgagggcgttggtaatcaatgaaatcttaggttgaccttttagtagcagtatttgataattttaatttcatattaatagctctgtgcccaaatgaaaagaaattttaaactgaattgcttgtaaactttgaaacagcggtaagttttccggttagattgattaatgttattaatgttatatattgacattttgcccccagcctaaaaaangaggaaaaagaaaaaaaaaaagcggccgctcaagaagaacccagct

SEQ ID NO: 14452 - DNA, 688 bp, Glycine max
  Clone ID: PAT_MRT3847_113057C.1
agtccatttggtagaaaaccccccaaaaattatatccccacgaggaacccaaaaactaccatagccactactgattcagaaactcttaggcatagcgaaaatgacaaccaccttcgcgaccgtcgcaggactcggtggtgcatcactgtcatccacctcatctcgtctcacctcagggtttgtgaaatcgccagtgagtgctaggaatcccttgaggaaagctgtggcaatgggaaatgggagggttacatgcttcgagaggaattggctgcgggcagattacagtgtcattgggtttggattgattggttggctagcaccctcaagcgtaccggctatcaacggtaaaagtctgactggcctcttctttgagagcattggagctgagctagctcacttccccacccctcctgcccttacttcatccttttggttatggctggttacgtggcaccttggcttgttcatctgcctcacttttgggcaaattggattcaagggaaggactgaagagtacttttgaattccaaacttatggagaaatctgtgtaatatcgccttcataatgttgtatattattattgttgtacttgctcctcatcaatgtcccaacttctagtcctgcaaaatttccaaagtaaccctgcagtttcagtaacctatcattatcataattattgatcaagag

SEQ ID NO: 14453 - DNA, 966 bp, Glycine max
  Clone ID: PAT_MRT3847_113058C.1
gccatacgccaccgaaaaaataccatagccactgctgattcagaaactcttaggcatagcgaaaatgacaaccaccttcgcgaccgtccctgctcccacttctgattcagaaactcttaggcattccacattctcaaccccgaaccctaagagcagagcgaaaatgacaaccaccttcgcgaccgtcgcaggactcggtggcgcattactgtcatccacctcatctcgtctcacctcagggtttgtgaaatccccagtgattgctaggaatcccttgaggcaagctgtggcaatgggaaatgggaggattacatgctttgagaggaattggctgcgggcagattacagtgtgattgggtttgggttgattggttggctagcaccctcaagcataccggctatcaacggtaaaagtctgactggcctcttctttgagagcattggtgctgagcttgctcactttcccagccctcctgcccttacttcgtccttttggttatggctggttacgtggcaccttggcttgttcattgtcctcacttttgggcaaattggattcaagggaaggactgaagactacttttgaattctaaacctatggtctctgtttttactttttttttttctcttccttgtgtgcccccactgccccagtgccttgcaatctatgatgactctatgctacctttttccttcttactaggagaaatctatgtaatatcgccttcataatgttgtatattattattgttgtacttgctcctcatcaatgtcccaacttcttctagtctgcaaaaaaaaaaaaaaaaaaaaaaaaaaaaaaaaaaaaaaaaaaaaaaaaaaaaaaaaaaaaaaaaaaaaaaaaaaaaaaaaaaaaaaaaaaaaaaagaataaaaaaaattaatggggggggccgttttaggggtccaaagtttccttccgggggtttgcaaggtaataattttt

SEQ ID NO: 14454 - DNA, 628 bp, Glycine max
  Clone ID: PAT_MRT3847_113059C.1
ccacgcgtccgcatagccactactgattcagaaactcttaggcatagcgaaaatgacaaccaccttcgcgaccgtcgcaggactcggtggtgcatcactgtcatccacctcatctcgtctcacctcagggtttgtgaaatcgccagtgagtgctaggaatcccttgaggaaagctgtggcaatgggaaatgggagggttacatgcttcgagaggaattggctgcgggcagattacagtgtcattgggtttggattgattggttggctagcaccctcaagcgtaccggctatcaacggtaaaagtctgactggcctcttctttgagagcattggagctgagctagctcacttccccacccctcctgcccttacttcatccttttggttatggctggttacgtggcaccttggcttgttcatctgcctcacttttgggcaaattggattcaagggaaggactgaagagtacttttgaattccaaacttatggtatgcttttgctttctctttttttcttcattcccttttgtgccttgcaatctataatgtataactctatgctacctttttccttcttactaggagaaatctgtgtaatatcgccttcataatggtggatattattatt

SEQ ID NO: 14455 - DNA, 253 bp, Glycine max
  Clone ID: PAT_MRT3847_11305C.1
ctagggtttctctttctgaattgcaaccatgcaaccaacagcagcattgaccatggcggaggaccttactcagatcgctcacttgctcgaccaaacactcagccccgacgccatcgccgtcccagccgccaccgatgcgctcgatcgcctctcccttactccgcacttccctttctatctcctctccatttccaccggagcaggaaatcaaggtcagaaaatcgctgctgctacctacctcaagaacctcatt

SEQ ID NO: 14456 - DNA, 280 bp, Glycine max
  Clone ID: PAT_MRT3847_113060C.1
cctcgagccgattcggctcgagggttttgaaattacttggggaggagcaacttctggtgtgttgtttgtatttctttcagtggatgaggtcgcaggaaccttcacttgttacacctcgggcttgcactgtgttgtttccattgttggggaaagcaaggatgggtgataagttgatgcttttgttcacaaatttgccatccggcagggagttcagagatgttcatgtttacaatgccgcaatttcaggccttctttctagtggcaggtgtgaagatgcttg

SEQ ID NO: 14457 - DNA, 480 bp, Glycine max
  Clone ID: PAT_MRT3847_113061C.1
gaaaaagatcatcttttttggttggagaactggtgctaagaagtcaacatccattgttagacaatttggattcgagacccaaccagaggggagcctgacgcagaattttataccatagactccatggggtattgggctctacccatataatgctggggggatatcagactaggaacctagattctttgcatctttatcagaacctttgaatggaatgaacccagggtaatgatccttattattggagcctatgtattaatcttgtcgtcaaataagtttaaagctaatgatgttcaaagccaagccggtctctctcatggaggtaacaacaggcttaactggcgagtaagtcgcgagactgaataatcctttttctgttgctggaccactcaatccgtaccctccaaagggaatggctgcctcacatgtgtcttagctgatgacccacactgttgcagctgttaatgctctaactaaagc

SEQ ID NO: 14458 - DNA, 117 bp, Glycine max
  Clone ID: PAT_MRT3847_113062C.1
gggttgagatgaaacgaaacctacactgagcatacagagtccgtatcgagcaaattacttggtgaaaagccacggtcaaatgatcacccattgataactgagagtatatcaacggga

SEQ ID NO: 14459 - DNA, 562 bp, Glycine max
  Clone ID: PAT_MRT3847_113063C.1
gtaatacagtggcttgtaatggcaactaatatttatgtcttggtgtcaaaatattgaaacaatttcaagtgcaaaagttaatatctgaatacaactttaatcacaattgtctacatcatcaatttacatttttatcatatttttctctttcatactctttccatattcttttcacacactggtgacactttctttttgtcttttccctttctctgtatctgtgaatttctgtcgtggaaatccatcgttcattgaccatcattcaatcttcttcctacctctgattttaatgatcttttggagttggaaatattgttgatcatgtctttattggaagagttgttaaaattttctcctattcctttggaacctgaacaggctaaagtacttattgctaaagctttaggttactctattattatagcctcatctttaatcaaattacctcaacttttcaagattgttcaagctcgtagtggagcaggaatcaatttttatggtcaagcattagaattatttgcctattctcttaattgtgggtattcgtttgctaaactttatc

SEQ ID NO: 14460 - DNA, 313 bp, Glycine max
  Clone ID: PAT_MRT3847_113064C.1
gggcagagagcgaacccaaaactagagctacgttccctgtaaaccttccactcttggctccttttccaaatcaaggaataatatttcctaaaaatatttccaaacccttgcttaagcccaatctaagaattttggtggtggaaatctaaggaaccctggcttcttccggtggcttctaacaccaagacccacattctattcaggttggaagaagaaaaccaccggagggttccaatcactttcttacctggctgtactttttaattcaatgccttggataatttaagcgctaccttaagaccggccaaatacc

SEQ ID NO: 14461 - DNA, 902 bp, Glycine max
  Clone ID: PAT_MRT3847_113065C.1
cccacgcgtccgcccacgcgtccgtacggctgcgagaagacgacagaaggggatactcaattcattttcttcttctgcttcaccttctcttctcttctctcatagggttagggtttttttctcttcattgctctctctgtcgttttatttccatggctcagcaagatgctcagaatggtgggtcggagaatgccgctgctgcggtgtcgtttgtcgctttgaagccgcagctcctcatcgaagctcccaaagcgaacgacgccgttctgttctacaaggccgcgtttgccgctgaggaggttggccgtacgctcaaccctaagcgtaaagcggagcacgagcttcctctcatactctccgcagagctcaaaatcgctggctctaccattctcgttgctgacctcgttgatgactctgcttcaacagcgaaggccggaggaaaccgtgtcgttttgtgcttggagacggaggacgttgaaggggcgatagagaaagcggtgagcgctggtgcagttgcggatggtgaagtggcggaaggtgaaaacgcgtgctgcggtgggcgcgtggggaaggttaaggatccgtacggctttgtttggctcttctgcgctcctggaaaaaagtgtgctgatgtggaggcttaatggctgttgatgttgttctgactgactgttgccgttttccattttttgtttaagctgcagtaattagggaaaaggacccacatgtccatttaagataggcctctttgtctgttgatttttagtattaatctaatctaattgttatgggtgttagtctaatccaatggttacggggtctttctgtttttaatattttgaaacggggtttttgtttgtcattgactcactattaatgataatattagttgttgacacatt

SEQ ID NO: 14462 - DNA, 295 bp, Glycine max
  Clone ID: PAT_MRT3847_113066C.1
attgattagttccatcataagttcgcgactggaactcgatttattgcgtggcgttccgttgtctatcatttttggcgccccatacgtgtctcatgcaaaccttcgagctcagggtcagagccacctttccactcaaacgagtattcgacaattccaataagaagtctgacccggctaacggagcgtctcccacggcggcggtcagcctcggctacaccagactctccggaatacccccaagacatcccaagaaacacgacgtcggagataccctttatcaccgatctaatccagc

SEQ ID NO: 14463 - DNA, 169 bp, Glycine max
  Clone ID: PAT_MRT3847_113067C.1
caggggattccacttatttaaggatagattaattcccatatacatatttgcccttgttctatccttaaaaaagtatatggtaattaatctaatttggaacccaaaaaagattcccctaaggaaaaacatggcatactgtaccattaaaagggctaaattttaagcctgg

SEQ ID NO: 14464 - DNA, 517 bp, Glycine max
  Clone ID: PAT_MRT3847_113068C.1
tacccacgctttcgtattgttgctatatgatatggatgatcataaatattatttttaaaaaaattgccccactaactccaggtcctagtccttggtccgccactgtctcctccctttatctcccccccctcattttctctccattcaaacaaacagagggttaaacttcaaggttgggggaaataagtgagaagtaagacatccaattaacagagtgtccaaagaatagaaaagacagactgcagcatcgattgacagaaatgcactagttatattaacctttatgaacagctcagcgaccctataaatagataataaaaaactctagtagattatagaacaataattctctaaattattctgagcacaatacataatcaataaatcaaatgtttgatgaaagataaattaagccagaaacaaggaaagtattgggtcagttactcatttactgattgaacaatcagataaatcaggaatgtgacagagtcaaaagtcaacacgcacaaggacagag

SEQ ID NO: 14465 - DNA, 185 bp, Glycine max
  Clone ID: PAT_MRT3847_113069C.1
aaggttataatttagtggctcaatattatccacgagaactatgaccgtatataggtacagtacatgtacaagaaagaatgctgactgacaaagggatgcttactcaagcggacttcatcgttagcacagtgcactcctttggcatctaccgttgatacacttgatcatgagccactcctctgatg

SEQ ID NO: 14466 - DNA, 230 bp, Glycine max
  Clone ID: PAT_MRT3847_11306C.1
atgaaatatgacaatccagaacaaattcttgaagagtttttccccctccggctggagtattatgagagaaggaagaaccatatattgaacaaccttgaacgacttttgctgattttggcaacaaagctaggtttatattaggggttgtgaatggagaaattattgtaagcaacaggaagaaagctgatttgttgattgagctgcagcagaaaggtttcactcccatgcct

SEQ ID NO: 14467 - DNA, 678 bp, Glycine max
  unsure (1)..(678): unsure at all n locations
  Clone ID: PAT_MRT3847_113070C.1
ctctagtttctctttctgtttcacgggttgcaacagaaccaacaagtttcaggaaggagatgcaaggagaacatgacacgtctccttaaacctgctggtcaaaggataatcttgatcggtcaatggtgaaaacagacccaagcctgtaaactgtaaagtgttttgtaacagtttcactttcatgttgatataaaaaagaaccaaaatgatgaattagccgtgagttctgttccgccaggggtttgaaagagcaatcagtgtacgatggcgatggtgctccctgaggagctgatagtggagattctgtcatgggttccggtgaagcctctgagacttggaattcccttatcttccggtgtacgatagcaatcagtttcactttcaatgacgtttactctttcatagcttcctgcaatgggttgatttgctcgcgttaatttactgttagaggtagaggtaattttgaatactgggtacgattttggaacccagcaagaatgatcctgtcccaagagtcgccacacttacgtctacgtcgacgcgattatatacttttagaggattatgtgaagtttgggtttgattacggtgatggnagtgacacttacaaggtggcggcactctgtttcaatactaaatcacagatttgggaggtgagacttcactgcatgggcgaca

SEQ ID NO: 14468 - DNA, 375 bp, Glycine max
  Clone ID: PAT_MRT3847_113071C.1
tacatgttcccctgttaaatagattgttctccctcatgtgaacgaaacgagacattatgtcactgtgccaattctttgggttttttcatattatcagggcatttcatacatatatagtatttattataatttcagcaagtagaaatggatcattgaaatatacatgtgttacaattctaaatttccactgtaattcaattatcttgagccattataggatatcagactattcccggattaattttatttatttattttccctttccaggatattgattttgagttcaagatattatcacttattgcaggacaggaggaggtcaacagaaggcataattttatttttgtgtacataacccgtttttgttcctgctt

SEQ ID NO: 14469 - DNA, 1152 bp, Glycine max
  Clone ID: PAT_MRT3847_113072C.1
caatgtgcctcttccaagaaagcattcaacaatcgaacccacgatcttttcagggtctctatagggttgaatccatgcttcttgtagatcttttcggcaaagtcattggtaatttcgtaaagaactcttaaacacattttcatgaagtctggaagttgctctgtactagccaattcccatcttttaatagcatctgtaaataaagtaagctggtctaatgtcccataaacatcgaaaatgtcatcaataatgtagaccagagagataggtttggtgagctcaatcctttgctctgagaagcgtggatctgtgaagcatgccattggccacatgtaccatttaagaggttgatatctagcgaacttcacctcattgttcagcccaaggtctttccaccatttgtaaacttgagttatttcattctggttcacgaacctaactatgctggaattgatttcagcaagttcctctaagcattcccattctctcttggtcttgaaatcatttagaagtatacttgtgtcgtccctgaatcttgataagtcataatgaagcggatgctgaagagtcttagcaacatacatagcttcattatgctcttcatgtcttgtcagccatgcatgaagaagttggtggcagaggtaacctgcatcatcaagactgtcttctccttcaatacctagctgggttgcctcatacagagaaataagacccttcacatcttcaccgtgtttttctctaaactcttttttgttactcttcaggttgtcaaatacatctgcaagaacataatggcctctttgtctaagtaaacggaatggaagtgcaacttcacaaagtttatggttattcgcaaaatcactgagatgactgctaaatatcaaatgttgcttctgaagagcagcttcaatttcctcttcgaagtggtgttcaatgccaagcctttggatagtgtcaaccatatacatactctccatgggatcctcgccaataagcttttggaatacatgcttaacttccttcaataccaacgcttgtttgatataaatattatccataaaggagtcttttctttaatttgtagaacagtgcgtcttggcttctactctagttagatgtgtagacatgagtctattcaagctcttatttaac

SEQ ID NO: 14470 - DNA, 376 bp, Glycine max
  Clone ID: PAT_MRT3847_113073C.1
gtcacagtttcccaaaacccctcccttcaaattacccctaaaatttctctcggtttctcattctaggctttgatttttcttttcttctctcgcttcccaaaacccctatcttaaggtacttcctctctttgttcaagcaagaacacagtatccttaagtggatcttgtgtctaagggtgacttttcccagtcaacatcagagtaatgaatgatctttgcattgcctttgtcctcatgtaataatcctttacctagtacataatatattttgcctccctaaaataccctattgtttattcgtgtttagactttttaaattgaagttgtatgcacataatacatatatctggtcaaatataaataatatttcaagctt

SEQ ID NO: 14471 - DNA, 640 bp, Glycine max
  Clone ID: PAT_MRT3847_113074C.1
ccgggtacgacccacgccgtgctgaaaatggctaatcaaaacactctccctctttatgataaatattgggtgaagcatacgttatcaagagtaatggattccttgactctgctcctcctcctcttacttcttggttaccgtattaatattttctctcatagcaactacactttcccttgccttgttgctttcatatgcgagtcatggttcactttttttttgattctcgtcatcagcactaaatggtctcctgcatataccaaaacctacatacaccgtctcttgcttcgggtacctgagggtgagcttccagcagtggatctatttgtgacaacagcagacccagtgcttgagcctcctatcatcacaatcaacactgtcttgtctctcttggcgcttgattatcctcataacaaacttgcttgctatgtttctgatgatggatgctcccctcttaccttctatgcccttatcgaagcatttcaatttgctaagctttgggtacctttctgtaagaagtacaacatacaacttagagtacccttcagatacttctccaataacaccagcactgacaacaatgaagacacgccggagtttatgcaagactggttaaaaatgaagaacgagtatgagcgcc

SEQ ID NO: 14472 - DNA, 254 bp, Glycine max
  Clone ID: PAT_MRT3847_113075C.1
gaagatcagaatcagattaattatttcatgcagaaggggagtgacagaagaacaaatacccttcattgtttagagaaattgagttcaatagacgggtagccgcattccatcaggaaggaagcagaccttcctgagaagtcaagttaccaactgacgatcactagtggacataaaatgatatgatactagaaatttatgcaatagcagaatataaccaaatttcaaataacaaaacaaaaaaagggcggccgccg

SEQ ID NO: 14473 - DNA, 557 bp, Glycine max
  Clone ID: PAT_MRT3847_113076C.1
tggaaactgcttaacgctatgttatgcaatacttaagagaaaagacctcaagggagaaagtggttttgtgaatgcggccaaggtaattgaaaagtcagtgagtgatatgaaaattgatccttttaaagatgcggaacattggagggagttgtttttgaagatgtttgtgttgggaagtgcactgctggttacagggtcacccaagctcactgtttatgagactgattttggatttggaaggcctaccaaagtggaaatggtacatcccttcaattgtatgtctctggctgaaagtgaagatgaggaaggaggactcgaggttggcttggtgtgtagaagtacagagtttgaagatttaaattctgtcattcaacaaggacttaaaacttcaaaatcctaaatccattagtgtgatatttaaataaaaatcaaagcatgggtctatccaaaagttaattttgagttaataagtggtcatggttgattttaactttcctcgactttactaaggatgtttgaatttatgtttagtagcatggttatctagtttcatttct

SEQ ID NO: 14474 - DNA, 773 bp, Glycine max
  Clone ID: PAT_MRT3847_113077C.1
ctgttttgactttgaggatcaaattatctatttctgtagcttttgaatacaatattcatttacttgtctgaaacacgcagaaatatggaaataccaatattgagggcgttgattcaactaatgcatgctatggaggaactgctgccttgttcaattgtgtcaattgggttgagagcagctcatgggatggacgctattgacttcttgtctgcactgacagtgctgaaagatcatttccatattcacgacctttggattatacatttatgaacattattcacattccctttttatgtgcaattctaagaacaactacaagttataaactttgatgcatatgctagattttgttgtacaatgaggttagtctcagctcaagcatgtgtcactgatgggtcctttctcaggtctatgctgaaggacctgctcggcatactggtggagccgctgctgttgccatgctaattggtcccaatgctcccattgcttttgaaagcaaattgaggggaagtcaatggctcatgcctatgatttttacaagcctaatcttgccagtgaatatccagttgttgatgggaagctttctcaaacttgttaccttatggcccttgattcttgctataatcacttaagtcacaagtaggcttctactgttaacttagttttctgaaatttggtttggaaagtttaaaccaggcaccttatgacatcgcttaattacagatatgatatacaagagggaatgcaattttctatttctgatgctgaatact

SEQ ID NO: 14475 - DNA, 830 bp, Glycine max
  Clone ID: PAT_MRT3847_113078C.1
cctcacctcggatgctggagaggtgttactgagagagttagaagcagcaagagcaaaggagaaggaaatgaagaaaaaaagaaagcaagagataaaggccaaactcaaagcctccaagatgaattgtgaatcttcttcatcttcatcgtctgaatcaagtgacagtgatggtgattgtgatcaagtggttgacatgaactgcttcagagctggtgctggtgttgttgtccctgcacctgtggaggaatccccactgcccaagacccccattgttgaggatacaaatgcaaaggcgcatcgtgatgccatggcattgtgttctaagaatgatatctctgttagcagtgttagagattgtattaagagcgagagtgctgttgttaccgctgctcctcaaaagaggattgaggtctgcatgggtaccaagtgcaaaagatcaggggctgctgcactgatgcaagagtttgagagagtggtgggtgtcgaaggtggtgctgttgtttcatgcaagtgcatgggcaagtgcaaaactgctcctaatgttaaagttcagaattctgtcgatcatagccttgctcgaggactcgatgattctgttaacattcctgctaaccctctctgcattggagttggcttgggggatgtggatgccattgtggctagatttttgggagagagtcacacagatataggtatgataggtgcagctacagctacttgatgttgttgtggaaaaggctagtgtgctatttgtaattgtatatatacttagccagtatgctgaggaaacattattggcaatgattttttttttttattgttcatattgt

SEQ ID NO: 14476 - DNA, 237 bp, Glycine max
  Clone ID: PAT_MRT3847_113079C.1
ggggtccactgtgttcacacgcaccgctgaaagacgcaattcgagatgctccttcacttgcgctctcagacgttcatccagtcagaaatgcgtgtattcggagccagtatctgtcattcgcagagcactttcgagaaccagaagttcatatttgcaatcctttgggatctttccgaggagggcgtggtgaatttgcggacgaccttcattgcgtcctagatgtttgacgcgcagata

SEQ ID NO: 14477 - DNA, 1890 bp, Glycine max
  Clone ID: PAT_MRT3847_11307C.1
cccacgcgtccgcccacgcgtccgtacggctgcgagaagacgacagaaggggagccacacatttttcattaccgccgtgataacacactaacaccaccacttcatcaactttacttgacaacaatattgtaaaactcaaaatctagtttcatactttttttcttcttcttgaaatggctctccaggctgcttctcttgttcctgcttctttctcggttcttaaagagggaaagagtggtgtgtctctcaaggactccaccttgttcggtctttcattttcagaacctatcaaagctaacttcagctcttctgcattgaggtgcaagagggaattcgaacaaaagctctgtgctgtgagggccgaaacagtggctacagcctctccagcagttaccaagtctacaccagaagggaagaaaacattgaggaagggcagtgttgtgataactggggcttcatctggactaggcctggccactgctaaggctttggctgagacgggaaaatggcatgtaataatggcctgcagggattacctcaaagctgcaagagctgcaaaatccgctggcatggctaaggaaaactacaccatcatgcacttggaccttgcctcgctcgacagtgtccgccaatttgttgataacttcagaagatcggaaatgccgttagatgtgctggtttgcaatgctgctgtttacttgccaactgctaaggaacctaccttcactgctgagggctttgaacttagtgttgggacaaatcatctggggcatttcctcctctcgcgcctgttgcttgaggacttggaaaaatccgattacccttcaaagcgcttgatcatcgttggttcaataacagggaacacaaacacattggctggtaatgtacctcccaaggctaaccttggtgacttgaggggacttcagggtggtttgaatgggctaaacagctcagccatgattgatggtggagacttcgatggtgccaaggcgtacaaggacagcaaagtctgcaatatgctcacaatgcaagaattccacagacgattccatgaggaaactggaatcacatttgcttccctttaccccggttgcattgccacaacaggcctgttcagagagcacattcccttgttcagaactctgttccctccattccagaagtacataaccaaaggctatgtctcagaagatgaagcaggaaagagacttgctcaggttgtaagtgatccaagcctaacaaaatctggtgtttactggagctggaacaaagcatcagcttcgtttgaaaaccagttgtctcaggaggccagtgatacagagaaggctcgtaagatctgggagattagtgagaaacttgttggttttgcctaagtgggaggagcctccaacatcccatgttgttctagagaccttgcacttgcatggaggaagaaaatgatgtctcaaaagagtggatagataacatcctatcattttgaatgcattgatgttgttttgttagctaggagcttctttgctttgatgtaaggtgtcaatggctttttgtgaatcaagactcaataaaatcattcagccatgtgggtgtggtgaagttgctcataaactttatgaaacaacagtgcctagtaaactataaattgtagtgtggggctcttttttagtttttcgttaatagtcgtttttaagtgaacttcagatcaaatggttgaaccaaagatcttgcttcataaaagagcaattgcacatgcaatatgcagggagaaaaaaaaaaaaaaaaaaaaaaaaaaaaaaaaaaacccagggacttctcagagcttaaaacatgatttttttttaaaattctctcaagaaattattaaaaattaactttttttgttaccctctcgat

SEQ ID NO: 14478 - DNA, 707 bp, Glycine max
  Clone ID: PAT_MRT3847_113080C.1
cccacgcgttcggtgctgtgttgtgtaacaatggctcaattgaaagcttctcctttgtgttcaacccctgccactgctccttcccttcatacaacaggtcccccttttttttcttccgatttttgtttctttttcgagttccaacttcttcatcaccctctttgcttaaaaatgttatgttttgaacaatgatacaaattgaaaaaccccaagttttcaaatgctaacgaatcttgtgtagagaagctttcccttcattcatttttcattgacattgtaaagttctctcaagtttagagctttttgcagcacccgaaaaaagggagatcaatgattcattatgtatgcttaaaagttctttttctttttctttctttctttctttcccttgattactatttgcagggcaccttctgtaccatcagttctggaaggcaaagccttcgtcattcaaagagttggggctaagaacaagcattggtgccactaaacttaaagttattaaagcagctgcacgcagtgatacagaggtagtttctgaatccacaaaaggtggtggcctacgtggaaaattgaataaggtggtgttggcttacagtggtggcttagacacatcagtcattgttccatggctcacagaaaattatggttgtgaagttgtttgcttcactgctgatgttggccaagtataaaggaattggaggttt

SEQ ID NO: 14479 - DNA, 430 bp, Glycine max
  Clone ID: PAT_MRT3847_113081C.1
aacaaaaaactgccctttatttaatggcacaaataatacacggtgggttattttttctaaagggcacaaataaaccacaaattggagacgcctacagggctgaagaaggggggcggacatacgaggagaggggatcacacttatacaagggtgcccaacgcctaacttttttagaaaagaagctaccggaaaagggtcaaatatagggcgggaaacagatgtctgacattgccccaataataaggagaagacgcccgctaatatttcaagaacgattgctgactgggaaacttacccaagaaattgaggggtgaaaaagatctacattaccacctcaaacctggaaattgacagcctttgtagggaactgacccccctgttggggacatttaatgcccagtggtgggcggaaatttctggaacattttta

SEQ ID NO: 14480 - DNA, 358 bp, Glycine max
  Clone ID: PAT_MRT3847_113082C.1
ggctcgaggagaatctgatctggatcacgaaattcggtattcgaaacctacgttttttgttttttgttttttttttctaatttacgttatttatttttaattttgtaaattttcctagggcttgaataggcttcctgtttctctagctgtgaaatgattggatcttcttcttgctgttgaaggaagtcgcatttggcctttccctgaaaatcgatgactgcattcatttattattttattcattcattatattattacacttttttgcttaaatttcctaaacaaacaacggttgcatttcagcaatttctattatcacattgcgttcgtttctgtaatcacgtttatttagttatga

SEQ ID NO: 14481 - DNA, 790 bp, Glycine max
  Clone ID: PAT_MRT3847_113083C.1
acggctgcgagaagacgacagaaggggggttaatgatttatgtacatacgtcattgcaggttcagtttttaaaattataactgatttaggtgttggttaatttttggctttaaatatctgttattacttaggttggctatgccttttaagtccatgatgtgaagtaatagtaagcatctgattatttttaattgtatattgtctaagcaaatactattccatttttaatttctaaacaggcactagcaagactccgtttttctgatactgttgctcagagtgacgtggacgaggcactgaggttaatgcagatgtcaaaattctctttgtattctgaagatcgtcaaaaatctggtctggatgccatatctgatatctattccatactgcgggatgaagcagctagaggtaaccgaatggacgtcagctatgcccatgcactgaactggatatctaggaaggggtacagcgaagcccagttgaaagagtgcttggaggagtatgcagcacttaatgtatggcagatacatcctcacacctttgacattagatttatagacgcttgatgcccttcttttcccccattaacattgtttcaaggggcgaggacaagagtgcttggtggacttagggagggaatcatattttgcactttggtttttattagttttgatttaggttgtttgtattgttacagttagatttgcattttttattgagtacaataattgctaatttaaatttgtatacttaaagttagtactacatgaagcacgcattaggttcaaaa

SEQ ID NO: 14482 - DNA, 468 bp, Glycine max
  Clone ID: PAT_MRT3847_113084C.1
aagttatttcattgagcccacgaaccagcgttgaagaggcttacatctagctaatagctgagcttgaaaaaagtgttcctaggtgggtggccattgtgagttccacaggatatgatctcaagactgtgaaaattggaattctgcttgcacaaaagcaatgactatgtcatttatatgcaaacccgtgttttgatgcatggagaagggaatatttgaagcgggccgattatgattgagatggacatgcttaactggcaagactggaccatcccatgcatgcatggacatggacacaattggtcgagttaaattactgacaaagagggagcgaccaggacctatggggttataaatgcacaaaatgcttgtgtgccaaacaggtggttgaggaaactgactttacgataaacagtctttgtggtggtgatagaaaattgatgcgtgataggacacacctgttgttggctt

SEQ ID NO: 14483 - DNA, 364 bp, Glycine max
  unsure (1)..(364): unsure at all n locations
  Clone ID: PAT_MRT3847_113085C.1
gaccgcacgcgtacgcaacggagaagtactcattgaacaaaaaaattatggagcaatctatgcaatggcaacttatgagcacatttaaaantggacgcgtcgcactataccagcatgtcccgtcaacggtacaagaaaatttataccgttgaaagctccttgattgcggcaccattgacctaaaccataagttacgtgattcgataattgcatctaatcatcaatcatcatttaattaatgcaaaattctcgaatcatttgtaaccatgttagcgcttgctctaactttctttacacccgccgctaatccctttcgatttccaccccgcgcgttctgtccccgtatgctcaaaatcaataactc

SEQ ID NO: 14484 - DNA, 394 bp, Glycine max
  Clone ID: PAT_MRT3847_113086C.1
aaaaaacaaagaacaataagatttttttatttttggcgttacaaaaagaaggaatatggggatatcaaccattctcagcctcaaataaaagggaagggaacagaaaattttaaaaaccccagatgtccaaacacttcaaacaagggccctattatgcttagttatgggctgggttcgggttccgggcccctgctttttggaatatgaatgccaaccaaaaggggaactaggaaataaaaaatatagttctccattggacctcggatttacaatactttgggcgatagggaaccctcaatcgggtgaacaaccaattggttcatgccccctagaagcacggaatattatttttgtttgggacctaatggaaatgaaggaatttgttgttggggga

SEQ ID NO: 14485 - DNA, 2310 bp, Glycine max
  Clone ID: PAT_MRT3847_113087C.1
cccagagtcgacccactcttctggtggcagactttgctggtgaagcgaattttgtttcctagtcgttggcctttcactgtctctctctccttctcctcttatctgaatcatcctctctctgtgagtgaggtgactcgttgttgtttgtgacccggcgattcgttcctttgactccattcgaagcaaccctttgtctttcttaagcagtttcctgtgatgggctttggatttttcttttggattccctgtgatcacctgggaactgggttgttcaaattgaattttttgtgaggtatgctgtgtttggggtttgacatggttgaggttgactctgaaagattgaaacttgagagtagaggagtggggatttggctgagaattgcatgtgggtggttggtgtttatgctgtttttcagtcctgtggcaggtttgagacccttgagctacagaactaattcatggggtgatgagtgggtttttacaagaaaagacgaaagtgacttaggtccattttcacaatggaacataagtggaacttacagagggaattggaagtttttagatactacaaatggttctaccgggatttccagacatcagaaaaataaatggaaattctgtaattgaattagttagtatgcccacaaagataactggtgtacattatgtgcagggggtagtcatattccatgatgtatttgacaatgaatacaatgttggtggagctcaaatcagagtagaaggtgtatatatatggccttataggcagcttcgaatggtagccaacagtggaaaagaggtggggttaaatcaggatggagattatattttatccaatccatatcatctgcttggagttttctcatcacaagtattccaagagtcttcacaacataagatgtggagaagaaagcattctccattacatggcatggagaaacattgcaatgtagaaatcgctgcacatgtttcacgcctgtcatcatcaaaacatgaaggggagcacgattctttccagctagaagggttaatggagagtccgtccgtggatgacgatgggtactcggtttgcaatttaattatatattctacattgaccaaaattgatcatacgcatataaagcattgaactatgcttgatgtttacgtttatctcatttttgcatgttgctgcaattcttctacttcaggagtatcgcaacacccaatctggggctgctaaggtttcaatattaatgattggtcagcaagccatagtagatgcttatctttgccttacacatttgactgcaggaatactagttgaatccctgttcaatgcttttgcaactgctgcatttttcaagtttgtggttttctcaatatttgagatgagatatctccttgccatctggaaggcaagtaggcctttgagcaatggtgaaggttgggagacaatgagacgtgaattgtcagttttatacagccgtttctatgggatcctattgggaggcatactgctcatgtatgaattccacaatcatttgagacctattcttcttcttgtatactcattttggatacctcaaataatcaccaatgttattcgtgactcgcgcaagcctttgcatcctcattatatcttaggcataactgttactcggctagcaatcccattatatatttttggttgtcctaacaacttcttgcacatagaaccagatcagagctggtgtgtttgtttggctatatttgttggacttcaagctgcaattctcttgcttcagcactattttgggtccttgtggttcattcctcgtcagtttctacctgagaaatactgctattatcggaggtttgctcaagatacaaatcatgccacagactgcgttatatgcatgacagccattgatctttctccgcgatctaatgattgcatggtgaccccttgtgatcattttttccactctggctgtttgcaaagatggatggatataaagatggagtgccctacttgccggggccctcttccacctgcataaagagatttctagtgttcatatcaagagaatcaactcacactgcccaacaacataattttggttgggatagaatccatattccgtataattgcaccttcagtacaatactgaaatacgatacttctcacaattgtatcatgcagcattgttataattttagactctttttttcctctcctttttatttcactggttatgtatcaatatcaagttgtacattagaaattcaatatgatgatcttttgacatccaaaaaaaaaaaaaaaaaaaaaaaaaaaattttaaggca

SEQ ID NO: 14486 - DNA, 556 bp, Glycine max
  Clone ID: PAT_MRT3847_113088C.1
ggaaaaaaaaaaaacagaggcggggttttttatatcttcataagggccaatcataaaacatcaaaagtggggggcacaatcagccatcacaagggcaaaattagccccccaaaatttttgggaattgaaaaacaagtaggggggggaagccagtttaaatcaagggatggaaacgaattcaggggaaataagaagtaaaaaaaataattaaaaaacggggggggggaaacctttcaggccccttcgggacccctcatcctgggaaaatctgggttaaaaaaaaagggcattggcatgccaattggaccatccaaagaagggggcaatttccccttttttggccacaaccaaattttggacacaaaaaaacgggcacctttacggacactacaaattttttttccttccacatcctccacggaaagcttcccatcatcaagttccattcctttggggagccttgggactggaccttaactaatttcatcaggggtcaaagccacccttaggtctgaattcccaacccatattggaaaaaccccattgggaaacacct

SEQ ID NO: 14487 - DNA, 389 bp, Glycine max
  Clone ID: PAT_MRT3847_113089C.1
gggagcccccagttttttttttaagtttgggccctttgaaaacattttgttaggcccacataaatttattaaagactttggaaaccccaaaggggtttcagcaacgggggttttccaaggccggagatccaaaattacaaggggaaaaggataaaatccggaatcaaaaagcaataaaattttcccttcggaggaataaaaattcaaaatcggtctccccggggaaaaactcctgcatttgggggaaacgagttgcaaaaaaattttcctcccctcggaggaaaaaaaacccaaaatcagcctccggggggaacaacttttgggaaagcaatttaaaggggggcttgctttgttttttggacccccttttaaaatttcccgcccttttt

SEQ ID NO: 14488 - DNA, 318 bp, Glycine max
  Clone ID: PAT_MRT3847_11308C.1
aattcggctcgagattcagtgttatactacttgattctttataggaatggagttctgcagaggagaaactcatggcaggatggagtgtatggtaccaattgtccaattctaccagggcataacttcacttatgttcttcaagtgaaagatcacataggtagctacttctactaccctttccttgcatttcacaaagcagcaggaggttatggtggattcaaaattgagagccgccccgggattccggtgccttttcctcctccagcaggagatttcacgatattggcaggagactggtgcacgagaaatcacacacat

SEQ ID NO: 14489 - DNA, 1395 bp, Glycine max
  Clone ID: PAT_MRT3847_113090C.1
gacggaagacgacagaagggggaagcttgtgagccaattaagtaacgtgacgtggcaagagagaattcagtgacttgagaatggccttgccagtggtcgtcgacgcagagtacctcaaagaggtcgacaagacagttatccattcacatttcacagttagcacttagcagactctgctgcagtgaggtgaggggaggtttgtttgttgtttcgtttttcctttcctttccgccagaatccgttgagaatggcgttgccggtagtcgtcgatgcagagtacctcaaggaggtcgacaaggctcgccgcgatctccgcgcactcatcgctaacaggaactgcgctcctctcatgctccgattagcctggcacgatgccggaacttacgatgctaagaccaagaccggtggacctaacggttcgatccggaacgaggaagagtattctcacggagccaataatggcttgaagaaagctattgatttctgtgaggaagtgaaggcaaaatatcctaaaattacatatgcagatctcttccagcttgcgggtgttgttgcagttgaggttactgggggtccaacaattgatttcgttcctggtagaagagattcaaaagtatctcctaatgaagggcggcttcctgatgctaaaaaaggtgttccacatctccgtgatatcttttatcgaatgggcttgactgaccgagatattgttgcactatctggaggacatacactggggagagcacatccagagagatcagggtttgatggcccttggacggaggaccctctgaagtttgataactcatactttgtggaacttttgaaagaagattctgctgggctgcttaaacttccaacagacaaggctttattggaggatgctgaatttcgctgttatgttgagctatatgcaaaggatgaggatgcattttttcgagattatgctgaatcacataagaaactttcagagctaggctttgtgccaagttcaaagccgatttctattaaggaagggaccatactggcacaaggtgctgtaggagttgtagttgctaccgcagtggtgatcctcagttacttgtatgaagttcgcaaaagagggaagtaaactggatttgttcatctcttggctgttacggttgcgtgaccctgaccctgacccatagtgtgcaaaacagggttcatttttgcagcttcagtttctgtttacttagtaccaataaagaataatgctacagacattcagacttttatatgaatagactaaaaacatccctgagtactcaaattgagagcaacttcattatacgtaaatacaaattttaacattcccagttaaaaaaaaaatagatagtgtttttaatatacgatttatactttttcattgaaaaa

SEQ ID NO: 14490 - DNA, 636 bp, Glycine max
  unsure (1)..(636): unsure at all n locations
  Clone ID: PAT_MRT3847_113091C.1
ccacgcgtccgccaaattcactttgttccttcctacttctctctctctctcgtcttcaccaatggcgtcgtcgtcaccaccaccttctctgttcttcctcctcctcctcgctctcttcgccgccacggcatcctgcctcacctgcaccacccaaaagctcaccgactccaacaaaaagctcttctccaactgcctggaccttccctcactcgattccttcctccactggacccacgaccccgccaacgcctccctctcggtggccttcgtggcggctccgcccaatcccggcggctgggtgtcctgggggatcaaccccagcggcaccggcatggtgggggcgcaggtgctggccgcgtacaaggcggagggcaccggtgccgtcaccgtgaaaacgttggaccttaaatcttactctgccattgttccggggaagctgtcgttggacgtgtgggacatgaggggggaagaggtcaggggtgtgattaggattttcgcgacggttaaggttccggataaggcggagagtgttaaccaggtgtggcaggtggggcccctcgttaccgcggngaggattgacaggcatgactttgctcccccaatatanatgccaagggcgtccttagcttcaacggt

SEQ ID NO: 14491 - DNA, 397 bp, Glycine max
  Clone ID: PAT_MRT3847_113092C.1
acgagttagcagtcaaagtcgttaaatgatgcaagactatttttgttatattttttctgtaattactttttcttgcattgcacctttatctgtaatgtatcagcaatcttttgcagttgtattttatagttatcttttgattatgataatatgaatatacatactccggtcagcagtcagcacaaagacaacatctacaatatatagtaaatggtgtgtgcattggaaattattgagtactttttgttggttgtggtcaatataatttcattaatgattgcagtagttatattataggttcagtttttgagaaatctagttcagtactattttgttctattaattattcttaattagtaaaatttctgagatgaatgaatgtcacttcttcacaatt

SEQ ID NO: 14492 - DNA, 1193 bp, Glycine max
  Clone ID: PAT_MRT3847_113093C.1
gctgtctgctgttagatctgtacccgcctagccattgatttggaaaagtccaacttcaaggatgagtaagcttcagagtgatgctctaagagaagctatctcaggaatcatggctgattccaaggaaaagaacaggaaatttgtggagaccattgaactccaaattgggttgaaaaattatgatccccagaaggacaagcgtttcagtggctctgttaagaagcctcagtctcaacacagaagcagaaggaggagaagcagaaagaggagacgaagcaatggcgccgaagaagccccgaaccacgtcgaggaaccctgatttggtcaggggaattggcaaatattcgaggtcgcagatgtaccacaagaggggcatctgggccatcaaggccaaaaacggcggtgttttgcccctccacgatcccaagcccaaacccgaggccccggcccagaagccgcccaagttctacccggccgatgacgtgaagaagcccctcgtcaacaagcacaagcccaagcccgcgaaactcagggctagcattactccagggactgttctgatcctgcttgctgggaggttcaagggaaagagggttgttttcttgaagcagcttccatctggattgcttcttgtaacaggtccctttaagatcaatggggttcctctgagaagggtgaaccaatcgtatgttattggtacatccacaaaggtggatatctctgatgtcaatgttgataaatttgatgacaagtactttgccaaggaagctaagaaaaagaaaacaaagggcgaaggcgaattctttgaggcagagaaggaggagaaaaatgtgcttccccaagaaaagaaagatgaccaaaaaaccgtggacactgctttgttaaaggccattgagagtgttccagagctcaagtcttacttgggtgctaggttttccttgaaggcaggagtgaagccccatgagctagttttctagagtgctaaaattattttcctcattctgttttgtcgagcttgttcccaatagttgtactgttttttcatcatggtaatgaacattgttcaagagttttttctttctagtagttttattcttctgtagttctataaaaaaaatgaaataacattatatgccagtgccttatacattattgataatcgattgtgacgttatctgacttttaatatgcgt

SEQ ID NO: 14493 - DNA, 237 bp, Glycine max
  Clone ID: PAT_MRT3847_113094C.1
gctcctctgccattgtaccttcgtattcaagcacaaaaacaaacaaaccctaaccctaaccctaatcgaaacccccttatccgatcatggccaccgatgcccgtgactcgcgtcgcaagcatcaccgatcttcctctccagaggacgtggacagatcctcgaagcgtcacaagcaccgccataacagccatcgccaccgccacgggagcaaaaagcgcgacgaagaggttgaattcg

SEQ ID NO: 14494 - DNA, 1035 bp, Glycine max
  Clone ID: PAT_MRT3847_113095C.1
attcggcgagaagtcgacagatgggggagctcagcagaagcagaacgaggagaagcagaaggagcaaaagcaatggcgccgaagaagccgagaaccacgacaaggaaccctgatttggttagggggattggcaagtattcgaggtcgcagatgtaccacaagaggggcatctgggccatcaaggccaaaaacggtggcgttttgccccgccacgatcccaagcccaagcccgaggccccggcccagaagccgcccaagttctaccccgcggacgatgttaagaagcccctcgtcaacaagcacaagcccaaacccgcgaaactcagggctagcattactccagggactgtgttgatcctgcttgctgggaggttcaagggaaagagggttgttttcctgaagcagctcccatctggattgcttcttgtaactggtccctttaagatcaatggggttcctctcagaagggtgaaccaatcgtatgtcattggtacatccacaaaggtggacatctctggtgttaatgttgataaatttgatgacaagtactttgccaaggaagccaagaaaaagaaaacaaagggcgaaggcgagttcttcgaggcagagaaggaggagaaaaatgtgcttccccaagaaaagaaagatgaccaaaaaaccgtggacactactctgttaaaggccattgagaatgttccagacctcaagtcttacttgggtgctaggttttctttgaaggccggagtgaagccccatgagctagtcttctagagtgctaaatttattttcttcattctgtttttgtcgaagcttggtcccaatagttgtactgttttttcatcatgataatgaacattgttcaagagttttttattccagttttggttctagtaattttatacttctatagttctactaaaaatgaagtaacattgatatgccagttccttatacattattgataatcgaatgtgacgttatctgagtgcgaaaaaaaaaaaaaaaaaaaaaaaaaaaaaaggccgctctagagga

SEQ ID NO: 14495 - DNA, 376 bp, Glycine max
  Clone ID: PAT_MRT3847_113096C.1
agaaggaaaggggttgggggccgaaaaacccccggaagcaaccagggccaagaccaaggttaaaaaaaggcccgctccccgtcctccccgggtgggaacccagttcccgggggaacgaacccccaggaagtgaaacaaaaggggcaaacaaaaggacctgggggggccaacggcggtggggaattgggcccccattcggaataactgaattgttaaggtcttgaacttgcaaggaaagctaaccaagaaccttagggggagaagaacccccccaaggaccttgcaattgctaaccagggaaaaggaaaaactgaaaacctccaccaaaggaacaattgttggcgggggaggacttccccaaaattccacaggcctt

SEQ ID NO: 14496 - DNA, 411 bp, Glycine max
  unsure (1)..(411): unsure at all n locations
  Clone ID: PAT_MRT3847_113097C.1
tttccgctcactcgtgcgggaggntgatcgtcaagagggagtcgctcacattggtgaatagaaagctggcgactatgcaccactgcctacaaaaactaatttggtgggaactcccacggaatggcaaccggatctacctcgtgacaaaattactagtgggatgactacaactgatgagagattgagtggcacagaacatgagggaaatgatccttttcttggcggcattcaaaaatatgccactcccatgatgcccatagatgaagaaattctttacaatgttgcacaaaacatggttgaaagaaggatcgattgtgccgcagaggaagattcctttgaggaagaatatataagagcaccacttacaggaggtgaagggttggactataaacaaagaattcctcttgccca

SEQ ID NO: 14497 - DNA, 214 bp, Glycine max
  unsure (1)..(214): unsure at all n locations
  Clone ID: PAT_MRT3847_113098C.1
agttaatatccatttcaatcgtaccatggcctaaaagttttgggagncgaacttcnnnttggcttgagagaccaaaatcacannttgtaatttgcgcaatnagatggtgaaaaattgcttttaaagtttaatggctaaggatgatgtacaagtggctgtgggagtacgtttcaaagttgtttttggcttatcttaattagattggtatgatcct

SEQ ID NO: 14498 - DNA, 165 bp, Glycine max
  unsure (1)..(165): unsure at all n locations
  Clone ID: PAT_MRT3847_113099C.1
gatcacaggatgatgctttttggaactaagggagcaggtgttataagcacacatatntatgtacacaaatattccattatttatacctttttaaaggtctttattgcaaaaaacacaggagagtataatttgttcaatacacaatcttattcttatcgtgcaaaa

SEQ ID NO: 14499 - DNA, 628 bp, Glycine max
  Clone ID: PAT_MRT3847_11309C.1
atgagcaacttcaccacacccacatggctgaatgattttattgagtcttgattacaaaaagccattgacaccttacatcaaagcaaagaagctcctagctaacaaaacaacatcaatgcattcaaaatgataggatggtatctatccactcttttgagacatcattttcttcctccatgcaagggcaagggctctagaaaaacatgggatgttggaggctcctcccacttaggcaaaaccaacaagtttctcactaatctcccaaatcttacgagccttctctgtatcactggcctcctgagacaactggttttcaaacgaagctgatgctttgttccagctccagtaaacaccaaattttgttaggcttggatcacttacaacctatataaaagacaaccacacatgagaaataaagatatttgaaaacttcatactcttgtagtcattatcttccctagagggttattattgatattacctgagcaagtctctttcctgcttcatcttctgagacatagcctttggttatgtacttctggaatggagggaacagagttctgaaaaggggaatgtgctctctgacaggccctgtgtggcaatgcaaccggggtaaagggaagcaaat

SEQ ID NO: 14500 - DNA, 554 bp, Glycine max
  Clone ID: PAT_MRT3847_1130C.1
aaaagcaaaaaactgaaacttcttattattgatattagaaattaccatagtcatgttcaacattgaagcatgaatatgtacagaacaatggaaccaaacgagaaaaactacataacccaaaagagctgaagcctaaaagcagagtcagcaccatcatattaagttgtgtactcttaaccacttagaaaagggttttaaaaaaaagttgggctatgattaaatcagtcaagtttgttagctccatgtgccccaattagcttggcatcacttggatctttgaagttagccccacacataaatccctcgctgtcaatcctaggcattgctttcatcttctttgttggatgttcaatgctcatgagaccatgctcactatgaaacatacacccattcggaaatggtgcaaatgatttagcacagcttgcttttataagctccagattttcagaaataactatggaaccatcagctgcaacaccccagtagagcccaatctggccattagaaccagatgcaacaaaaactgttccatccttggtgtcatagatcacaaa

SEQ ID NO: 14501 - DNA, 314 bp, Glycine max
  Clone ID: PAT_MRT3847_113100C.1
gattaattaggggctttttttcgtcaattccctatatattttggtttatatgggaatgattgggactgaaaaaaaatttacaatgatacaacagaaaagaaagcataaactggcggaaattttagacagacaaactggaccattaaattcatgccaaaaagggaaaattgaagccaccggccactaccgatttttggagaatccacgtcaaagagggactctataggatggatccaccattttcaagatgaacaaattacctctatttcctcttgatattctgtcaggctcaggcttaagaaagaaattcagac

SEQ ID NO: 14502 - DNA, 975 bp, Glycine max
  Clone ID: PAT_MRT3847_113101C.1
acgagcttgttttttctactggctcgccacagcatctcgtatctgtctgctacgtacgttggtggaacgaaaagatgatgaaggtgtggaactggtaccaaaattgcctttctgttcatccagtaaagacccaagccatcagttctgccattctctggggcgttggatatctttcagctcagtacatcactcattcagctgcaaaaaaaccccttcaactatctgattcagatgctaaatttacgataaactggaatcgcttggttgttacaagtatgtttggattcggtttcgttggaccagtgggccacttctggtatgaaggtttggacaaatttataaggttcaagcttcaactaaagccaaagtctgtgcgttccgtggccactaaagtggcaatggatggcataatttttggtcctctccatttgtttgtcttctttacttacatgggattatgtgctggcaagaatgttgctcaagtgaaggatgacttgaagaggaattacgtcccggccctgattttagaaggcggtgtgtggcccgttgtccaggtttttaatttttggtatcttcccgtgaagtaccagcttctctatgtaaacttgttctgcttgctggacagtgtttttctgtcatggttggagcaacagaaggacacaccttggaagaaatggtttgcatcatttcattccacgaatgaaaaaggaggtcgatgttgatgaggagattggtggaaaaagaaaaattgtttgattaaagcttttgaattgttttgctttttttgttttgttttgtaagttgtaatgggtagatttgaagatagatattaggtttaatgaacttttttgtttctatagtttcattatttgtattttttagttcccatagtttgaaagtggttttttctgtctatataatttacattttaattatcttttagttcctgtagtttaagtggttttttgagtcctt

SEQ ID NO: 14503 - DNA, 256 bp, Glycine max
  Clone ID: PAT_MRT3847_113102C.1
gacgcctgcttcctccgggaaatgtgttttcctcaagactcctttgaatgatgctgatgtcggcagaaatgaggcttttagtttgctacttcgggtcggtaattgtgacgccacccgtgtgggaacgaataaaattgctaaacagtgcaactgcgctgctgtgaggttgagcaatactaggacgtcacctgttatatactggacggacatctattttaagtatgacgctccacacactattcttgtgatatctgat

SEQ ID NO: 14504 - DNA, 707 bp, Glycine max
  unsure (1)..(707): unsure at all n locations
  Clone ID: PAT_MRT3847_113103C.1
acttccaaagtatatcccctggcaaacattaaaagaaaaatggcaagtccatagaaaaaggatttgctagaaagatgcatattttgaaccaaaacaaagcctcttaatcntatattcccttgcagtattttctggacctttatgttttcantcatggttaatgatgttggtactgctgttgcatctnttcnttcttttaactttgatgtgcatttttangttcttttgggtatttaggggtgggttcaattattgatatactagaagtttggcnccgtgtatacattagcacaattgattaaaactcagaagtcaaaaaataatttagacccaagcatcatggcaacgaagagagaagaattaattattaatttatctgttactgcaagttcatatttatttattgtgtttataatatatattactcctatatttaagccttggtaattgaaaattttcacattctgattttccccaccttaatctacaaaattaaaatgcgtgctagtctaactcttcaatcattaattgtctgttccaattctcttttccccatgctttgattttgatggtagggacaggggaaaggtgtagctaatgctgggccagaatggaaacttgaattcaaattttaagataacttggttgagttnnttcaaatgtgtgcagctacacatgaatttagtgtccaagtcttcaatcagttt

SEQ ID NO: 14505 - DNA, 161 bp, Glycine max
  unsure (1)..(161): unsure at all n locations
  Clone ID: PAT_MRT3847_113104C.1
ggccggnaaaaccccctacgacccacgcagtccggaagaagctatatttggctcctacaaagtttcgaaggagcaggctgagagggatgaaacgcaaataaaccatggaaaggcaccaccaccggcacgttgacgctgatccacacgctgatagaacaacc

SEQ ID NO: 14506 - DNA, 238 bp, Glycine max
  unsure (1)..(238): unsure at all n locations
  Clone ID: PAT_MRT3847_113105C.1
gaaagaagacggtgctttgaagccncttgctagggaattccgcagaccacgtccagatggagataatgtgggaccggagagaaaagaggagaaggctgcaagagaaggtgaggatagcacaatgggggtattgggcaaggctcatgagaaagagaaggaagcggggcatttttttttcgggagccatgggaagagaacggaaggagagttggaaccaccagccagaggagcggagagg

SEQ ID NO: 14507 - DNA, 314 bp, Glycine max
  unsure (1)..(314): unsure at all n locations
  Clone ID: PAT_MRT3847_113106C.1
gtcgcangcacgcgtacgtaagctcggaattcggctcgagtacggctgcgagaagacgacagaaagggngangggggngattttagccncannnntnnattgnacacntctggngagcnncaggngngagggnagaacaggntcncacaaagnagaagggatncagagatgaaacccaggttagagncagaagagaaggnntgtnncatnatcncgcnttgggctcatacgctatacnccggtatagaanatnacacttatagtgnganttnacgcagcncacagaaaanttctacccattaaccaaatttggg

SEQ ID NO: 14508 - DNA, 714 bp, Glycine max
  Clone ID: PAT_MRT3847_113107C.1
ggggaacaacacgaggatcagctgttggattcaaattggatagccttcttaaattatctgatacccgtgcaagaaataacaaaatgactttaatgcattatttgtgtaagcttcttgctgagaaaatgccagaattgctagattttgataaggatcttgtccatttggaagcagcttctaggattcaactaaaagcattggctgaagaaatgcaagctgtgagtaaaggtttagagaaagttgagcaagaactcgctgcttctgaaaatgatggtgctatatctacaggatttcgtaaggtgttgaagaattttcttgatattgctgaagctgatgtgaggtctcttatatcattgtattctgtagtgggaagaagtgcagactctttggggcagtactttggggaggatccagctagatgcccttttgaacaagtgacgcaaatccttgttgtctttgtcaagatgttcaacaagtcaagggaggagaatgaaaggcaggcagatgctgaaaaaaagaaattagagaaagaagcattgaaggaaaggacagcaaataactcgctttcaaaaaaagatggcgttcgatagatgcctaaacaagcaagccgtatggttactttcagttcaaacacactgcgttattcattttggactatctcaaatgcatatttgcatgtgccattgggatttattccttctaaagatgatgcta

SEQ ID NO: 14509 - DNA, 1235 bp, Glycine max
  Clone ID: PAT_MRT3847_113108C.1
gtttctggacgttgtcgtaagaacgtcactgctttgcttcgttcctattccacctcacgttccttatctttcttcttcttcttcttctcaaccgtcgtcgattctcagtttccgattgcagaatttgatttcagaatccaaaaaaatgaacacgttaatctcaccgccttctacaaaccgttacctttgtggggtcccttactctttcctctctccgcttcgacacaacaacaacaccaaccttaaccttccgaggttccattccacagttgctaccaacttcttgtcacactctccggttcgggccacgctctccgcacgtgccacttccgatgaagtagacacgcaaacggtggttgaggaactttcagaggagaataaagtggaagagaacaccaacgaggacaacacaaacacgtccactttttctgctccaattgacaaagaacttaaaaaggttgctcagaagactgctgctacctttgcaccaagggcttccacggctacaaaaaaccctgcagtgcctggaactgttttgtacagtgtttttgaggttcaagggtatgtttcaatgttgttgggaggagctttgtcttttaatctcatattcccttctgatgaacctgacatttggagattaatgggaatgtggtccatttggatgttcacaattccttcattacgagctcgagattgctcaaagaatgagaaagaagctctcaactatctttttctcctcgtcccattgatcaatgttataatcccattcttttggaagtcctttgctgttgtttggtccgcagatgtagtagctttattgggaatgtacgcatggaagtttggatggcttcagagaacggattaaggaacccaaatttggttagtaaaagttatcaatgcttgttggctttgtctttctcatggatctcaattttgtataacacgcagcaatgagatgtgacattccttgtagcacttcatggcccccaactcatggatgagtgatttctgtgttaaaagtttgagtagcctttgcatctactaggggagcaagataccatgttgcattcgttaaacatcaaatgaagagaatgttataggttctttaaaaagtttagcatgttgtattattgccgtgtctcacgttgcaggaaatttgaaattcccgaatgtaatcaagaacctccaaaagatgaaatgtgaagtcatgatacatatatttttgtaccactgag

SEQ ID NO: 14510 - DNA, 152 bp, Glycine max
  Clone ID: PAT_MRT3847_113109C.1
gccacgcgtacgactagtttgagatttcctgacaatgcaatcccattttcgggcggctttgatcctgataccaattaccagtttcccaatgcaaccatattaacacacaaagcttttcatcacatactagaccaacatgctatttattggca

SEQ ID NO: 14511 - DNA, 231 bp, Glycine max
  Clone ID: PAT_MRT3847_11310C.1
aaacggggaacggaaaaaaccttatattttaagaaacccccaaaaggggaaaaaaacattgttaagggcccctacctgacaaaaaaaaaaaccccgggattttttttaaaaaaaataaggggccactttaagggcttgttttgagagcttaattatatcccaggggattgggcccttaaaaagccctaccccctttggggcttcccaggggggcactccttttggccccgg

SEQ ID NO: 14512 - DNA, 315 bp, Glycine max
  unsure (1)..(315): unsure at all n locations
  Clone ID: PAT_MRT3847_113110C.1
taagcctcggnaattcggcttcgagggagaaagaagctctcaactatctttttctcctcgtcccattgatcaatgttataatcccattcttttggaagtcctttgctgttgtttggtccgcagatgtagtagccttcttgggaatgtacgcatggaaggtgcatactttcaagtagtctagatttactgttagctttactttcatgtaacttgtaatctgaagcgtgtctcttgcagtttggatggcttcagagaacggattaaggaacccaaatttggttagtaaaagttatcaatgcttgttggcaaaaaccc

SEQ ID NO: 14513 - DNA, 291 bp, Glycine max
  Clone ID: PAT_MRT3847_113111C.1
ctcacgcgcttctatattcgatcttacatcgaagctctcgggagcaaccacaacaccggctgcatcacatggcaaacgcagcatctggtatggcagtccatgattactgcaacttgaggtttttggagctgaaggcataaaggacacacctgttcatagtttttaagattgaggagcatcataaacaggtcattgtggagaagcttgctcagcctgtccagggctattaagatttcactgacagtcttccttcttaacagtgccgctatgctgggtatgaacactagtatc

SEQ ID NO: 14514 - DNA, 1892 bp, Glycine max
  Clone ID: PAT_MRT3847_113112C.1
tctctgctcaatccatctgtagaaacgtgaaccagaaccagaatggatcttcaacaacgaccactgaaacttcactttattccttacctgtcaccggggcatgtgcctccaactctctctctcttgacacaaccacttcgttttctccgctttcatcttctcatctcttctcttttccctgctaatcatggcaaccttgtcaactgtgaaggtttccccccattgcatgtttcaaacagcaagcaaaaatccatccactgttgccaccacaatgaagtgcccttcttcttttgggtctgtgaagagcatttccagatcttttggcttgaagtcatcctcttcatttagagtcactgccatggcttcttacaaggttaagctgattggcccagatggaacagagaacgagtttgaagccactgacgatacttacatcttagatgcagcagagagtgctggagttgaacttccttactcttgccgagccggagcatgctctacctgtgctgggaagattgttgctggttctgtggaccagtctgatggctcattcctcgatgacaaccaactgaaggaaggctttgtgcttacttgtgtctcctatccaactgcagactgtgtaattgaaactcacaaggaaggagatctctattgagcaatgctggccttaaagttgggaattggggaatttaaggtagactctgcaacttgtttgcttgttctgctttagagtcaaattttcttttgggattattagtgatttggtgtaatgattttttgtttgtgcaagcaagcactgtgatattaagacgataaacacccgtcgtttggcttttaaatgggatagttgatgtttctttaaaaaacgatggaacagagtgggaagtcattcatatggattgttccagagaagaaagggaaggaatacgagaatgagagcgaggaggagaaggaaaaatggcttccaaaagggtttgaggagagaaacagggagaaggggatgattgttaaagggtgggccccgcagctcctcatcctggcccacccggctgtgggtggcttcctctcgcattgcggctggaactcctccttggaggccgtcaccgccggggttcccatgatcacgtggccggtcatggcggatcagttttacaacgagaaactcataactgaggtgcgggggattggggtggaggtgggtgccaccgagtggagactcgttggttatggggagagggagaagctggtcaccagagataccattgagactgccatcaaaaggttgatgggcggtggcgatgaagctcaaaacatcagacgccgctcggaagagcttgcggaaaaggctaaacaatcccttcaggaaggaggttcatcccacaacaggttaacgaccctcattgctgatctcatgcgcttgagggaccctaagtcggccacctgatttcttgcgccatgcccctacaattataactcttccctagttataagaatatctattatgaattagtaaataaacagatttacttactaacttagtaagttcattttagtgcgttaagttgttgtaaactttttgttgagttgagaataaaggtgagtgaatttgatttgttcccaaaatacctctctgcggcactgcaaaactcgtcaccacatgcgggcaataagtaaccgtgatcaccactccctactacgcacatctcctccgtaagtcaagctccacgttccaaatccacgtcgttgacattcccgccaaagatgtgggccttcccgaaggtgtccagatcaagtccgctgtcacagagctcgctgacactgcacagttctaccaatccgccatgctccttcgcagatccatgtcccatttcaaggagaatcactcacctgat

SEQ ID NO: 14515 - DNA, 730 bp, Glycine max
  unsure (1)..(730): unsure at all n locations
  Clone ID: PAT_MRT3847_113113C.1
gttcttctctctctctctctctctctctcgtgaatcatcacttcgttttccccgctttcaacaccgctcatcttctcttctcttttctctgctaatcatggcaaccttgtctactaatcattgcacattacaaactgcaagcaaaaatccatccattgttgccaccatagtgaagtgtccttcttctttaaggtctgtgaagagcgtttccagatctttcggcttgaagtcggcctcttcatttagagtcactgccatggcttcttacaaggttaagctgattggcccagatggaacagagaacgagttcgaagccactgacgatacttacatcttagatgcagcagagagtgctggagttgaacttccttactcatgccgagctggagcatgctccacctgtgctgggaagattgtttctggttctgtggaccagtccgatggctcattcctcgatgacaaccaactgaaggaaggctttgttcttacctgtgtctcctatccaactgcagactgtgtaattgaaactcacaaggaaggagatctctactgagcaatgctggccttgaagttgggaactgggaatttaagcaagcactgtgatcttaattaataagacgataagcaccttcggttggcttttaaatgtggtgccgtgcatcacagtgatgcacgtgggggtggtgnggtgggtggcntaantgatggctttttggtgccggtgtggagg

SEQ ID NO: 14516 - DNA, 391 bp, Glycine max
  Clone ID: PAT_MRT3847_113114C.1
tctataaaaaaaaaaaaaaaaaagaaaaaaaagaaaaaataaaaaaaaaggacaaacaattgaatggaccgcagggtactttcgcgggcatgcgcgggggtggcccttgtattgggtcgactgtaggcacctcgtgggcgcgtggtttgccccgtggtgtcggggtaaaccaagccaatacacgggcctgctcctaactctgccgatgctgtgatagccgggggtgatacctactttagaggccttggcagaatttccctctcagcctggttgtcttcatcatagggatacgggtcgcgctctgtttcgctgcattttgcgcatcgtgattggctattaggacgcgccttaccgctactcttatcaaccgctgagtggctgtttttgcccc

SEQ ID NO: 14517 - DNA, 276 bp, Glycine max
  Clone ID: PAT_MRT3847_113115C.1
gatccacgcgttcgattaacgcttactaacactaggaatcacagaaaccaacaacagaccttgcactgaggatgaacgatagtctgaactggcactgggaggctaggctactttgttatgacgatgatcctacaccagaaacgagattaaatgcactgccgcaccttgcaaagcgtaacaaaccaaagactatgtgcccttggatcggccaggtcaactttttataagatgctctctttgactatacactcattgaacattcgaactagcagggcc

SEQ ID NO: 14518 - DNA, 367 bp, Glycine max
  Clone ID: PAT_MRT3847_113116C.1
acagagccatgcacgcgtacgaagcttgttatcctaaggcgccttttttttttttttttaaacgaacttcccttacagatataaagcgaaagtgctttctaaatttagatcaatagcgatttgtcaaagcccagaaagatgtactatcaaagttgaacaggctacagtattattctcgaactattgtgatttccggttcgatacctcctacataaggtcttttttttgcccccaaaggaccttgactaatggcaggagtgtagctcttaaggggcacaggagatctctggatcaactcgtggttgtcctacttgccagaccgtcatgtgaggtcgtagagcagccctgttatagttcctaccctttt

SEQ ID NO: 14519 - DNA, 849 bp, Glycine max
  unsure (1)..(849): unsure at all n locations
  Clone ID: PAT_MRT3847_113117C.1
aaatctcaccgaactaaagaagctttgcttccatttccgtcgagcagaaagcttctgctgaacatggatgctttccttttcattgttttcactttcgtgttgagcttccaaactcattttgctcaaggaagtgaactacctcgtaccacaagcagttcaaaaacatatattatccatgtgaaggggccacaggataagtcactagatcaaacagaagatttggagagctggtaccattcattcatgccacctactattatgagctctgaggaacagcctcgaatgatttattcatacctcaatgtgatgagtggttttgctgcaagactcactgaagaagagttgatagctgtggaaaaaaaggatggcttcatttctgctcgtcccgaaaggatactgcatcgccaaaccacaaataccccacaatttttggggctgcagaaacaaacgggattgtggaaagaatcaaactttggaaaggggataataattggggtgttggatactggaatcacgcctggtcatccttcatttagcgatgcaggaatgtccccgccaccaccgaaatggaaagggagatgcgaaattaatgtgacagcttgcaacaacaaactaattggagtaaggactttcaaccacgtcgcgaagttgattaaaggagcagaggcaaccattgacgattttggacatgggactcacacagcaagcacagctgctggtgcttttgttgatcatgcagaagtactaggaaatgctgaaggccagncatcagggattgccccttatgctcacctggcaatttacaggggtatgctctanagtctgtcgagagagtgatatattggctgc

SEQ ID NO: 14520 - DNA, 341 bp, Glycine max
  Clone ID: PAT_MRT3847_113118C.1
gcgtgtctaactcacttgcctcagcttgatagagtatggtcacaagagtgaagtgcaatgggaaaaaaggtacactgtgctggcttcgcaacttgcttgttgtttagtgcccatgaccaactcctcaaacgggcacatggtactatgcaaaatccatggattacaccatgtgacaacctacaaaaatggcctatctatagggatgggatggacataaaatggcccatctattggcagctttcttgagtccaagtaatgtgctgaaacttaggagtttggatggcttgtgactcatgttttataattctatctttaggaaaagtgaatgttttattgatttg

SEQ ID NO: 14521 - DNA, 1435 bp, Glycine max
  Clone ID: PAT_MRT3847_113119C.1
ttttggtctgtagtactggtgtaaaactacaaaaaaaaatattctgacatgaaaaacaactaaaaaaaattgtgtagagactgaaactaaaacttaaaacaagaacaataggaccaagtaaacaatttaacattaaaaagacttaatctcaaaattacaattcacaattgattattttaactaatgtgttgatagacagtgcagtggatccaattcatcatgtcaaagccctgccgcacgagtctatctcgtcgaggaatattgcaaggagatgatatgagaattcaaagcccaaacaaatagatcacgtccaatagcaacattagaaggagtaattgccacacttctgcttcagccgaagaaggtataccaggaaaaataaggggtagattcaacccaccctcgatttgcgtccacaaagtcagcaaccataataatacacaaaaaactttacctgaacatgctcacatccacactaccactaatcactttcacctaattaagcgtgcaaagcagcttatacatcacaaatccaaatatgggtttacccagaacgcacacattaaaccctatcagtttaactacttcattacgtaatagacacaatgctggcatgaaaaacagcatattcacaactaacacgataaagataaggaataacgctgtaaaacacattcacgaagagctaaataaaacatatcattgtatgtagataagcaaaagaaaataaaacaaaacttaatagtctcgtttgttcataagtaatggccttttcaaccaaaaagggacaaaaaactcaaaacaaaaaactactgaaaccaacaatcaaacaggtagacaaactaataacctcccttgaggtcattgacaacatcatatgggatgggggtaactgtctcaagggtcgcaccctccaccatgaaaccgggtttgggaccctgaggctgtctcttggtgctgatcttctcacccttgaccttggcttcggcctttagctgatcattcttaatcttcctgaggcggaactcctcagtgcaccttgaaggcataacatgctctacccgcacatgaatcctcttccttataattctgttgccaacctgcttgttgacttcgacgccaacagcacgtttggtgacattccagacgcgtccggtgcggccatggtagaatttgtggggcattcccttgtgaacggcaccgttaaccttgacgtcaacatagtcgccgacgtggtaggttctcaggtatgtggtgagggcgatggttcccttcttcctgaaaggacgagagaaggaatctctggtgcgggatctcaaaccatgaccagccggcatcttttcttcttacctagggtttctctgcccacgcgtccgcccacgcgtccgctagtttagatgcggccgctcgcgatctagaactagcggacgcgtgg

SEQ ID NO: 14522 - DNA, 627 bp, Glycine max
  Clone ID: PAT_MRT3847_11311C.1
cccacgcgtccgacggctgcgagaagacgacagaaggggatactttttttcttcttcttgaaatggctctccaggctgcttctcttgttcctgcttctttctcggttcttaaagagggaaagagtggtgtgtctctcaaggactccaccttgttcggtctttcattttcagaacctatcaaagctaacttcagctcttctgcattgaggtgcaagagggaattcgaacaaaagctctgtgctgtgagggccgaaacagtggctacagcctctccagcagttaccaagtctacaccagaagggaagaaaacattgaggaagggcagtgttgtgataactggggcttcatctggactaggcctggccactgctaaggctttggctgagacgggaaaatggcatgtaataatggcctgcagggattacctcaaagctgcaagagctgcaaaatccgctggcatggctaaggaaaactacaccatcatgcacttggaccttgcctcgctcgacagtgtccgccaatttgttgataacttcagaagatcggaaatgccgttagatgtgcctgtttgcaatgctgctgtttacttgccaactgctaaggaacctaccttcactgctgagggct

SEQ ID NO: 14523 - DNA, 350 bp, Glycine max
  unsure (1)..(350): unsure at all n locations
  Clone ID: PAT_MRT3847_113120C.1
gtttttactaataattgcaatataaaaaagaagaatctacttcaacttattgtaattggtgaaagtaagaaataagaacagctaatatattctctaacaaaaaaaaaaaaaaaaaaaaaaaaaaaaaaaaaaaaaaaaaaaaaaaaaaaaaaaaaaaaaaaaaaaaaaaaaaaaaaaaaaaaaaaaaaaaaaaaaaaaagggggggaaaaaaataagaggaaaaaaaaaccccggaattaaatanggacccggacccggaaggagggcgggttttcctaaaagggaaattttttaaccttggggttttactggccaaaagtttttcccgggtgaaaattttttccccttc

SEQ ID NO: 14524 - DNA, 429 bp, Glycine max
  Clone ID: PAT_MRT3847_113121C.1
tttgtgttgcacagatactagatccttagtggggggggctataaaaacacattgggggggaatacccatccattgacgctgctggtggtgatatctctaaatgcctccttgcaggctgtaacaatgaccagcttactatctatcaacctgaactcactggtgtgaggaaccattgtcccgggcaagaacctgttcttcagcactgatgatgaaaagcatgactctaaggctgacatagcgtttgactcattcaacaccccaactaaaactaatggtgtccaagctggtaaagcctgagattacacatattgagagagcccaggctctcatgattgcttatgatgcgacagtccacaagatctatgtacactaaatcacattaccacttaaaacaattgaggccttatagaacatactgacccactatag

SEQ ID NO: 14525 - DNA, 2200 bp, Glycine max
  Clone ID: PAT_MRT3847_113122C.1
aaattaacaactcactttttatagtgttccattataaaatatcctaaaaagatactgttagatggtgtactaacatgtaagtgtaagtgtgcagttgatcgagttgataaatattaaggtcatattttacaagttgatgtcattggagagtgatcaataaaatactaagttatttactactatgttctgtcgtaatcctttcaagtcacaagcgttaaaagagggtgtaagtgtcacttttcaattcctcactctcacgataagacaataacaaagtagtgagtagtgagtagtccaaccagaatccagaatccaaagctttttttttttgtcaaatgccatgtctcggagccaccaagagcagccactattagcggactcgttcatagaagaagacgaggcgcaagagacagcctacgactcctccgagaagattgtggtggttggagtggacgagtccgacaacgacgacgattggggctctgtaccccgattcttcggagggaagcgttggatgttttcagggcggggctttatgttcttcagtcagtccagatcccctttgcacttattcccttgctttgtctggtgtctaatgggcgggaggtgggccttttacgaattggttcggtcccctagattaccttcttcttcttcttctttctaacgccatggctgaggagccaccaagagcagcctctgttagagaactcgtgcatagaacaagacgagccgctagaaacggcttatgattcgtcggagaagactgcttggggtcggttgtcggggagtcatatgacgaggagattggggggagagtgccccgcctctggcaattgctccttcagagggttgaggttgagtgatcaatctttaaaatcgcggaataggaagtgccatccatttttaagtatgctcatgcttgtttgttactcgtgtgacaagttgatgcaataggtggtggcaccttattctttgcctgtaattataaactatgtcagagtagattttgctctgtatagtactttcaaattttgttgtcaaatgccttggcaacactctaattagttgagacaccttcgaagctgtagtgtccaaccagcaagtagttcttttccgctcttgttcagtcaaggcaggttgaccgcagcaagaaaggccgggttcaagaagctcttaattattactctatagagtccacccttgcccttgtagtctcctttatcataaatatatttgtaacaacagtgtttgctaaggggttttatggttctgaacttgcaaacagcattggccttgtaaatgctggacagtatcttgaggagacatatgggggtggactatttccaattttatacatatggggtattggattattagcagcaggccaaagtagcactattacaggtacttatgctggacaattcatcatgggaggttttctaaacttaaggttaaagaagtggatgagagcattgatcacccgaagttgtgcaatatttccaaccatgatagttgctcttatattcgatacctcggaagaatcgttagatgttttgaatgagtggcttaatgttcttcagtcagtccagatcccctttgcactcattcccttgctttgtctggtgtcaaaggagcagataatgggcactttcagaattggtgctgtcctcaagactacttcatggcttgtggctgctctggtgatagtgattaacggctatcttttgacggaattcttttcctctgaagtgaatggaccaatgattggcgctgtagtgggtgcaataactgctgcatatgttgcattcataatataccttatttggcgagccatcacatatttaccttggcaaagtgtaacacaaccaaagacaattgctcactcagcgggttgagtgatcaatctttaaaatcccgaataggaagtgccatccatttttaagtatgctcatgcttgcttgttagtacttgtgtgacaagttgatgcaatagtcggtggcaccttattgtttgcctgtaattataaactgtcagagtagattttagcgctgtattagcactttcaaattttgttgtcaaaatgcctttgcaacactctgattagttgagacacctttgaagctgtagtgtgcaaacaagcaatgtagttcttctttttaacaacttattgagagaattgaatgatttcattgccctt

SEQ ID NO: 14526 - DNA, 472 bp, Glycine max
  Clone ID: PAT_MRT3847_113123C.1
actcgagccgattcggctcgaggggatggggaacagagctcgagagataaaagaaatggctcataaggcagttaaagacggtggatcatcagcttcaaattgcaaattatttattcaagaaattgtgggaattcacctgagtaatgcatgttttatgcatggggcttgcacctggtgtgtcgtgtgtatagacacagggatgccaaaagtggtgaaccttgctagtgtcactatctacaaatcatagcaatttaccatcacactcacgagtcatgtgtcttaagcgctggtatatatatgtgaaaaataaaaagagaacaaatatggggatgtcaagtggaagaagttgagcaagttttcccgcaatttgagaagtattatgtatatataactagttggagatttacttgcaactatatgtataagatttgaacttcttaaaatgatttttattcaataaaattatgtttct

SEQ ID NO: 14527 - DNA, 1010 bp, Glycine max
  Clone ID: PAT_MRT3847_113124C.1
ggtccggaattcccgcgtcgacccacgcgcccacaaagtagtgagtagtgagtagtccaaccagaatccagaatccaaagctttttttttttgtcaaatgccatgtctcggagccaccaagagcagccactattagcggactcgttcatagaagaagacgaggcgcaagagacagcctacgactcctccgagaagattgtggtggttggagtggacgagtccgacaacgaggacaattgggggagagtacccccattctcgtggaagaagctatggctgtatacagggccgggctttctgatgagcatagcgtttctggatcccgggaacctggagggggaccttcaggcgggcgccattgccgggtactcgctgctgtggcttctgatgtgggccacggccatgggcctcctgatccagctcctctcggcacggctcggcgtggtcactgggaagcacctcgccgagctctgccgaggggaataccctccgtgggctcggagagtgctctggatcatggcagagctcgctctcattggctccgatattcaggaggttattgggagtgctattgctattaggattcttagtcatggggttgtgcccctttgggccggggtcgtcattactgctcttgattgttttatttttctctttcttgagaactatggtgtgaggacattggaagctttttttgctgttctcattggtgtgatggcaatcttatttgcatggatgtttggtgaagccaagcccagtggcaaggaacttcttcttggcgttttgattccgaaactcagctccaaaactatacagcaggctgttggagttgtggggtgccttattatgcctcacaatgtgttcttacactctgctcttgttcagtcaaggcaggttgaccgcatcaagaaaggccgggttcaagaagctcttaattattactctatagagtccacccttgcccttgtagtctcctttatcataaatatatttgtaacaacagtgtttgc

SEQ ID NO: 14528 - DNA, 748 bp, Glycine max
  Clone ID: PAT_MRT3847_113125C.1
gcttaatgttcttcagtcagtccagatcccctttgcacttattcccttgctttgtctggtgtcaaaggagcagataatgggcactttcagaattggtgctgtcctcaagactacttcatggctcgtggctgctctggtgatagtgattaatggctatcttttgacggaattcttttcctctgaagtgaatggaccaatgattggcactgtagtgggtgtaataactgctgcatatgttgccttcgtagtataccttatttggcaagccatcacctatttaccttggcaaagtgtaacacaaccaaagacaattgctcattcagagggttgaggttgagtgatcaatctttaaaatcgcggaataggaagtgccatccatttttaagtatgctcatgcttgtttgttactcgtgtgacaagttgatgcaataggtggtggcaccttattctttgcctgtaattataaactatgtcagagtagattttagctctgtattagtactttcaaattttgttgtcaaaatgccttggcaacactctaattagttgagacaccttcgaagctgtagtgtgcaaaccagcaatgtagttctttttccttgctccctcgattttactcatattctatagggtaataatcttttaaggttgtagcatgaaacaatctttcaaggttgaagcatgaaacaaatcttttaaggatgaaacactctgattagttgagacacctttgaagctgtagtgtaac

SEQ ID NO: 14529 - DNA, 2600 bp, Glycine max
  Clone ID: PAT_MRT3847_113126C.1
ataaaatgatttgtagaggaattgacttgaattgagcaaagaggacccatgccgtggagaagaattgaagcctccgcttcctctctccatgaaatttcttcactttgcaaaaccaaaacagattgaattgctattatccaaattcatctacttcttcttcttcttcatagccatgtacaggttttaattttaacgcctttttttattattagcctaacgaatcttcttataaaccctcaaacctcttgtgctgttcgcattccgataaacaaacacgcagatttgaaggaacgaaagaacgaccggccgttttgtttttgtttattaagaatttattggtttgcaaggaaaaataggacaaagttggtctgaagcttagatctttgtttgggaatggcgagagggagcagatcagtgggtagcagcagcagcaaatggaggtactgcaacccttcctattacttgaagcgcccaaagcgtcttgctctgctcttcatcgttttcgtttgtgtctctttcgttttctgggaccgtcaaactctcgtcagagagcaccaggttgaaatttctgagctgcagaaagaagtgactgatttgaaaaatttggtggacgatttaaataacaaacaaggtggtacctctgggaagactgacttggggagaaaagctaccaagtccagtaaagaggtcctagatgatcccattgatatcgagaggagggaaaaagtaaaagaagcaatgcttcatgcttggggatcttatgagaagtatgcatggggacaagatgaacttcagccacaatcaaagaatggtgtcaatagctttggaggtcttggagcaactttaatagattctcttgatacactatatattatgggtctcaacgaacagtttcagaaagcacgagaatgggttgcaaactctttggattttaacaaggattatgaagcaagtgtttttgagacaaccataaggcttttgagaagaagtagtaggtggccttcttagtgcatatgatctttcaggggacaaagtattcctcgacaaagcaatagcaaagcttcttacttgcggagacccatgaagtatttttatcttctctcctcaccttcttctgtcatcccattagatgaatgggtattcatcattgtatcacgggtgagagtatcttggcagattctggcactgaacaactggaattcattgttctatcccaaaggactggagacctcaagtatcagcagaaggtggaaaatgtaatagcccagctaaataaaacatttcctgatgatggattacttcccatctacattaatcctcatagtggggcagcaggctactctcccatcacattcggtgccatgggtgatagtttttacgagtacttgctcaaagtttggatacaagggaataagacttcatccataaaacattatagagatatgtgggagaaatcaatgaaaggcctgtcaagtttgattaggagatcaacaccatcttcttttacttatatatgtgagaagaatggaggatctctaacagacaaaatggatgaactagcatgctttgctccagggatgattgctttgggatcatttggttacagtgctgatgatgattcacagaagtttctgtcacttgcagaagagcttgcttggacatgttataacttctaccaatcaactccaacaaaattggctggggagaactatttctttcattctgggcaggacatgagtgtgggtacatcatggaacatactgaggccagagacagttgagtccctcttttacctttggcgtctaactggcaacaaaacataccaagaatggggttggaatatatttcaagcttttgagaagaactcccgcatagagtcaggctatgttggactgaaggatgttaatagtggagtcaaagacaacatgatgcaaagcttctttcttgcggagaccctgaagtatttttatcttctcttctcaccttcttcagtcatctcattagacgaatgggtattcaacacagaagcccaccctctgaggattgtgaccagacacgaagagggacttgttaagaatttaaatgagaagcaaaaacctttttctagaataggtggcagaaaggaaggaaggtcaggttagatatccattcttctctaccattgctgatcgaaccccttttaccaaaattaaagaagagcagtttgttccactatggagcttgtaagatgtcaggatttcctcattggggaggggtaaggggttcgttcattcagccacagatggtatctaatataggaaatagttcttcactgaagttcttaaaatgggtttattcaaggtgatctgaccttttattgatgaatgacccttttgaaattcacggcttataggttgttgtcctttattttttttttttctggaaccaaatattcagagcattatatataactgaggcatatatctgcgcattgaatagaagataatccctgcttaacaattttctttatattgcttttatttattacggaattttatggagcgcgttagtgttgtaaaatttaaaaaaaaaaaaaaaaaaaaaaaaaaaaaaaaaaaaaa

SEQ ID NO: 14530 - DNA, 1842 bp, Glycine max
  Clone ID: PAT_MRT3847_113127C.1
ccaaaatccagagtagtaggtggtcttcttagtgcatatgatctttcaggggacaaagttttcctcaacaaagcaatagaaattgcagacagattattgcctgcatggaatacgcctacaggaattccttacaacatcattaatttgtcacatggacgagcacacaaccctagttggactggggtaaattatagaattctgttaatgcatttcagtcttacttaacagtaggagatttgggatattacttaaatgggttgtagtccttgattttaactacctggcattgtttacatttttattacccttagagtcagagatatggctttaatgggtttatataatccttgtgtttttattttgttaagggtgagagtatcttggcagattctggcactgaacaactggaattcattgttctatcccaaaggactggagacccgaagtatcagcagaaggtggaaaatgtaatagcccagctaaataaaacatttcctgatgatggattacttcccatctacattaatcctcatagtggggcagcaggctactctcccatcacatttggggccatgggtgatagtttttatgagtacttgctcaaagtttggatacaagggaataagacttcagccgtaaaacattatagagatatgtgggagaaatcaatgaaaggtctatcaagtttgattaggagatcaacaccatcttcatttgcttatatatgtgagaagaatggaggatctctaacagacaaaatggatgaactagcatgctttgctccagggatgattgctttgggatcatttggttacagtgctgatgatgattcacagaagtttctgtcacttgcagaagagcttgcttggacatgttataacttctaccaatcaactccaacaaaattggctggggagaactatttctttcattctgggcaggacatgagtgtgggtacatcatggaacatactgaggccagagacagttgagtccctcttttacctttggcgtctaactggcaacaaaacgtaccaagaatggggttggaatatatttcaagcttttgagaagaactcccggatagagtcaggctatgttggactgaaggatgttaatagtggagtcaaagacaacatgatgcaaagcttctttcttgcggagaccctgaagtatttttatcttctcttctcaccttcttctgtcatcccattagatgaatgggtattcaacacagaagcccaccctctgaggattgtgaccagacacgaagagggacttgttaagaatttaaatgagaagcaaaaacctttttctagaataggtggcaggaaggaaggaaggtcaggttagatatccattcttctctaccattgctgatcgaaccccttttaccaaaattaaagaagagcagtttgttccactatggagcttgtaagatgtcagcatttcctcattgcgaggggtaaggggttcattcagccacagatgtcagcatttcaaatagttcttgactgaagttcttaaaatggttttattcaaggtgacctgaccttttgttgatgaatgacccttttgaaattcacggctaataggttgttgtcctttttttttttttttttttctggaaccaaatattttcagagcattatacaactgaggcctgtatctgcgcattgaatagaagataatccctgcttaacaattttctttatagtgcttttacttattacggaattttatggagcgcgaggtagtgttgaacacttgtgttgtttctttgatgaaatttgctatggccctataggtggttctctgtgttcaaaaaaaacaaaaaacacag

SEQ ID NO: 14531 - DNA, 561 bp, Glycine max
  unsure (1)..(561): unsure at all n locations
  Clone ID: PAT_MRT3847_113128C.1
cggctgcgagaagacgacagaagggtacggctgcgagaagacgacagaagggtacggctgcgagaagacgacagaagggtacggctgcgagaagacgacagaagggtacggctgcgagaagacgacagaaggggacggcactcgttttcgttctcgttctggtttatagatctttgcgaaggagggttacagcgctcaaccaaagatgcagaacgaggaaggacagatcactgagctttacattcctaggaagtgctccgccacaaacagattgattaccggtaaggaccatgcttcggttcagatcaacattgggcatgtggatgagaatggcgtctacaatggccatttctccacttttgccctctggggattcatccgtgctcagggtgatgctgacagtgctctanaccgcttgtggcggaagaagaaagttgaagttaagcaacagtagacacccatgataggttggtacttcgttatggattaatttctactcttggtagagatatttgagtcctatgatggcggtttgagcacaaatactcattctgaaatttc

SEQ ID NO: 14532 - DNA, 251 bp, Glycine max
  Clone ID: PAT_MRT3847_113129C.1
gatatcctggtatggggtatacataagagtattatcgatgtatcgtctatgagcatataactaggatatttgtttctatcgaaaactgactctattcaatgcacattatacatttctgctaatactacataactgacaacctgcttgaagatgactattgccacatcacatggtgggagtattggaccataaccaaatcaacagacactagtacacttgaatgacttatacccggagatctttgcaacttg

SEQ ID NO: 14533 - DNA, 1092 bp, Glycine max
  Clone ID: PAT_MRT3847_11312C.1
attaccatgggctaaaagctagcaagtagaaaccatcatgtttctggtgccaccaagggccagatacacttttttttctgttgagagattgcagctgaatttcattggggggtgcagaaagaaaacatggatgatggaaatgctgagctttctgataagctttcagataataatgttctatttttgaatccagagtcatgtagcagttttcaggcttcaagtagcagcagaacatgcacacacactcacacttgcaatccacctggccctgatgctgctcatacacacacatgctatcacacacacacccaagtttttgcaccagaagatgatggcaggaagcactcaaactccaagcaaaaaaggccttctggaaaccgagaagcggttaggaagtatagggagaagaagaaggcacacacagcatacttggaggaggaagttaagaaattgcatatggtgaatcaacaactagtgaggaagctacaagggcaggcacttcttgaagcagaattagcaaggttgaggagcattttggcacgacttagggggaaaatagacagtgaattgggtgcttggccctttcaaaaacaatattgtaacacttcttacattttcaaagaaggggatgctggtcttgagtgtcagaagaacaatttgccatgcttccatccacatgtaggatcatcatcccaggtcaacatttgtgcatgtggaaaatccatgattccattggatggaaactgccaacctgaaatggtagattgccaagtagatgcaaataacatgaccagtactgaaggacaaactgtggataacatcatgtcatctgcatctcaagacggatagtttagccagacaaaaatgtctttcttgtgagtttctatccaattgctatcacagatgatttgtttgtttagcatttgtagttgataggtaagatgaggtacataaaaatataatcactgttaccctaaaaggtatgtatgtaaggaccagcccaatagaaagtgagacctaaagcaaaaaaaaattgagagagactttatctatgttaaagaaaagagtgatatgtgtgaccttttattcagc

SEQ ID NO: 14534 - DNA, 190 bp, Glycine max
  unsure (1)..(190): unsure at all n locations
  Clone ID: PAT_MRT3847_113130C.1
cntncgtangctcggaantcnncnctcggaaattcggctcagagntgaaatatatcnntagcgaagatgnganancnttaangcccgangggatgagcaggatntnncgctgggagcnaacaagntcccggannnacanccnattnggacngcggngcananccaannacgatngcaggactatcaggtg

SEQ ID NO: 14535 - DNA, 347 bp, Glycine max
  Clone ID: PAT_MRT3847_113131C.1
ctaaaaaaataattaaaataacaaatataatgaacatggtcaaatcattatttttagtcaacaatccaatctatttcactaacaatcatcacatttatctcaaagcaaaatggaaagttaataatagtataaaaatttagtcaagtcttgtctttcagtttttctttacaatacatttatgattgtgacaatgacttgactaaggtgttattgtaattgttttgtgtgttatcatcaatacaaccctccaaaaaacacttgtcatgaaaatatttgtaatcaattagattagagtttgttttctctgttagtggtcttaagaatgcttccaatacaatataaatagt

SEQ ID NO: 14536 - DNA, 510 bp, Glycine max
  Clone ID: PAT_MRT3847_113132C.1
caactctgaaattctctaacacttctctagatcgtagaactgctacacctttcactctctaattacacaatgaccaatttgaagcttgtgttcacgatcagttccattcttctagccttggtgtttatcaatggaatttcttcagttatggggaggccactgaaaaaggagcacatcataacaacaacctacgaaaacagtgtcaaagaaatgggcacagtggaagacaacaatattctcctgtggcgccgaagcatcatagaaaatgcagcaaatgatggtggtgttgataaatggatcgacgatttccgaccaacggatcctggtcatagtcccggtgctggccattcctccccaaccccaaaggacgctagtaacggggccccaaggccataggtgtacatcattcttctgcatataataataatgatgtttcgttacttgatgcattattttttattcgtagaaatcaaataatattaaaagatttaagataacttaaatatcatg

SEQ ID NO: 14537 - DNA, 301 bp, Glycine max
  Clone ID: PAT_MRT3847_113133C.1
ggctcgagacttgaagccttaatatcaagcttgggcgacagagaaggcggaagagagtggacgcggtccactctgtgcatactccggtgggagaatccctaacggacatcgtgaggctcgcgaagcgctcccacatacccgagcgcgaagaattgttcacggtagccgcacgtgctgcaatggggaacggatggatgggattcgtcagtttcttcgtgaagcttaatttttattccaattaacaacatcatggtgtgatctggttagatcaagggaactactatcaccaaaataattcaag

SEQ ID NO: 14538 - DNA, 298 bp, Glycine max
  Clone ID: PAT_MRT3847_113134C.1
aaggggagagaagacagggacgaggagaccatggcataatattcatattctaaacctcggaggcccgcgaagcttatgtacgaggaagcgtgccttgccattcgcattcccaaaactggacttgtttgcagcacaagctcaagtgcaacggcagattcctttgccttttctccaacaccagaaaggaggaacaagctagaatagctttagacgtgcactaagtgggaagataaatgaatttgacaagtggaacaaggaaattaaaagaaaagaagagctgggaggtggaggtgacact

SEQ ID NO: 14539 - DNA, 245 bp, Glycine max
  Clone ID: PAT_MRT3847_113135C.1
ggagagagagaactagtctcgagttttttttttttttttttttttttttcttcaagcaatcaaaatatccccggccatctttattcaccaattatcatattttacttgaaaactaccaattcatcccacccattgtccacatgaataaattatttggacctacttttcccctcccactttgaatgaatggtatagatggcaaattaaatatactactatcctacctagagaaaacctaaataata

SEQ ID NO: 14540 - DNA, 461 bp, Glycine max
  Clone ID: PAT_MRT3847_113136C.1
acggctgcgagaagacgacagaaggggtcatagacaagataaagtttttgctggaagaggaatgtcctatcactgtttcatgtgctgacatccttgccatggctgctcgtgatgcagttgaattggtaagcactgctttgtcacagttgaattggaagagttatttaatacttattattttgttgcttaaaaacaatttctattgtttgtttttgaagagaggaggaccaagatgggaagtcttgctaggaaggaaggattctctggagtcaagtttcggtggagctaacattcattcctgctccaaattcatcttcagaggttttcatagataattttaagcaacaagaccttgacatagaagacttggtaactctattaggtatattattattttgacaagttacttatggggtggtttggtcctatattcatcaatcaaaagggaatttcaccttaac

SEQ ID NO: 14541 - DNA, 537 bp, Glycine max
  Clone ID: PAT_MRT3847_113137C.1
aaagctaatcagctgcggatcatactcaaccttaacggactcggcgtggtcaccgaggcttcggtattcggggttggacttggatccgccggcgtagccgacggtggtgcgaacaacgcccggtaaacaaccgaacaccgcttcggatctccagaagcttccgagggcgaagacggcgacccgcaggcggtgttggtcgagcgggtcgagggcgggttgggcgatccgatccgggaacctaatgcagagagcattgtggacgaggaaaagaaagagtacgatcaaaactgagaaatggttgtggttcctctctgctggaactgccatttcgccactcgcccaggtccttgcgttttgcctgctaaaataccaagccgtggaaacgagttgtcgtttttaggaggtgtacgtgccaatggccgaaggcgccacccccaccaatccgtcgctttgatgatacgacacaggaaaattgctagaacacatccccttctgtcgtcttctcgcagccgtacggacgcgtgggcggacgcgtgg

SEQ ID NO: 14542 - DNA, 603 bp, Glycine max
  unsure (1)..(603): unsure at all n locations
  Clone ID: PAT_MRT3847_113138C.1
acgagctggatccccgcgtccgcggatttgcagcagaggcagccgactaagttatgcagtgagtaaacgacgtcgtatccacacccgaggttctgcaatgccattccgagttcgcactgcaactgcaagtcgctggtggtctctgcacaccgttttcaacactcattgtctttgccgcaacttgtattattcggctttgtccaaacgtcagttttctggcaattgcgacgattttttgcagtggttggagcggaaagctgcctgtagtatttcctcctcactttttattggcaattcttcgtatggaaggtctctgtttgcctctaagataatacaaactggagattgcattttaaaggttccttacagagtgcaaataactgcagataatctccttcctgaaatcagatctttgattggtgaggaagttggaaatattgcaaaacttgctactgttattctgatcgagaagaaactgggtcagggctctgagggggatgcttatatggagtgggctgcgcnnnnnnnnnnnnnnnnnnnnnnnnnnnnnnnnnnnnnnnnnnnnnnnnnnnnnnnnnnnnnnnnnnnnnnnnnnnnnnnnnn

SEQ ID NO: 14543 - DNA, 606 bp, Glycine max
  Clone ID: PAT_MRT3847_113139C.1
ataggtataatactcacttataatatatttatttattagggatgtttatagttatgtaaatacccaaatcatgagcacccctactcatgattctgtacaaactataggacatcttacaacaagacatgtacaaagagccacatagtaaacataactccaaaagcagagagatgaaagagcttttgagcttctttgatgggaaataccagttgtttctgtctagtgtaaaaacgataccacatgtggatctgtccgacgtggaagaccagttcgagctcccaaagctctacacttggcagctgccacttgagcagcaagtggcaacattttctctggtaccatgtttgcacagatagcatacataatggctccaataaaagcatccccagcaccagttgtatcaatcagctcagaatctggtatcttctcagctgttccaatatagaatctcccacaaattgtccctattccatttgctctgaattttgtcaccgccgatggtatacaggtagggatagccaagctatcatctttccctttatataagaattccaagaaactctccacatccctttcttctatgtcagaatcctccggacgcgtggg

SEQ ID NO: 14544 - DNA, 988 bp, Glycine max
  Clone ID: PAT_MRT3847_11313C.1
attttcccgcttccattcaccatcaccgctaagtttcccccttctctgatggcaccggttactccaagaaccgcgttccccaaggttctcatcgagagagactctgactccgaacagagttcatccgaagaagaagaagaagaagaagaagaagaaaaacttgacgaagaagaagaagttggggtttctactgcaaatgagaagaccgagaaactggaactgggttccgacgcaaacagaaaagggaaagcccccatcactattagtctaaaaaaagtttgcaaggtgtgtaagaagcctggtcatgaagcgggctttaagggtgccgcgtatattgattgccccatgaagccttgttttttgtgtaaaatgcctgggcataccactttgacttgcccgcatcgtgtctctactgagcatggagttgttccagcacctcgcaggaaagcgtgtaaacctttggaatatgtgtttgaacgccagctacgaccatccctaccttcaatcaagcccaaatatgtgatcccagaccaagtgaattgtgctgtcatcagatatcacagcagacgggtaacatgcttggagttccaccccacaaagaataacatcctcttatctggagataagaaagggcaacttggagtatgggattttggtaaagtatacgagaaggtggtctatgggaacatacattcttgtttagtgaacaatatgaggtttaatcctacaaatgattgtatggtctattctgcatcctctgatggaaccattagttgtactgacttggagactggaatatcatcttctccaatgaacctgaatcctgatggatggcagggtccaaacacttggaaaatgctcaacggcatggatattaacagtgagaaaggtctcgttcttgttgctgatagctttggttttcttcacatgttagcagttaaagtgcaatacaattgccgcacagcatctgttaggagcttgtttagga

SEQ ID NO: 14545 - DNA, 227 bp, Glycine max
  Clone ID: PAT_MRT3847_113140C.1
atccatttgtaaagttgccaaggatgcagctggagttgcatgaaatgtgttagctttaggtgttgttgtttctcccatacccacatgtaggatgattatcagaaatgggtcaacagtgatgttctcagggttgccatatatttattccctgctgaattgcttgatctgcatttggatggcacacctctgatatctggtgataattttttggttataactggtaattc

SEQ ID NO: 14546 - DNA, 139 bp, Glycine max
  Clone ID: PAT_MRT3847_113141C.1
gaaccctactatactccttggccaacctgctgccatcttgcaccgtcaaatcatacttcggcaacttgtgcacatccaccaaacctaaactgacgtaatccaacccatgtgtcccaataatcgagggcttctccgaaac

SEQ ID NO: 14547 - DNA, 447 bp, Glycine max
  Clone ID: PAT_MRT3847_113142C.1
ggcccaggacaaaaggggccattgatattctattctattaacagcccattttccggctctgggagctcctattaaaaaccagggaaaacttcgggacctcaggggggaaggaaggaggtaagggggaatgaaaaaaaaaaaaccgaaacccccaattattaccgaactccactgacaatccgttttttataatacaagcaaacaatagttaaaccctaaagggtgcgcttgggagaagcctaagccgtcaaaataaaggggggaggagcattatcgggaggcatgtaaaggtggacaaaccggagctttttgctcgggtggaaggttttctaaaaaaaaaacttggggaggtcctctttgggcttcacctgggggggggggaaatggtccggtttgcccccgaagggagctgggggggggcttgggtgtgtgggggggggggggggg

SEQ ID NO: 14548 - DNA, 560 bp, Glycine max
  unsure (1)..(560): unsure at all n locations
  Clone ID: PAT_MRT3847_113143C.1
gtggggtgttttttttttttttttttttttttttttttttttttttttttttttttccccccctccccaaagggaagggggcctttgggggaaaagatttttcaatcaaaacaaaaacccccaaaaaaaaccaggtttcccccaaaaaaaccttttcccgggggaaaaaaaaacttttggtcgggaaccaaggcaattttttccccgcctttggatttgggccaaaaaaatggcccgggaaccccttaatttaccccacatttgcggggactccccggaaaggtaaggcaaaaacccccttttttccccccccccgcccttttatggggcctggaatataagttggggtttttcccctggggggagaccccccaagccaagggccttttgaccttcaaanntgcagccgggatccccttcccaagagggaaaacaaaggggggggcccccctttggggcccggccccggatggaaaaaaaaaaacttttttagcccgagggggcgcagaacttttttcctttgggaccgccaccggaaaccaaggggtgtggggggcccc

SEQ ID NO: 14549 - DNA, 379 bp, Glycine max
  Clone ID: PAT_MRT3847_113144C.1
atttcttttggatttatagccgaatgtgtggaggttagttgctctctgctcgagtcccgctttgatcgatcgacaaacaaacacctaaatcgatacatactaacaaaaatcaacaacagaaactatagactctgcatagacaccacttccatcacataatttgatccgagtcaacggtattcaacatgcaacatacattatcaaaaaagtgacggatccgtacggacgcacacaatgcatagggaccgatgaaatgatacacatcgatcgtcgcacaactgaccggcccatgccaccggcggggtgatcggtttatcgctgctcaaaggagcgctcctgaaaggatttctcgagcccatgcaaccaattcttaaagtct

SEQ ID NO: 14550 - DNA, 470 bp, Glycine max
  Clone ID: PAT_MRT3847_113145C.1
aaatgatattagagtttattttaattgttgttgggcctattggataatttgttgtcagattgtttgtagatgttttgttttttaaacttcatgatctagatgttcaatcctcgtcataagagtgttttgcaaatcccacattgactaattatatgaccaaagtagtatatataagtacaaaacaaccctcctttttgaattaacttttgaagttggattagacccaaattcaaaatgttaaatgttatctttcacttagatcagatgtgcatgtgttgttgttcttattcataaagaccatttatcttgtatgataacttgtttttaatatttgtccttagctaatcattgttaacttttggttgagttagactcaaacccaaatgctaagatgttgtttctcgctatgagatgtgcaactgttgtgttgttcttattcataaagacagtttatctcgtacaataacagt

SEQ ID NO: 14551 - DNA, 588 bp, Glycine max
  Clone ID: PAT_MRT3847_113146C.1
caccaacaagttttatttattttttaaggaaaacaaaggtataaccaaatttatttgggcatctacttggaattattaaacaacctacccagggaacaaaaagggttttttataaaagggagaaaataaggacaaagccttaactttaacggggaaaaaaccccccccttttttggcggaggcaaaaccttactaccggaaaatcttaattaactattaaccccgaaaaaccccctcctcctaaggggggaaaaaaaaaaccctcggaattaattaattaaaaaaaagccccaggggggccgaataacacattgaacaacccttaaatattaatgggtcaacttaaaatttaattaagggccccccaaaaacgggcataaagttccaagcctttgcctttgtttttggctaacatttcctggttggaaataaacaaaatcgggaaccaacacccttggaaaattctaaaaaaactgattccaccttttttaatccatattggtaaccttcacaaaactggacctggcaggaaactcattcacagttgggttcccaaatgatgccccagccaaaaagtcatttttttgt

SEQ ID NO: 14552 - DNA, 1187 bp, Glycine max
  Clone ID: PAT_MRT3847_113147C.1
ccgttactaagcagtgcctattagaccatggtctcactccaaaccacactctacgcaggctgatccaatcctggtgcaccctcaatgcctcacttggagttgaacgcattcctactccacgcgcaccaacacgcgtccgctcagattgtgaaactcctcacagaagcaaaaaggttccctgagaagcaactcaagtgcctcacaaggcttcgatccattgcctttgaaggccaaaggaacaaaacatgtttagagtctgcaggagtaatagaattcttggtctcaacaatgaagaacaacaacacacaagaagactcaactgttctcagtgaagcagctattgaagtcttgttccacctcaatctttccgaggctcggattaaagctctgattaacaacgaggaatttcattgtattgagtcattgtttcatgttttaagacttggaaactaccaatctagagcctttgctacaatgctgcttagatcagcatttgaggtagctgatccaatccaattgatcagtgtcaaaactgcactgttcgtggaaatcatgcgcgttctgcgcgatcagatttcgcagcaggcttcaaaggctgcattgaagctcattgtggagctctttccgtggggaagaaacaggatcaaaggggttgagggtggtgctgttttggtcctcgttgagttacttcttggtgcctcggaaagaagaacgtgtgaactcattttgatagctttggatcagctttgtgggtgtgcagaagggcgtgcagagttgttgaaccatggtgcaggagtggccattgtgtccaagaaaattctaagggtctctcatgtggcaagtgacagaggggttagaattttagcctctatttgtaggtattccgccaatgctagagtgcttcatgaaatgttgcaggttggggcagtgtccaagttgtgcttggtgcttcaagtgaattgcagtttaaagactaaggagagggcaaaggaaatactccaattgcattctgtggtttggaagaattctccatgtattcctgtacctttgttatcttcctatccatgatctaattctttcataattagtaagttctttttgtgtacatgcaatgaaagtgtatggtgttagagatttttgaattatacaaatgaatcttaataatcaagagcgaaaattttttctta

SEQ ID NO: 14553 - DNA, 382 bp, Glycine max
  Clone ID: PAT_MRT3847_113148C.1
ggaagattggggaacggttgtatctatctctattaagttttataagactcacttattcaatcctattttaaaaggcggaattcaatactttttgttgaccacgttgtgtaaattttgaacacgagaacattcaccccccttcttgactttgacacattcatgggcaaccaacctcctaggcgtcctattcacttttaaaaagacattgttttcaatggtaattccgcaaacctataaaatcaattgaaaggtgtttaaacaccatcgtttcctttaccaaaagaaataaaaaaactctttttttgttaacattcgagggaatgcgtcatcttaaattggacacatgcccgcacaaattttggtgaaagcccgcaatttggaa

SEQ ID NO: 14554 - DNA, 388 bp, Glycine max
  Clone ID: PAT_MRT3847_113149C.1
accggcccgaaaaccccggggcgacacacgcgcttgttacgatatactgagtagcgaaaatgctaggggggatggtacgaccaccaagcaagttatgagcaagatggcagaaatgataaacagtctttgcggaggcgatgaaaaattgacgcgagaaaggacacacctgctgttggctagatgttaaaaggaaggcaaattgaaaaaaagatgccaggagagctgaatgaggaatacctactggatttccgctcacaggtatctgcaacagcatgctcaaggagaagctcattagatatagctatgaaaaaaaactgcgccaggctaaagctaaaagtatgtgtctacaacccctgaaaaacaccggtgctttgcgagagaatggaga

SEQ ID NO: 14555 - DNA, 425 bp, Glycine max
  Clone ID: PAT_MRT3847_11314C.1
ctcgagccgaatcggctcgagaaaaaaaagaaggaattttgatggtaaactaatatttctaatatcagaattcgaaagaaggaaagaagaatgggaggttcatcggaaacgaagcttatgcaagacctgttgttgtacgcggcgagcgcggcgctaagttgcttggtgttgttcgccggactgagacacctggaccctaatcgcgaatcgtcgaagaaggctctcgagcataagaaagagattgcaaagcgtctcggtcgccccctcattcagactaacccttacgaggatgtaatagcctgtgacattataaatcctgatcacattgatgtggagttcaactctatcgggggactggagacaatcaagcaagctttgtttgagcttgttattctgcctctaaaaagaccagacttgtttcgcac

SEQ ID NO: 14556 - DNA, 293 bp, Glycine max
  unsure (1)..(293): unsure at all n locations
  Clone ID: PAT_MRT3847_113150C.1
cgcncacgcacncntacgtnagcncggaattcggctcgcngnnncnccacacaacntccgcgnaaccacacnnnnnctgaacggacaancccnnnacgccgacganaccaccncnggncancacacanagacnnaananccacancgnancncccggaacccgngcancggacaaggggccagcganngcccaccnganncaccngnnncnnnnangggaanancaagganngagangcganangagaacgnannangnaanggnnaggcaacnacnnactnnggcnngggng

SEQ ID NO: 14557 - DNA, 473 bp, Glycine max
  Clone ID: PAT_MRT3847_113151C.1
caaccaaaacaaagggaaaaaaaaagtatccactttcccttcttcttcttccatttgggttttctcaaaagtgaaaagcaaattccgtgacttccacaatcaccactcggatcaaactcttgagtgatagactttgaatgaaatcttgtttttcattaacgagattcaattgaagtgaagtgattattcactggaaaacttatttttcatagtattggaggtacaactgaagctgttagatttgttttaactacacgagttcgttggatatttgagcatggctgggaatcaagatcagtttgagatcaagtttcggttgactgatggttctgatattggccccaaaagttttcctgcagctactagtattgcaacattaaaagagagtgttctcgctcagtggccaaaagacaaggagaatggcccaaagaccataaaagatgtgaagttaaataacgcaggaaaaattttga

SEQ ID NO: 14558 - DNA, 562 bp, Glycine max
  Clone ID: PAT_MRT3847_113152C.1
ggggaccacccatctaattaaatagccaaaaacaacttgaaaggccccaaaagggcttggacctcatcttaacattaaactttaaaaaaatttttcacatttattggcaaattacaatgggattttgggcttcaaccaaaaaaggtgccccaaacttttggcatggaccaatgagggatttaacttaactggatcaactgaattggaaagggccccgcattaacttaaggacaaatttagtttttaaaagggcccccaagccaagtttgtaaaaaaaacttgtcttcgggtgacaaggatcatttttgaacttgatctggaaaagggccaactgaaacagctgccacattggttggtgacccattctcaatggggggaggcacaccccacttgcctttaaattcaagggggtcaaaaacatgaaccccaccattaaacagtcccacagcaaactgatttggttcttgagggggggcaacgaatacaagggggtgggggttggaactgacccttgcaggaaaatatgaaaaagggttgatcccacaacctaatttgggggttg

SEQ ID NO: 14559 - DNA, 1433 bp, Glycine max
  Clone ID: PAT_MRT3847_113153C.1
acggctgcgagaagacgacagaaggggaattattattattgctttgcaaaacactaaccaaccaaaacaaagggaaaaaaaaagtatccactttcccttcttcttcttcctcttcaatttgggttttctcaaaagtgaaaagcaaattccgtgacttccacaatcaccactcggatcagtgatatgcacaccaatctcagaaaacccacaagaacaaaaacccaaaactcttgagtgatagacttcgaatgaaatcttgtttttcattaacgagattcaattgaagtgaagtgattattcactggaaaacttatttttcatacaactgaagctgttagatttgttttaactacacgagttcgttggatatttgagcatggctgggaatcaagatcagttcgagatcaagtttcggttgactgatggttctgatattggccccaaaaagttttcctgcagctactagtattgcaaacattaaaagagagtgttcttgctcagtggccaaaagacaaggagaatggcccaaagaccataaaagatgtgaagataattgaggacaggaaaaattttggagaacaacagaacagttggggaatgccagagcccgttatgtgatacccctgatactgttacaacgatgcatgtggttgtgcaacatcctgctacggagaaagataagaaagctgcaaacaaagcaacacagaacaaatgcatgtgcgttattttatagcatccagattgaatagcagatgccatctgtcttagttgattagggacacttcctttttacgtaacctgcagcgtcaaatatttcaacacacacaaattatttggttgcatgcctgattcgtactacagaaagagtactggactatttactttataaaaatggagtacttgacttggtgaagattgtgaagctagtagttccctgattcctctgcggcgccatatttcttgcgcaatttcataggagatgttcttctgccggtttcaacatgtattaggtgttgcctcatcaggcacttggtataattgttgattgaaatgaactctactagtttgccatcttaccccctcatatattttacaattcttctctttcgtgtatctgattcaacatacttaatccagacatgtatgcgttgagtatttgaatgtgtttcaattttctggttgtttatatggtacggttgctactctcactcttgtataacagttgtggcaatagtggtttaacaacatctctcacaaaatggagatttgatgcttgaattgaattcccttagattttgcgttgtagataaaaaaaaacctacagtgtctaacaactcaagtttcttgccagatgtcacgtacattttcatgggaaaaccttttagtttacagcaaataaaaatatctaatttttcatttcttgagtcacatta

SEQ ID NO: 14560 - DNA, 913 bp, Glycine max
  Clone ID: PAT_MRT3847_113154C.1
ccggcactcaagccacgtcggaccgggctgggagatcgatttcacttctgagtgtggtgcttcactcttcacttcgcagcttcagatcttctccatcctctgaatcaagttttgactttattaagtttcgactttatttgagtagttttgctctttccttccaaaatgagccggccaatggaggaagatactgcaggtaagaatgaggaagaggagttcaacaccggaccactatctgtactcatgatgagtgttaaaataatactcaggtactgataaattgtcggaacaacaaaaagcttctgggtcgtgtaagggcttttgccaaagctggtaaaggaaagaaaaagtcccagccatcaacaaggatagattcatcagcagaatgtttctccgggagaatctgtcatcattgttctttggaatcccataaaaataatactcaggtactgataaattgtcggaacaacaaaaagcttctgggtcgtgtaagggcttttgacaggcactgcaacatggttcttgaaaatgtcagggagatgtggactgaggtgccaaagactggtaaaggaaagaaaaaggcccagccagtcaacaaggatagattcatcagcaaaatgtttctacgtggagattctgtcatcattgttcttaggaatcccaaatgagattctgtcatcaacttgtatgagtaaatggctctgtagtatttgccttttcgttatatcttgaattcttgataaacgaatatgtagacattctgtccttcaaaatatattatgtaacggtaggcttatagtatttgcacattggattatttctcgtacgatacccttgtagtcattggagttgaatttttctttatttgccttttttgccctttgttatataatcccattgaaaagatgttaat

SEQ ID NO: 14561 - DNA, 746 bp, Glycine max
  Clone ID: PAT_MRT3847_113155C.1
caccgttccggaattgccgcacgcgtcccacgtctgcaagaagacaacagaagggggtggttcttcatttcggacattcatatcttcttcgtcctctgaatcaagtttcgactttatttgagtagttttgctctttccttccaaaatgagccggccaatggaggaagatactgcaggtaagaatgaggaagaggagttcaacaccggaccactatctgtactcatgatgagtgttaaaaataatactcaggtactgataaattgtcggaacaacaaaaagcttctgggtcgtgtaagggcttttgacaggcactgcaacatggttcttgaaaatgtcagggagatgtggactgaggtgccaaagactggtaaaggaaagaaaaagtcccagccagtcaacaaggatagattcatcagcaaaatgtttctccgtggagattctgtcatcattgttcttaggaatcccaaatgagattctgtcatcaacttgtataagtaaatggctctgtagtatttgccttttcgttatatcttgaattcttgacaaacgaatatgtagacattctggccttcaaaaattatgtaacggtaggcttatagtatttgcacattggattatttctcgtacgatacccttgtagtcattggagttgaatttttctttatttgccttgagactagggaattattttatgtttctttattttgccttttgttattgaaatgatgttaatactttttttagt

SEQ ID NO: 14562 - DNA, 282 bp, Glycine max
  Clone ID: PAT_MRT3847_113156C.1
attttgactcaaccttgattttggaggtataatcagtagattacccggttgaatacttcaatctatttacgatgttatcatgttattacgtgggcatcatatcacatttttctttctttttttttcacaattttgctgccctacaagttatagggcaccctgttactgatccttcttccattccaacctggaagctttagaaattcatggaagttggttaagtttgccaacatttctgcccagcattaagctaaaacagacgattttattcattattatagg

SEQ ID NO: 14563 - DNA, 277 bp, Glycine max
  Clone ID: PAT_MRT3847_113157C.1
attattatggatcgcaatacggggtctctcgctgggtactatcttcaattcttcatcacagaactcttggttccaagttccagcaacatcatcactattgtgtttatgaaacgttatttgcttatttatttaagtttgaatgctgatgggagcgtttttggttttggaattgatgtttcgcctaactctgattgtctactgagtcatgacagtgaccttccctgccatagacacagatgaagtgatatgctatatcattttgtaattctctctctct

SEQ ID NO: 14564 - DNA, 999 bp, Glycine max
  Clone ID: PAT_MRT3847_113158C.1
tcccggctcgacccacgcgtccggcttcactcttcacttcgcagcttcagatcttctccatcctctgaatcaagttttgactttatttgaagagtttctcaactgcactttccttccaaaatgagccggccaatggaggaagatgctgcgggtaaaaatgaggaagaggagttcaacaccggaccactatctgtactcatgatgagtgttaaaaataatactcaggtactgataaattgtcggaacaacaaaaagcttctgggtcgtgtaagggcttttgacaggcactgcaacatggttcttgaaaatgtcagggagatgtggatacttaggccttcttccttcactcaatcaagttttgactttatttggagtttctccaaaatgagccggccaatggaggaagatactgtgggtaagaatgaggaagaggagttcaacactggaccgctgtccgtactcatgatgagtgttaaaaataatactcaggtactgataaattgtcggaacaacaaaaagcttctgggtcgtgtaagggcttttgataggcactgcaacatggttcttgaaaatgtgagggagatgtggactgaggtgccaaaaactggtaaaggaaagaaaaaggcccagccagtcaacaaggatagattcatcagcaagatgttcctccgtggagattctgtcatcattgttcttaggaatcccaaatgagattctatcatcaattattcgcgtagacattagcggaggatgtagttggtcatttgatgaggacgccctggatcttttatgtacccattaacgtgtacatctaatgttttgtatggattaaaatgtaaagttttatttgttttttttttttgttcttgcgtaattatgctggattattgaatattgaaggagactatcagtttgatccttcgatatcaccctctttcttgttttatttttttaagtaataagattatatatatagtttttaagtattgaatacttatt

SEQ ID NO: 14565 - DNA, 187 bp, Glycine max
  Clone ID: PAT_MRT3847_113159C.1
cggaatggttgggttgacccacgtttcttgacggccgcgagaagacgacagacgggaccctttatttatccatgaatctggcttttaacaacaataaactaaactaagtgatttgcataacaacggcattggtcataacacgatatgttatttcaacttaccaagcttgtgatatacccatccaatc

SEQ ID NO: 14566 - DNA, 186 bp, Glycine max
  unsure (1)..(186): unsure at all n locations
  Clone ID: PAT_MRT3847_11315C.1
gtctggtgccagtttctagtacatttccagtgactcacgaacccacagttgagtattggacaccaacatttggaggaacttacagatagctagcttcattaattaattataatgggtggcaaaaagtggcacggaaggagtactctcagcgaacancacacaagnncaacaacgaacatttgcatg

SEQ ID NO: 14567 - DNA, 594 bp, Glycine max
  Clone ID: PAT_MRT3847_113160C.1
ggctcgagatcatctgaatcgtcacaactcacaaccctcactctttccctcctcctttgcaactcgcactcccactgttgcctcagctaataactaagtgcttgtgctcgtgcttatctttggattactgaagatgtcaacttgtatgagcaagaaaatacaaggccaaagcctttctatagaagaagagaacatgctggtggtgcagaagcagggaatcgtgaccattttgggctctaaccacgatgctccgacaacttctcttcgacgcactttatccgcagacatgtcttccaagacatggctttctcaaaacggcttctctctcatgaaaaaaacctcttcctctgaagaactctcttactcatcactcacaaaatccactatttctgactcatcctcgtctgatgaagataactgcgaagaagcgaaacaagaccagttccaaatttggaacacaattcaaaaggagcagcagcatgaggacaacaaaccaagacaggttgatgtgtggagttcaattttggtccaaaaagccaacgaggaaaccttaaaactaagcacaactcctttatgtcacccacttgtgagaag

SEQ ID NO: 14568 - DNA, 400 bp, Glycine max
  Clone ID: PAT_MRT3847_113161C.1
ggggcgcgtggtttttcctgggatttttttattgtttcttttttttcccccacccgggggtaaccccggaaaattcgggccgggcccagggggggacccaattttcccttggggggggggtataaagggggggggaacccacggcaaaagggccgtccgggaaaaaaataaaacccgggggaacttaggagagacaaaacccccgaaaatttcggggggcccccggggggggccccaggggggaaaccccccccccaaatggggttgggcaaccggccccctccccgggagagaaaactggggaaccgggggccaaaaaagaattccccccccccggggaaagggggaataattaatggcccccaagggggttttctttttaaccatggagggggggaac

SEQ ID NO: 14569 - DNA, 328 bp, Glycine max
  Clone ID: PAT_MRT3847_113162C.1
aaaaaagaaaaacaagaggaacaagcttaaagatgtgactgtgagcgatggggaccaggaaagcacggaggacaaagttgataccactgatggcgagcagaagacacatgaggactctgaccaggaactgcctaaagacgagtctaatgagcaagaagtaaagaagaaaaggaggaagaagaaaaagaacaagaatgttgttgaggaatccaatgaccagttggttgaagtgaaagtggctgacgggatggatgatccaaaaccatccaaagctcgggagttccccaatgggttgatcatagaggatgtatcaatgggaaaacctgat

SEQ ID NO: 14570 - DNA, 593 bp, Glycine max
  Clone ID: PAT_MRT3847_113163C.1
ccacgcgtccgtgcaatatcccatgaaggtgatgtaacagaatctcttgctcgagctttagctgatgaatatttgcacaaggattctcctgtaactggtactgagactgtaagtaaacaaccttcacgagctcttatgcttgtgttgcaccatttggaaaaggctagccttcctcggttggttgatggaaaaacatatgggtcatggctattaagtggaaatggtgatgaaaatgagttaagatctcaacgaaaggctgctagtcagaactggactttggtaacaaatttttgtagattgcaccagcttccattaagtactaagtaccttgctgtattagctagagacaatgactggattgaatttttgtctgaagctcagattggaggatattcatttgatacagtagtccaagtggcatcaaaggagtttagtgatctgcgtctccgacttcatatgttaacagttttgagagcaatgcagtcaaagaaaaaggcaagcactgtattgttcttggattcactggagaaaggcagtgaaacaacctttcctgatgaaaacatgggtgttccagttgaactcttccaaatatt

SEQ ID NO: 14571 - DNA, 216 bp, Glycine max
  unsure (1)..(216): unsure at all n locations
  Clone ID: PAT_MRT3847_113164C.1
aattcggctcgagcagntatgttttatttttaattttatcttctaaactctagtcttcaataaaagctgaaattgggtttattttgatggctattttacattatttgctacaccttaaacttttggtcgccgtgttaaaatttcaaaatcaacaacagtttccccacaaggaagcaactcttgttcacttggcaccattttggcctgcttattggg

SEQ ID NO: 14572 - DNA, 212 bp, Glycine max
  unsure (1)..(212): unsure at all n locations
  Clone ID: PAT_MRT3847_113165C.1
cntaattgagcgatcnatgncggcgttgataatgtcaccggcggtgatactggcgatcctgacnatctcggcctgcatcgcgtatacggcgtcntacggnggattggtccngaggaangtcgaanatcccngacgtnnangnnancanagaggtgcnggntctagnagcggttctcantggaggatcataaacggatgctnnggcagggcgc

SEQ ID NO: 14573 - DNA, 2028 bp, Glycine max
  Clone ID: PAT_MRT3847_113166C.1
tgtgtccttctggctcgaggacaataactatcttcttccaaataaaaaaaaaaaaaagaaaaaggaaggagataggaaagggttaattgaatccaaaaaaaaagaagagaaaaacaaaatgggcagggtttggacttcgatgatagcattgttgctttgcctgatgacatcatcggttcggggcgaggacccttacatttactacacatggaacgtgacctacggcaccattgccccattgggtgtcccccaacagggtatcctcatcaatggtcagtttcccggccccgaaatcaactccaccagcaacaacaacgtggtcatcaatgtcttcaacaacctcgatgagcctctcttgttcacatggcatggtgtccaacagaggaagaactcttggcaagatggcacattgggtgcccagtgccctatcgccccaggcaccaactacacctaccgctttcaggttaaggatcaaattggaacttacttctactacccgaccaccggcttgcaacgcgcagtgggtggcttcgggggtttaaggatcttcagccgtctgttgatcccagtgccctatgctgatcccgccgatgagtactgggtgctcatcggtgactggttcggcaagagccacactgccttgaaacaaacattggacagcggacgcagcattggcaggcccagtggggtccacatcaacggcaagaacggcgggctcgaggccctctacaccatggagcccggaaagacctataagtacagaatctgcaacgttgggctcaaggaagccctcaacttcaggatccagggccaccccatgaagctcgttgagaccgaaggctcccacgttgttcaaaacacctatgactccctcgacgtccacgtcggacagtgcttcaccgtcctcgttaccgccgaccaggagcccagggactacttcatggtcgcctccacgcgcttcacgaagaaggttataactgccacgcgcgtgattcgttactcgaatggcgtcgggcccgcatcccctcttcttccccctgcaccccaccaaggctgggcctggtctcttaaccagttccgctccttccgttggaaccttaccgccagcgctgcaaggcccaaccctcagggctcataccactacggtcagattaacatcacccgcaccatcaagttggtcggcacccgaagcaagatcggcggcaagctccgttacgcactcaacggtgtctcccacgtcgaccccgaaacccctctcaagctcgccgagtactacggtgtcgccgacaaggtcttcaagtacaacctcatctctgacgccccagacgccgccatcgcctcccgcgaccccatcatcgcccccaacgtcatcaacgccaccttccgcaacttcatcgaagtcatcctcgagaaccccaccaaggtcacccagtcctacaaccttgacggctattctttcttcgctctcgcggttgagccagggaagtggaccccagagaagaggaagaactacaaccttcttgatgctataagcaggcacaccattcaagtgttccctaactcttgggcagcaatcatgttaacctttgacaacgctggaatgtggaacttgaggtcggagatggcagagaatcgttacctgggacaacagttgtacgtgagtgtcttgtctccaaacaggtctctaagggatgagtacaacctcccagagacccagcttctatgcggaattgtcaaggatatgcctaagccaccaccttactccagttaagaaagtttttctcttctgagatgtatatatatacaccaccagtaagggcggagctagaatttctatgtaagggggctaatataaaaaaaattaattaatacttgtataaatgtatcatgaattttaacttttagataaaatgttttaataaaaaaaatttaattactcaaaaaaaaaaaaaaaaggacggccgccgaaaaataagcagctcgaccccccaattaattccggcccggtcgctcaggcggcgcaccttc

SEQ ID NO: 14574 - DNA, 271 bp, Glycine max
  Clone ID: PAT_MRT3847_113167C.1
acggttttcttcagaaaatttgccatcgttgagggaagcgcgagaaccttccttggtcaagatgagaacttaatggaagaagaagccccttaagaaggttaagaagaaacccccaaagattagaccaagatctaagtaagtgcttgaacaaagaattgaaatgatgtgcttttccatctgctaccagctctacataacattatacgctgacaggtcttatatgatgatcttgaggtctagtgccaaggggagcttccatcttgactttagt

SEQ ID NO: 14575 - DNA, 305 bp, Glycine max
  Clone ID: PAT_MRT3847_113168C.1
ccggccggggggtagtaggttttcccctactgctatttctcttatttctctatttattcctatttttgttcatctataaatctggtctgcatcaggtgtagttatatttctcaacttttaacccgactactatgtcgaactactgggtcgtcgataatgtcttgagattgtacatgactgcttatacacgtaccattgtcataggatgtgctacgttgtttgccttcagacgagtctaatggtaatttttaaattagtcagtagaagacctctataattccatggtttacaagctatttaatgtg

SEQ ID NO: 14576 - DNA, 480 bp, Glycine max
  Clone ID: PAT_MRT3847_113169C.1
gcacgaggagaactagtcagttttttttttttttttttatgttcaatccataattcagaccttgaaaagtctccttattccttccctgtgtttggcccctaattagacctccatttccatgaaaagatcctttgattggttagtttggcctgcttattactttatgattgttttgaattcttcttggtttgtggcatggaagagccccttaaaatacccataataataaatgatctcactatgattttaagctctaaatctcaagtaatagcaaacttggtatgttttcctttgatatgttgttcttgaatgaagattttcctttgtacatgacaatgtaaaataggcttgatttttctatacaacaaaagaaaagtttatgttatcaagttgtgtatcttttgtcaattaaattagtaatagattattaattttaaagtgatatgtttcgcaacaaaataaaacaacttgtatggctag

SEQ ID NO: 14577 - DNA, 258 bp, Glycine max
  Clone ID: PAT_MRT3847_11316C.1
ggctcgagcctgaagcatatgttttattaccacctaccgatagtatgtgcctacaatggtcctcttctatacgccaacatcaccgagaacctaatagggtatgcctactttacacctgtccaagaggacatgattcacggctactctgccttgctgccatcccaataggttacgagcttacgtgcacatggtgacactggccgtaataccacacctatctcctgccatgcgtctgccgacaacaatatgggagattcc

SEQ ID NO: 14578 - DNA, 325 bp, Glycine max
  Clone ID: PAT_MRT3847_113170C.1
atcccaaagcgctcttaaagcccccgtatttacaatttggccgaaatacaccatttgatcatgacagaaagtacctctaaaagttgggtatttcgggaggggagggggaccagggcccttcgttcaaacacaaattaaaacaatcccccataggccattcaaattaaggggggagggggaaccttacgacccctttgcaccctaggggggttagctagagggaaaaacctttttttgttttaccagagagaacccggatctcttattacacacaaagctgggaggattggggtggggacctttgaaacccccctctacaaagcta

SEQ ID NO: 14579 - DNA, 449 bp, Glycine max
  unsure (1)..(449): unsure at all n locations
  Clone ID: PAT_MRT3847_113171C.1
cctcagtgcccctcgttttatgtttaacgtattcctaacnttcnaactggttgtagggttttagggtgtcgtgggaaatttgacgcaactactgcgtttttgcgcccttgatttcactgttaatgctttgcttgtcctcttcttgaactcgttgtggtttctagacgtgttttgcatgaaccggttcttgttttggtgctaagaagtggaaattatttgctaaaagtcttgtgtgatcgatgtgctgaaacattctctcttttaattttagattaaggttgaattgaactatgtaagtgttctaaaatgttttaaataatggttcacgaccgtcattttgatcctcatatgttgtgatgaaacctgtaacactacagttatttaaaacctactgagaatggatgtatagtaggatattgattttttaaccatacaattaacactaaatt

SEQ ID NO: 14580 - DNA, 349 bp, Glycine max
  Clone ID: PAT_MRT3847_113172C.1
ggaaacagaaaatatattaggagagatatactaatatttatatcatgaacatccttccgacgaaatgagtgatttccatcaatgaacagtatactcggtaaaagaaaaagaaaaaaacatgtgaaagtgacagtaagctttgatgttaacaggttaaagatataagcctaagctaagtggagacgctgttgccatttctgctcattgagtgaaagttccattgggcgtggtttaatggaagggatgaagcagcttgcgtacaacactgcggtgaagctcattctggctgcactcgaacacaacttgctccctgactttgtcaccaggagatatggtcgcttcatggcgg

SEQ ID NO: 14581 - DNA, 582 bp, Glycine max
  Clone ID: PAT_MRT3847_113173C.1
gtacatcgtatcagcaagagctatgacttggattgctacacatacgtacagcccttattttttatatcttttgtttttttttttttttttttttttttttttttttttttttttttttttttttttttttttttttttttttttttttttttttttttttttttgggggagaaaaaaaaaataaatccttaaaacatttttatgtaaatagaaaaaaccccggacccaaagaatatggctctttttttaaaaagggggtttttgggaaaaattttttaggaaggaactttcccctttttttttaaacctgctattgaagggggcgacattaaaaaaaagaaaattttcccttttttggacaagataaatttagtgctggtcctttttttttttggagctccgattgaaaaagggccaactgtgtcttgacagtttaaccctaccccttaaccttttggattttggaaaaaccaagggccccaggggcattactagggcccttaaaccaaaaaggaaaccgggggtgaagggcctttttttttgtggataccggaaaaaaccctggggggggtttctcccccc

SEQ ID NO: 14582 - DNA, 270 bp, Glycine max
  unsure (1)..(270): unsure at all n locations
  Clone ID: PAT_MRT3847_113174C.1
gttcacacagtctgagaagcngcggaaaggcatccatgtcttgcgtctccctcgcatcgcctggctcgccgtatggaaactcgttcggcagttcctattcgtcagaactgtcgaatggttactctacggcaccaacatcagtagccaacagcccgcccggcactcctttctgggatgagaggacccgcctacgcatgaagacaccagacgttccatcctcagtacctctcccttcggcacgacgacccttcncccgggatggcaccgagg

SEQ ID NO: 14583 - DNA, 396 bp, Glycine max
  Clone ID: PAT_MRT3847_113175C.1
tagagataccttcctagctagagtttacatcagagaagatagtcaacaacctttctggaaagaaaaatttctagccggtctcccaagatcattaggagataaggttagagacaaaatccgtagtcagtctgctaatggagatattccatatgagagtctaagttacggtcagttaattttttatgtccagaaagtagccttaaagatgtcaagatgacaaaattcataagcaattagtcaaagaaaaagcccaaacaaagagagatctaggatctttctgccaacaatttggactaccagcatgtccaaaacaaaagaaaaaaaaatcttagaatagaatcccatgaaaataaaattgtccacaaaaagagattttcaagaaagagatactcacac

SEQ ID NO: 14584 - DNA, 536 bp, Glycine max
  Clone ID: PAT_MRT3847_113176C.1
gcctgccccccttccttagcctggaattccggttgagggcaaaagacacaccgaaggggtccctggggaattggctacctttattaacctatggatggggaaccggtggttccaaattctaatcacctggccggtgaattaacctaagacaccctttaattttaaaatttggaattttaatcatcggcattaatttttcttaaataatggccgttggaggttccaggggtggactggggccattggttcggcaccaccttttcctcaaccttgggatgggctggttggttaccttcttaaggtaaaattttaattaaatgtatcatttgggatttgggtccttaaagtttattaatcttctattcagaactcattatggctttatgatggatgaaagaagttggttagaaaagagaaaggagtgcagattaccatgatgataagatatcctcctgaaccttaatggtaaagaaatagcctaatgacaccatggagattggaaaccatcaaatttatggcctaccttcctttatatc

SEQ ID NO: 14585 - DNA, 438 bp, Glycine max
  unsure (1)..(438): unsure at all n locations
  Clone ID: PAT_MRT3847_113177C.1
tttggtgaagtttttaactaagttcttagttaaactaaaataccataaatatatatatatagtcattaatgtgcgggaaaaaaaatcaagctagtaatttggtgtgaattagaaggaataccaggattccgtttcagtatagctgcatggagtggagagtttccaaagcacagtggaagcttctgatctgcagagaatggaatatccaatagaagattcacgattgccacattgccactcgcagctgccaaaaacagtggtgaacacctagacttgttcaattcatggaccatatccttatctctatgtaaaatgacttgaagcacacttagatctccattattgacagcctcatgcaaaggagtatccccaagatcatctttctctcttgttatctctttgnctttcatcacatcatgggttgacttcattgatgca

SEQ ID NO: 14586 - DNA, 416 bp, Glycine max
  Clone ID: PAT_MRT3847_113178C.1
ggcacaagtgcgaatgatgatcgagatagctcggagcagtatgatgaaaatgaaggtgcttgttttcattagttactacgatgttgggtgcatggaaatgccatgtgttcgatatggtgattatgcgtatgaacattggctatggtgacagcactacggaggtggaatgcgctcattggacgatcgctgtaggagatcactacatgtttggatttgtaaccattcctgaagagtgattctgagcatcataggaatacatacattgactgcagtattgatgagactccaagacggataaccgagatgcttgctattgtgcaatagacttcgctatacatccgtgggacacataagtatccagcatagatagcaccgtgctctataatagatcatactgcaactgacatggttttggg

SEQ ID NO: 14587 - DNA, 578 bp, Glycine max
  Clone ID: PAT_MRT3847_113179C.1
tttttcttttttttttttttttttttttttttttttttttttttttttttttttttttttttggaaaaatggaattaaaaagatagattcaatagggaaaacccgggcgggcaaaggaacaacaaatgggggggacaaccgattcaacgccacacaacaggcaggggaggaaaaaaaaacccacctccccatttgggtttggggtggccaaaacaaaacccccccgcccctaaaaaaaacaaaacaaaactcccgggaaacttaaaaactttctccaacaacgggttggaaaaacaaaggggtttaatcaaaacccccctttaccccgggataaaaaccttttttactaccaccccatacaaaggggttaaaaagaactaaaaaaccccagggcaacctgggccaaaaaaccaacctttattttccaaaccaccaacaacaactacttgttttggaccggaaacccgagctcccctgaaaaaaaacagggggagccaaataaaaaaacaggccatgctccacaaccccaggagggtggaaaaaagcatcactggcggccttaaaatccccaaaactcc

SEQ ID NO: 14588 - DNA, 454 bp, Glycine max
  unsure (1)..(454): unsure at all n locations
  Clone ID: PAT_MRT3847_11317C.1
ataggctgaggttggaaagtaaaagctacaaaagcttcctcaactagaaccttacaaaccacccatccttcccagactaggaaaaggcgaaggacatagatgatgaccattgttgaaacggaatggcaaagtccttttcccaccccctcaaccaagaccaggtgagaaaaattgcatcatccaccaacttagaaataacgaactgttgatttttaaaaatcatggcattcctatagttccaaatagaaactgtagctgctacccaccaaaccttccactntctattaatagcttgcgaagcagccaaagagaggtgctgagtgaagtggtccaccggcctgcaatgcatgactctagcttccttgacccaagaggtaaattcccaccacagtggcataatctttttgcaagaaaagaaaagatgagaggcagattccacttggctttggcaaaa

SEQ ID NO: 14589 - DNA, 824 bp, Glycine max
  unsure (1)..(824): unsure at all n locations
  Clone ID: PAT_MRT3847_113180C.1
aggatggcatgcattcaccacagtgaaaaggacaaaagggttaaacatacatatatatatatatatatatgtatgtatatatatacatttaaaaattcattaaaaaaaaaggcattaaagtgcatgtttggaaattacagatgtgatttttcacattaaagtgaacgctattagttttagcttttacatttttcaagtcatgaacctgattttttcgggagtaaaaagtgtttccaaacacgctttaagaaggttccaggtaaataatttcagcttgtcctgaggctctcctaaaccgcaacagttctttcatcagttctaatccaacgtttgcaacaggcttcacagtcatcctttctagcacaggagagtgtagaagtagaaagttgataaaatctaactcgggtttgataccagatatgccatctatcttcacatatcgcagttgcatgaccggacaagaaaagtagacatcttcccaacaataggtgtgtgttaacagaaccgtctgctcctcgggtcgagccaatatttctagttcttgtagattaggtgagcttcttaagaggcaaagagaagctgaaatttccttcaaatcattgaagttaattcgtcttttcccccccgtttttccccaaaaaanaaattnccaattgaagnttaattcgtatggaaagataacttagatcaatgcatggtcttggaagctttattggcacaacccccactgccaaatactttaaaaaatagctttgaacctctagcctttgcacgtgtggcagatgaacaaaaaatttgagcaaattgctagagcctccatgcaa

SEQ ID NO: 14590 - DNA, 418 bp, Glycine max
  Clone ID: PAT_MRT3847_113181C.1
ttatctttaaaacttactcgaggccctacaaatttaaacatgtttatgggtatacacactgaatctagtttagacatatcagattgatattaaatatgtcatatacaataatcgtaatgaattggaagacaatgataatacatttattctaagttgagactggaagctaggaaactacatttccaacatgtacacattgaatggaatacatacctttcaatgcctacactgcaaccaacaggaatatcataaaatacagtactttgagagagctattccatttcacaatccagatatatacatcattattgacaaattaggtgcccttacttactgaaactgagggctaatcaatatctatgatagtttaagctcttaaatgtcgagtatccttcacaacgaatcctgcctgaataca

SEQ ID NO: 14591 - DNA, 595 bp, Glycine max
  Clone ID: PAT_MRT3847_113182C.1
aagacgacagaagggggaacttcttcgcattttccaccgaaaatggcttcgcaaaacccagcagaggaagaaaattcaaatcgacattggtcccttgaagacttcgaggtcggtaaacctctcggtaggggcaaattcggtagagttttcgtcgccagagaagtcaagagcaaatttgttgtggcgttgaaggttatattcaaggaacaatttgataagtacagaattcatcaccaactgaggagatagatggagatactgaccagtctccggcacacgaacattctgcgtctttatggttggtttcatgatgctgatcgtgttttcttgattcttgagtatgctcataaggcagagctttacaaggagctgagaaagaaggattgtctcactgagaagcaagctgccacgggtcgtcttaaaattgcagactttggttggtctgttcagtctagaagcaaaagacataccatgtgtggaacattggattatttagcaccagaaatggttgaaaataaagctcatgactatgcagttgataactggaatctgggtatcctttgttatgagttcctctacggtgctccttcatttg

SEQ ID NO: 14592 - DNA, 1243 bp, Glycine max
  Clone ID: PAT_MRT3847_113183C.1
aagacgacagaagggggaacttcttcgcatttccacgaaaatggcttcccaaaacccagcggaggaagaaaattcaaagcgacattggtcccttgaagacttcgagatcggaaaacctctcggtaggggcaaattcggtagagtttacgtcgccagagaagttaagagcaaatttgttgtggcgttgaaggttatatttaaggaacaaattgataagtacagagttcatcaccaactgaggagagagatggagatacagaccagtctccggcacgcaaacatcctgcgtctttacggttggtttcatgatgctgaccgtgttttcttgattcttgagtatgctcataagggagagctttacaaggagctgagaaaaaagggtcatctcactgagaagcaagctgccacgtatattttgagcctcacaaaggcgttggcatattgtcatgagaaacatgttattcatagggatatcaagccagaaaatttgttgcttgaccatgaggggcgtcttaaaattgcagactttggttggtctgttcagtctagaagcaaaagacataccatgtgtggaacattggattatttagcaccagaaatggttgaaaaccaagctcatgactatgcagttgacaactggactatgggtgtcctttgttatgagcccctccccccccttccgcttctttagatgccaaaaatctgatcagtcgggtatgttcatatcttggccaaagctgattctttcattgaattattgttctttctgacatcaatctgtaaattggtgccgctcctggtgaaagactcctcacaaaggatctctcttgataagataatggagtatccttggataatcaagaatgcagattctttcaactcactaatttaacttcggccacaagggattaagactgaattctgtatttggtgttgtaaaatgcaagctaatgtaagtgttttgcagtgttcaagtgtataatcaacttgaatgacacattaccttccccgtgaggttaggagtattaggattgcatatctgcctatttgtaatagttgtattgtaggtgtaatttcttccagttctttgtgcatcgaaaccaggcatgactaatgacttgcacagatttattttgacatgcatctgactagcagggaatctgacagctctgattttaggattccttttgacaagtgagtcccatatgattcaaatatgaataataaatataaataatgtccc

SEQ ID NO: 14593 - DNA, 707 bp, Glycine max
  Clone ID: PAT_MRT3847_113184C.1
aactcattaacttcttttcttataagtaaaacataatatgaaatgttcttacatcacaatctcaaaattgtgattcttgacatcaccaattacattattaaattgtccataaatatcacttcacgtcatatgatcaatcttagagaaaatcataaactccatattgattggattttgacttttttttttttagaaaatgcaaattaatcaaattatgcccagccatgggctccgagtggaagggtccaatcttcagtgtaatctggactgctacccacaatccttttagactgtgaccgaatgccattaatttttgggcctgggctccttggaaattggtaagcgacaattcgtcctcccgagctagatgagtcaccagtcgaacctccctttgttgagaagttccactgcccaactgaaactcgaggcttggatgggccttgggctcgaaccttggcctttgcagactgagttggggtcatatagctaggtctatttgggctgggaggtatgtgacggtgcctattagaaactgggcttaaatcaacaaagtcttggttcatgggactgacatttctagtgttggttgggccctgagttgcaaccatgtccatttctacggtcttttagacatgttatcagtggtagatgatgttgtagaagcaagagtcatgtaagaggtctcatgtggccccatgttcctgaca

SEQ ID NO: 14594 - DNA, 759 bp, Glycine max
  Clone ID: PAT_MRT3847_113185C.1
cggctgcgagaagacgacagaaggggatagttgacaaatgaagattataagccagcaatagcatcaactgtgatctgctgtccaaaatcctgcgttatatatgcagcaaacggcaaagtttctttaattcttcatatatatttattttcacaatccgatcaaagcaagaccaacatatatattcattcatcttcacgtacatatccctcgttagttttcagataatatggagcaggagagtgagacaaacattgtgctgacgaagccattctctttaggaaatgggaatgaatcagattctgaggtttatagtgcgccaaatattttgcagcgcatattaagtctgcttacgaatgtgcggccaggatctgatctcactcgctttcagctgcctcctcaattcaacttccctaagtcacaacttcagtgctatggagaatctatatattcctcaacttcagatttgctaagcaggtgtaacactgggcagagtccacttgaaaggctcatatttgttgtagcatggagcatatccaccacacgaccagcaatttttggagttgctccctacaaccccactcttggagagacccatcatgtttccaaaggaaaccttaatgtcttattagagcaggcacatgcttttacattctgttacatgctcaatgtggtcacaaaatgattacatttgattatttcattatgttgttataatctttgagcctctcatgtgtcatcatgacatatcatggatagcta

SEQ ID NO: 14595 - DNA, 251 bp, Glycine max
  Clone ID: PAT_MRT3847_113186C.1
tttatttttctggattatttgacaagcagtagggcttacaggtagatgaacgcttgtgtaatctgctacagcgacaacaggttaactgagaacacatttgttacttgcggagattgggacatcagggttgacaataccacatgattatctcattggagataagttgtaccgtattacctaaattggcgtatgtggtcttagttgatgtactttaggctatatgtttttattgctcaattttaatttcattt

SEQ ID NO: 14596 - DNA, 274 bp, Glycine max
  unsure (1)..(274): unsure at all n locations
  Clone ID: PAT_MRT3847_113187C.1
ctttgctgttcaagctttgcttgccactaacataattgaagananctngncctacgtttncaaaaggacatgatntcatgcaagaagtctcaggnttgcttnatatgtntntgagnatannaaagaatcccagntcttcttccttctagttatggagcngaaattncctaataaacctaggtttatccagattgtacagttagctggtngagancnttaanatnccgaaatcttanttgncagggtgntncgatgaacnacggagngancnggt

SEQ ID NO: 14597 - DNA, 685 bp, Glycine max
  Clone ID: PAT_MRT3847_113188C.1
accagatcgatcgttcgctcccagccttccccccagttgcttctgcatactaccgccgccttcagatcctgacgctaaggtatatatgcacactccaccctcacccatactggtctttccgcatgcttcaacaccctcacattctctcttccaccccatttctgcatatatacacccaccaaattccttccataaaagcttccaaaaaaaataatgggtcacccatcactttttctcgtgcagcttcttgttacctctctcctctttctctcttttgattatggattcggtagggtggaactgacggagactcatcaggattttcccattcgcacgattgtaaagtatgacattgcggattattctgatccacagccaaataccaatccaaagaatgggtatgttttgagtcctccttcatctccaactccaattcatcctccaagtccttaaatggaagctcaagattggactttcaccacttgtttatgtctttctgaacggttttgtaactggggtagtgtgtgatcgcttccagtttgacacgggattcgtagaattaggatcatgatacttgtgttgctgtgaatttatatcctttagtttttcatgtgttttcagaatgcaaattgtgaattgtgctaataaataaattacgtgtttgattaaaaaaaaaaaaaaaaaa

SEQ ID NO: 14598 - DNA, 194 bp, Glycine max
  Clone ID: PAT_MRT3847_113189C.1
gaacaagtagttgagaactaagaaggagaagcaaatggctgcgtcaatgatctcttgcccagctgataccactgacaaccgtgccggttccggcatggttgctccattcactggccttaagttcatggctggcttgcgcatcagtatgactaacaatgacatgacctatattgctagcaacgggggacgagtgc

SEQ ID NO: 14599 - DNA, 255 bp, Glycine max
  Clone ID: PAT_MRT3847_11318C.1
gggaaggggagaacccccttttttttttgaaaaccgagagcctccaaatccaataggggagaagttcaggcaatatttacccatagacatgcataaaggctatgtttctcagaagtcccccatttataaggaaaccccccaccctttttaataaaaaaaagaaacgggtgggaatcccttggaaagacaacccttcctcacttgaacgatggaacaaagtgtttggcaccttaactggcccaacccgggttttaa

SEQ ID NO: 14600 - DNA, 518 bp, Glycine max
  Clone ID: PAT_MRT3847_113190C.1
ggctcgaggaagaattgaagaacgtaatgtcaattattttgcctacataatgtttttcttatataataaataatttaatgtcttggaacatggaagttactgctacgtgttagtatggcagtttcttatgtttgaataattctataactgctttttcttaggatgagcaatttaaagcagttatttctgtaagtattggaaaaaacgactgtaccgcaggctctataaatgtaagaactaaacacccagttcatcaaaatatcaactaaacagattcttagaaactctggttttttactttcaatttcttacattttcctttttttattagtagtataaaatattaaccgcgtctattagtccattatttcattgcagtttattaaaatttgtatttagggcttaactccaccccacaaaactggcttgaaaggcaaggattgcccaaatgttataagcattactcgagccttatttctgttgatgtgggactatatccacccctcgcctattacaat

SEQ ID NO: 14601 - DNA, 443 bp, Glycine max
  Clone ID: PAT_MRT3847_113191C.1
tacgggagaagacgacagaagggctggtccatatggattctgtggtcatgtttaaattgaatagtgcaataaaataaaataactcagagtgatctaattaatggagtcttcataagttcaaaaaaaaaaaagaatgaaaaaaattaaacttttccctcctagatatgggtttatttgggtctttggtttatcaatagaagtgtggatatagaactcaaaagctgtcatagaactcttagtgcaaagccagaatgagatggattgagtgtatgtatgcaatatattcataacatgatgcttaattaagactttgaaaattttcaacttacatgtttttgaagttgcaaactagaatattaatatattaataacctctaaaagatgggaaatctttcacatgaaaggtatctgagattcgaaaattttgtttctctgcaccatca

SEQ ID NO: 14602 - DNA, 360 bp, Glycine max
  Clone ID: PAT_MRT3847_113192C.1
tttttcaattacaaataggagacctgttgttgcactagaagttttgaaagacagagcctcagctagacactgcaaaataaaacagttacacagaacagtgtaacacttaaacgcatttggcatactttacaaatcaggaggactctaaagatctttacacatatactccaagaacccccgggcgctttatataggtagaacaccaaaactaaaaagcattgggcgggactccagctatataaatgatttggggtgaaagagaacttaatactgaaacttccgaggaaaagacaggtcttttcattgcggggatctttttttggatttgggggcctcaaggcagcctttattgatgcatta

SEQ ID NO: 14603 - DNA, 281 bp, Glycine max
  Clone ID: PAT_MRT3847_113193C.1
ctcctccttattcgggtttttggcagtatatatttctcacacacaacattttaaaaattctccttggttcataccgtgactattttttacccaaaatatcttttttgctgataatggggaaaagggaaaaaaaaaactctcttaagtttggggacgaggcccttctccccaagaaaaaaaatagtgtttctatgggctcccctaattttctgtccccccctaactagaacctcctttgggggggtgtttatcttctccccattttttcgttggggggcctt

SEQ ID NO: 14604 - DNA, 442 bp, Glycine max
  Clone ID: PAT_MRT3847_113194C.1
aaacaaaagagcaagggtttccttcatatgaggaaaaaccaatattaaggaatatccattcaaggttttacatctagtacataaaaattcaggggtggttttcaaagtaatcacgaaccctaacaccctgggggaatgtcaaatatcaattcgggggtggaaaaacctaattttttaacgggatttaaccgcccaaaattaaataaataaataaataaataaagggagaaaaaaaaacagagatgccccaccaaaaaattttaactcttataatggaaatcctgtccctatggaggggtccattttagcaaaactcaagcttaagtgacgatctctattatccccccaacctcccaaacctttaaaccctgctttataaccaggctgattcttaaaggggggaacttcccagtttaattcaaagatagaaactgggtcaggc

SEQ ID NO: 14605 - DNA, 1169 bp, Glycine max
  unsure (1)..(1169): unsure at all n locations
  Clone ID: PAT_MRT3847_113195C.1
aacaaattcaagaagttgagagtcagcttgaatggatccgctcagaacgggatgatgaaatcgcaaagctctctgcagagaagaaagctcttcatgaccgtttacatgatgcagagacacaactttctcaattgaagtctcggaaacgtgatgaattaaagaaagtagtcaaggagaaaaatgctcttgctgaaagattgaagaatgctgaagctgcacgcaagagatttgacgaagaactgaaaagatttgcaacagagaatgtgacccgggaagaaatccggcaatcactcgaagatgaagttcgtagattgactcaaacagttgggcaaactgaaggggaaaagcgggagaaggaagaacaggttgctaggtgtgaagcatatattgatggcatggaatcaaagttgcaagcttgccagcaatatattcacacacttgaggcctcactccaggaggaaatgtcaagacatgcccctctgtatggtgctggtctggaggctttatcattgaaagagtgggaaacactatcacgtattcatgaagatgggcttaggcagatccatgcccttcaacagcgtaaagggagtcctgccgggagccctcttgtgagtccccatgctctccctcacacccatggattatatccaactgcggcccccccaatggccgtgggtctgcctccctcaataatcccaaatggtgtagggatccacagcaacggccatgtgaatgggggtgcagttggaccctggtttaatcgctcttgaatttctctctcgggtcagagagtgttattcttttcgagttatttctttggcattctggctgatagaactgttggagcttaatgttgggtaaaggattaccgaatattagaagttttgggtgagaagttttgccttacaatgataatccagtggaactatcagttgcaaatgccgtactcatttgcgcctacgtctttttgagggaaaaaaaattacttacaggctttttttaagtttctatagttatagcttactgttattacatagtttggcaagtggttgaatctattttatcctgggccagaagtgaagcgctgtaagaaatcttgactgacagtttttaatacgtaatcaacaaagaaaatcccttttcctctnaaaaaaaaaaaaaaaaaaaaa

SEQ ID NO: 14606 - DNA, 213 bp, Glycine max
  Clone ID: PAT_MRT3847_113196C.1
gttgaggagtcatacctgctcgaaaatccacaagtatatgcttaatcacttgcttatatattgtgtcatgtatcatacgatataaaaacatattcagttttttaataacggtgtgcaagcaaatatagggttgtgtagaatggttgcaaagacttgcattccgtaataagtcctcattgtatgaacagccaacaatggctagtggtttgccaa

SEQ ID NO: 14607 - DNA, 377 bp, Glycine max
  Clone ID: PAT_MRT3847_113197C.1
ctcgagccgcttctggcttctgctgttaataacaaaaaaaaaaaggaagacataataacaacattatgtcttatgacgattcgattcaatggaaaccctcggtgtgaacaaggaaaactagatgccacatctttcctttgttccctgccgaccacatcgatacatgatgcccgcgccagtcaccggaacgagcgggcccccagaaccagaatgaggctggttccgtgcggagtgcgccgtgtcagaggcaaaaggaccaagatgcaatggggcccctgccagggtgctacagattccgtgatatgtgtcgcaataaatggcttaagggtgcgccaaagacacgctcacttctccgctgctgactaggcagccgagga

SEQ ID NO: 14608 - DNA, 552 bp, Glycine max
  Clone ID: PAT_MRT3847_113198C.1
gggcttaccgttcgtccggctgatgatgatgatgtaaacaggactgtgaccaagaagctgcttgagaaactggggtgtcaagtaactgctgtttcatcaggattcgaatgtcttggtgctataagtggctctggtaactcattcaaaattattctgttggatcttcacatgcctgaaatggatggttttgaagttgcaagaaggattcggaaattccaaagccataattggcccttgatcatagcttttactgcaagtgcagaagaacacatcaaggagagatgtctacaggtgggaatgaatggattgattcgaaaacctatcctccttcgtgagatagcagatgaacttggaacagtcttgcaacgtgcaggtgaaaaattgtgacaacaattttaaatatctcaaattttttaggttcctcaaaattcattactttgacattttgaaagagaacctgaaattgataacaaactaaatatactagatactaggtacattttgctaaccatttttctgtatgatctttttaccgtacaatgaattatggat

SEQ ID NO: 14609 - DNA, 347 bp, Glycine max
  Clone ID: PAT_MRT3847_113199C.1
gaaagagggattggaaaaaatagacaaactatcggatttaagcaactgaatttccaatcctgagaccgcaagcgcatgggtagttttcacttggattcatcacaataaactcaaactgcagaaatagacttatgcttttcatttgcattgctacagtgtcgctttaccaaaacgccaagatacagtgagattggttttaaagcaactcctgcgtgaccacaacgccacttgtttcaggcatgcctactgaacagactcaacaacctctgatatcggaggagcaagaagagacagcctacgattcctcggagaaggtggtggtggtcagaatcgacgaccactacggc

SEQ ID NO: 14610 - DNA, 411 bp, Glycine max
  unsure (1)..(411): unsure at all n locations
  Clone ID: PAT_MRT3847_11319C.1
gacagaatcatcttctttttttcttcctatcctatctagtgaaaatgaattgaagggctaagggatgaaaggtttgatattgatggtctagctttagtagtgatctcttggaattgaaagtttagaaattagaaattaatagtgactattgatgatgggtaagaagaagccacaaaaaactaaggaactttccgtggcaatagctgaagcatcatcagcaattgatgagaaagagcaacaaattcaagttcaagttcaacctcaacctcaagctcctagaaagagaggtaaaactcgtaagaattgttttaaagagggaagaaaagtgaagaggaaaaaacacaactgatgatagggcaaagaggagcacaaggcacanagagttcaatggaaaaaggtacacacaacgag

SEQ ID NO: 14611 - DNA, 422 bp, Glycine max
  Clone ID: PAT_MRT3847_1131C.1
ataaaagcaagctgtgctaaatcatttgcaccatttcctactgggtgtatgtttcatagtgagcacggtctcatgaactttgaacatccaacacagaagatgaaagcaatgcctcggattgacagcgagggagttatgtgcggggccaacttcaatgttgactctcagtcaaagatccaggtgatgccacgtgttggaagtgaagctaattgggcaacttggggctaacaagcttagctgatttaatcttagtccaacattttttttctaagtggttaaaagaggaacatagtgtgatgagtgtgactctttgcttttctcttttggttccattgttgtgtacatattcatgcttcaaagttgaacatgactatggtaattgtataatatgaataacaagtgttacacaacatttatttgtt

SEQ ID NO: 14612 - DNA, 141 bp, Glycine max
  Clone ID: PAT_MRT3847_113200C.1
cgcaaaaaaaacaccacgttatatgagtatcttcacctaggaatgttaagaattgctcttacagagaaggtcaaaaacagcgcggcgacaaattactaacatattccaaattaagtcacataagcacgaaagagagggcaa

SEQ ID NO: 14613 - DNA, 394 bp, Glycine max
  unsure (1)..(394): unsure at all n locations
  Clone ID: PAT_MRT3847_113201C.1
nnnnaggtaaatgtttaatcaggtcaataaagcggagatgcttctacttctgcctctgttggcatcatccaaagagaaagactcagtcttagtggttgccaatatagaaggtagaaggcgctttagctcttcaatggtgcaaatgactttaccaaggaattcttctaaataagaaatcggagtgcttaaagtgtgctttctatcgtcaagtcaagtagtgaaagcatggaaacttttaccaaggtaaatcttagccagattagggaacatttttcgatgcaagaataagatgttatttataacaagaacacgtagtttggttggaatgagtgagggggggcttatgcgacattgaaaaatacctgctttacgcgcttggttacccttacccctg

SEQ ID NO: 14614 - DNA, 467 bp, Glycine max
  Clone ID: PAT_MRT3847_113202C.1
tatgtgtaaaatctagtatgactgaactgattgttctttcttttctagtaaaacttaagcctgtttgatgttgtgttttagaggttattttctttatgatcccctacttacaagttttcaccccattatgatcctatataatctcaagtttaacaacattgtgtaattgtaactgaatcccttcttggcatggctctcacttgtgaaaaccttttcctttctaaatccctttgagagtgttggcctctggggatgctcagttcaagtattttgatcagatttactttttaaaaccatcacatgcaatattattatattagctgttattaggtgctgccgattaatatgtcagaacattgatttagatggcgcctcaatttcttttctttcttcttgaaaacttgcaatcaatgcatgaaattcatatttctttaagtatattttggttagtaaggttatttcttgga

SEQ ID NO: 14615 - DNA, 720 bp, Glycine max
  unsure (1)..(720): unsure at all n locations
  Clone ID: PAT_MRT3847_113203C.1
atctgggtagcggagccaaacaggcttacgcggaatctgactgctgcccgaagtcattctcagtaactgctaatcactgacacggtcagctaagctaagctaccccttctctctctaaaacctttgccattgtctcccacaacaccttacaacttacaacttcaatgtctgagtcaagactcatttatttataaccaccaccagctcaggtggcgcagccaaaccaaacccacaagaggttaagaacaagtagaataacaaaacccattcttcacctctctcccatcgtaataatgggtcagagcctgagttgcagtggcaaccatgaccacggcctcttcaccgccgtgctgcacggcgaccttcaaattgtcacaactctcttggattccgacccttctctcttgcaccaaacaactctctacgatcgccactctcctcttcatattgctgcagccaatggccagatcgagattctgtctaggctcttagatggatctcttaacccagatgttttaaatcgccacaaacagactccgcttatgttggcagcaatgcacgggaacatcgcctgtgtggagaagcttcttcaagccggagctaatgttttgatgtttgatactatttacgggagaacctgcttacactattccgcttactacggncattcttcttgccttaaggctattctttccgctgctcaatctaatccagtggctg

SEQ ID NO: 14616 - DNA, 542 bp, Glycine max
  Clone ID: PAT_MRT3847_113204C.1
aaattttgcagttttctcctataggaactaaaactgaaaacggggcaactataagaaccaagtgaatatagtttaaccttttaagattcataatttgtacattcttagagaggagggttgcatgtgcattatacacctcccactagctaactcattccccaagattaagttgggaacttgagttcacagtcattgtatggccctggattgcaattgcatacaaccagttatcttgtggctactaaactatttacaatggttatgttgttcttggaagggagggggggctgggagaaaaacatgatcagccaatctttactctttgttttatgccattagctggcacgtacaaacttgttatgcgaattcaattgtataaaaactattagaaatgttatcaaaagagaacattcgtgatctgcttcgagggtttaatattgtatgaataggttatacttgcatagttgactgtgcaatctgtataatatcacatcctttgctttgctggggttgaagaaaatagctcttattcttaccacact

SEQ ID NO: 14617 - DNA, 2559 bp, Glycine max
  unsure (1)..(2559): unsure at all n locations
  Clone ID: PAT_MRT3847_113205C.1
agggagccaaacaggcttacgcggaatctgactgctgcccgaagtcattctcagtaactgctaatcactgacacggtcagctaagctaagctaccccttctctctctaaaacctttgccattgtctcccacaacaccttacaacttacaactccaatcaggcacacgcgggtgagagtcaagattcattcatttatttataaccaccggttcaggtggcgcagcaaaaccaaacccacaagaggtgaagaacaataacataaaccattcttcacctctcctctctcccaccatagtaatgggtcagagcctaagttgcagtggcaactatgaccacggcctcttcaccgccgtgcagcacggtgaccttgaaattgtcacaactctcttggactccgacccctctctcttgcaccaaaccactctctacgatcgccactctcctcttcatattgccgctaccaatgaccagatcgagattctgtctaagctcttagatggatctctcaacccagatgttttaaatcgccacaaacagactccgcttatgctggcagcaatgcatgggaacatcgcgtgtgtggagaagcttcttcaagccggagctaatgttttgatgtttgatactagttacgggagaacctgcttacactatgccgcatactacggccattcttcttgccttaaggctattctttcttctgctcaatctagtccagtatctgcttcttgggggttttctcggtttgtgaatattagagatggaaaaggtgcaacgccattgcacttggcagctcgtcagagacggtctgaatgtgtacatattctattagacagtggtgctcttgtttgtgcttcaactggtggatatggctgtcctgggagcactcctctacatctagcagctagagggggatctatagattgcattcgtgaattgttggcatggggtgctgatcgtcttcaacgcgatgcatctgggcggataccatatatggttgctctgaaacacaaacatggagcctgtgcatcattgctaaatcctacatctgcagaacctcttgtctggccgtctccattgaagttcatcagtgagcttaatcctgaagccaaagctttattagagcaggcattgatggatgcaaacagagaaagagagaaaaacatattgaaagggagttcttactctctgccatctccatcacattctgatggggtagctgataatatgtctgaggttagtgagtccgaattatgttgcatctgctttgagcaggtgtgcacaattgaagttcagaactgtggccaccagatgtgtgcacaatgcacactagccctgtgttgccacaacaagcccaaccctgccactgcctgtcttactccaccagtttgtccattttgtcggagcacgataacaagactcgttgttgtgaagacagaatgccacgatgaaactgatcaagacagtgctgatatcaactgttccaagctgagcaagtcatcaaggaaactcagacacttgaatgacagtggtagcagcagcttcaagggactatctagtgttagttcattcgggaagttgggtagccgcagctctggaaggattgctgctgagtggcttgataaacagtgatggcaaattacttgtggtaatcaatgattccatattggcaagatacggtaactacagaggtgcttaaccggcaaggcaaaaatcaaagttgaaaacaggtgaaggaatattatgtaattttgggaaataagcaaaagtgagttgaagtgaagtgaagttcgcggtaggtaccaagtgttgttgggaaaaagagaaggggatgtcatgttgttgtagtattattgttacttgagaatgaagaagcatcacctgcgtcgatcgatgattttgggcatcgtcaataattttattttatcatacgtatcccagtaaagtgggaataatttctctcaaaagtataaatcaataatattaagggaaagtgtattgcttatttgcattatttatttctttgtatcgataagatataagaaataagatacaaaagagaaagacagagcctttttgttgcttgtcaaaaaatcaataatattatgggaaactgtattgcttatttgcatctgatttatttctttgtaccgatatgttatatgctatacgtttcttaagagaaaaaaaaaagccttttgtaaaaaaaaaaaaaaaaaaaaaaagaaaaaaaataataaataagagagaaaaaataaaaaagtgcggtggatnatgtagggaggatncgaggttagtgtgttttgaatgntantnnttttttntnanagagagggaaannaatttnaanngggcggggnnnntgaaangnnnggagttggngaagngtggggnnggnnaaanaatagggnttgtggaagagnagncgttnnggnnnnaggggggagtaggnacgagggtggcggcgcngctcgncgcgcaaanggcacngagccngcgcggcgagggggagcggccggcccgggagccgcgcagtggcgccgcgcncggcggaggcgc

SEQ ID NO: 14618 - DNA, 119 bp, Glycine max
  Clone ID: PAT_MRT3847_113206C.1
gtaaactcgtaattcttctcgagcatcatcaatgcatcaacatgtccatgacatttaaaacaactcatttattactatcactctcaacctaatccacctcaactctcttcttactctct

SEQ ID NO: 14619 - DNA, 889 bp, Glycine max
  Clone ID: PAT_MRT3847_113207C.1
ttttttttttttaaaaagaaaactgaaaaccaacttaattctgtaattactaatgtcaaaggggattagcatcccttgatgtgtgttccacacccgaggattatcaggcacttgaatgcagcaaggttatccataggaccatatacaacagaatgacaagatgtctagaaaagccatattgttttcttttattttttgcataggaagtgtatgcaagcacctggataatgaggggataaaggtagcttggtaaagaattgaaacttcaacatcaacatcataccctaagtcttccaacttaggctgacgcaactgccaattgagcagggagcttgttggagtaaaatggtcaatttaatgttgcatgaattgttgtcatagctacaaataaccaaggaaaagcacacagctcctttgcattgcagttcaacagcttcacaatgggaagagcctagaatgggggcaagcttggggggaaacgcacaagcatccattctctctcatttgcagcaaaatgcgtccatccaatttcctcaagcaaagagagctttagttcatagaatttcttcttggaaggctcggcatcatcttgaataatgtcactgagtaccttcagtgcggtcccaagcctttgattacgcctctcgtttgtcaccaagaggattccatattttgtgcacttgacatcaacccatttcttcagttcattgaagttctctaaaaacaagtctggatgaacagcatcatcgttggattgctcatcagttttctccacatcttgttttgcaacttctgttgcagctgaagccaatgacttatctacctcctttaaagactcaatttctgccagtgcaagccccttttggtaaagtgcctctgccaacctcgt

SEQ ID NO: 14620 - DNA, 1076 bp, Glycine max
  unsure (1)..(1076): unsure at all n locations
  Clone ID: PAT_MRT3847_113208C.1
tagtctttgttggattctattcccttcactttctctttctctctttcctttttatttttcctcttatgccttttctctttggttttttccccctcactttgcgcttgtcgatctttgtaactagctataatgcaagcacctcaagcagcatcagccactgatgaagaagctcctgaaatttcccatcaggctgtcccccagcgaaacaaagaagtttcagacggtggacccggtggtaggcgccctgatatttcacttcaagttccccctagacctacagggtttggcagcactagtggtgtaagggttctggatcattctcaaagtttcggtaaagggatttcatcatcaagaggcttcttgcgggccttgagcttcaaaagaaaaggaaatgtagcagatggcgaaagaagttccctccttaattcagaccccaagacagctgcagacagtcctaatatggcctccatatctgaaattgcatggaaaagatgtacttctcttcctgttacacctgcatcaaatctgtctccttcagtttctacgcccatttctgcaagggcatataatgaacagactaagcctcataaagatgttgattgttctaaggtttcaaggtccctttctgtacccgggcgaaatgttgttattgtaagatctgtctctttttctacccgtagcgaacaggagcaccaagagtcaaatgatgatcaaataactcctgtgccagtagaagttactgccgatgaagaaattcctgaagaggaagcagtgtgcaggatatgttttgatgtatgtgatgaaaggaatnacctttaaaatggaatgcagttgcaaaggtgacctgagattggtgcatgaagaatgtttagttaaatggtttagcacaaaaggagataagaaatgtgatgtatgtaggctagaggttcagaatttacctgtaactttgcttcgtgtgactagctctgttcaaagagaaaacagacagctgcaaggtcagcagaacctacatccagagtcaataagcgcttggcaagactttgtggtgcttgtcctgatcagcacaatatgctact

SEQ ID NO: 14621 - DNA, 1457 bp, Glycine max
  Clone ID: PAT_MRT3847_113209C.1
tgtgatctccacgcgttcggcagcaccttttgtccctctcctccttgccaccacaccattaaaaatgttgttgttggcaaactcagtcacccagccttggcggtgggtaactttaataacacccaccacaaagaggtaattttgatgatttggaattggtcatggccaaagtcagaggtggacctctctcccccgcggcgcacgttagcccccctcccaagcggtgctcccctcctcatccacccacgtcacttattcagccgcactttaacatgatcaacaagtccaccaccacaccctaacctaaaaaccctttcttttctctctccacccatggcctcctcttcctccccctcccgatcccccctctgccgtccccctcgccctcgtccccatccccgctccaccctcctcccgccgcctccctcctccctgctggtcccccgatgaaaccctcgccctcatcgacgcctaccgcgacaagtggtactccctcggccgcggcaacctcaaggccacccactggcaggaggtcgccgacgctgtctctagccgctgccccaacgcctcccctcccaaaactcctgtccagtgccgccacaaaatggagaagctgcgcaagcgctaccgcaccgagatccaacgcgctcgctccctccccgtttcccgattcaactcctcctgggcccacttcaagctcatggactccatggaaaaaggcccctcccctgttaaacccgatatcaacgattccgatcataataatactgataacgatgacgatgacgatgatgctggtcaagatctctaccaccaccagatcaaccacaacggccacaccagaagcttgaacaagctctataggaacggctttccaggttccggtggtggtgccggtgggtttaggattcgaattcccactgggttgagcgcgccgcagcagcagcatcctggatctgcttccaaggtgtttgggaaggttgggaatcagagattcagccccaatttgaatcaaaaccctaaccctaatcttgggaagaagagggagagagaccccgtgggtgaagtggtggctgcgattaaggtattgggagatgggtttgtgagaatggaacagatgaagatggagatggccagggagatcgagaccatgcggatggagatggaaatgaagcgcactgagatgattctagaatcgcaacagcggattgtcgaggcatttgccaaggccgtttcggaaaagaacaggaagaagaagcccaagactgtgccatcagcctctggttgaggttcagtggtcctttggcccagctgcacttcaacttctatcagtttccatgtacaattggctaaatctctttaatatgtaacgtttatcattatctattacttcatcagcttcgtactttctttgctcttttaaatctaacgctgttgtgacttcattttttctaccc

SEQ ID NO: 14622 - DNA, 707 bp, Glycine max
  Clone ID: PAT_MRT3847_11320C.1
cgaaccctcgccgagctcttcttggtaatggtacatggggttgaaaatcaagagcacctgaaatgtgcttgtaaagaaataatactggaatatcaaggtataagaaaaattaatttatacaagaaattaactatcttctagcttatcaaggcaaaggcacagggagttcccatttgggaaattcaaccaagtttctgtttacaatagatccattgtgcaaccaaaatgtttcagctgagtggtgaaattgcctcactttcctttgaagttcccacataattccacgcatagctgaacaagattctgaatctgaagcatacacccaccagcacctaacttgtcgaccacgggctattattttttctatttcttcatctggtatagattccaggtactgcaatagttcggggcctatttgactggatggccattttattgatatctggctatagtcgatgacattctggaatggcaattctatttgatctgataatataactggaacacattccacaaaaaaggactcgtagaagcgaagggtccaagatgactccccacgtggagcgaggcaaaacttggaattgcgtaggtgttcaaaatattctttccttcccaacttgtcaggtccactgaatttcaaatctggacattccaacgtctcaggaaactgctttgaaagctctataagcttaagacgacctgctttt

SEQ ID NO: 14623 - DNA, 466 bp, Glycine max
  Clone ID: PAT_MRT3847_113210C.1
ggctcgagaaaaaaaaaaaaaaaaaaaaaataaaaaaaaaaaaaaaaaaaaaaaaaaaaaaaaaaaaaaaaaaaaaaatataaaaaaaaaaaaaaacaaaaaaaaaaaaaataaagggggcggccccccctttttggccttccccccccggaatttaatttcggcccggtccctgggggcctcccccttttcccttttgggggctctttttaagctgggcgtaatcagggccttagttgtttccgggggaaaattgttttccgttcaaaattccccacaacattcgacccggaaacttaaagtgtaaaccccgggggccctatgggggggcctcccccccttttattgggttggcctcccttccccttttccatacggaaaacctgttggcccacctgttttaattaaatccccccacccccgggggggggcgtttttttttttggccccccgggggttttttttt

SEQ ID NO: 14624 - DNA, 265 bp, Glycine max
  Clone ID: PAT_MRT3847_113211C.1
caacaacattcatgagggtactcattaaaacattacaaatatagacatagagagagagatcgtgtgaaggggtggcgatggagaaggcattgtggaggtcgaagtacgtggtttccggaggggggttgaagtggatggtgtttgtggtggtgtgtgtggcgtgcgtggtgggaatatggccgtgttatccagagctgaagatcgagagaatggaagtgaagcgggtgaaggtgcggccggtgccgccggtgggggcggacgtgtc

SEQ ID NO: 14625 - DNA, 351 bp, Glycine max
  Clone ID: PAT_MRT3847_113212C.1
aatcaattcccgcggcccgacagatgctcactatgtcgtgcggcctcccttgttttttgtcggttttttgagttttttttttattcttgtagctagtatttaccctgcaggttcataaatgatgacctgtgcctaccgacagaggaatgcttgagcatttagcgttagagaacggaggtacaggaatgagaagagctggttatgagcgctgtaaatttatttatgctcatggactgatttaaagcactgattaattcatttagcatcacctcaagcactgggattctctgcatctgcactcaatttcttctcagagttggacaggaacccctcactaaaatttcagaaact

SEQ ID NO: 14626 - DNA, 260 bp, Glycine max
  Clone ID: PAT_MRT3847_113213C.1
accgagcagcaggcgctgcaactggtgcagcaggtcaagttttcgggtctcacccctctcggcacgcagctgtggcaaaagatcctccaacccctcgtgctcggccccgcgcgttccaacgcgctccaaaagcccgtgctcgtcgtcgccatcacggacggcacgcccgcgggggaaaataaggacgaggtgtttagcgtgatttcgcgcaccgaccaggaactgaggcggacgaggtatgggccggatgctatttcgta

SEQ ID NO: 14627 - DNA, 564 bp, Glycine max
  Clone ID: PAT_MRT3847_113214C.1
ggttcctctattgcaaatccaataagataccacaatctcaaagactacatctatagatatttcaaggcaaaaccatgggtgaacaaagagggaaatcctgtcaaggtcggcaaagttactgtattggacaccatgactagcttccagagatacatgttcattcgttacttgcttccattgaagggactagagctagccaatgtagccttttgtcaatattttcaaggaatgtgtcttgacattagaaggaagatccatatagtgatgcaattggtcgacctttacaagccctacgtgttcttcaaaggcgtatttgataatatgaacacagaaaagttgcaaacagcggtcagacaaggtgaggtagagatggaatattcgttttactttgaccctaaaatgattgattgggaagactacttcatgaatatccatattcctggtatagtcaagtatgtcttcaagtaatatctactctgaaatttaaattggatcttttatcttttgtgttttaaaacttgagcatctttagtaggaaaaaccctctttgtttagtcattctct

SEQ ID NO: 14628 - DNA, 869 bp, Glycine max
  Clone ID: PAT_MRT3847_113215C.1
gaaattaattatctggggcagctgcgtcatctctaatcttgtgaaactgattggttactgcttagaggaccatcaacggcttttggtgtatgagtttttgaccaaaggaagtttggataatcatttaattaggagagcttcttactttcaaccactttcttggaacttccgtatgaagcccacgcgtccgcccacgcgtccgcccacgcgtccgcccacgcgtccggcaaaagtgatatatcgagacttcaaagcttcaaatatcttacttgattcgaattacaatgcaaaactttctgattttggcttggcaaaggatggaccagctggtgataagagccatgtctctacaagggtaatgggcacatatggctatgctgctcctgaatatatggccacaggtcacttgacaaagaagagtgatgtatacagcttcggggttgttctgcttgaaattatgtccggcaaacgtgcacttgacagcaacaggccaagtggggagcacaatttaattgaatgggccaaaccttacctcagcaacaagcgcaggatcttccaagtcatggatgcgcgcattgaaggccaatacacgttgcgcgaatcaatgaaagtagccaaccttgccattcaatgtctgtctgtggaaccaagatttagaccaaaaatggatgaagtggtgagagcattagaggaacttcaggattcagaagacagagctgggaggggtgggaagctctcgagatcaaactgctagaaggagtggccatagctcaagcagcagcaggcgtagcctactagaggtagacacatgaaacaacagggagtgaaaagtgaatgttgatttcatgctgtgatcatctgatttgcta

SEQ ID NO: 14629 - DNA, 320 bp, Glycine max
  Clone ID: PAT_MRT3847_113216C.1
tccaaggaaaattatgctggcaaggcaaacaggcttgaccagaaacaaggtggcaaattggttcaccaatgcaagggtgcgtccctggaacccattggttgaggaaatgtacaaagaggagtttggagattccgagatgaactgcaacctttcatctgagaacaacacggtcacaagtaaaagagatgatgttcaagagtctgataacattaacaataataataataaatgggaagagtcacaagacaatttaataactgttgacagtgtgcaagtccaacctcaagcaaaaatggataaaatggtccatgttgaaaatg

SEQ ID NO: 14630 - DNA, 915 bp, Glycine max
  Clone ID: PAT_MRT3847_113217C.1
ctcaatagtactcttgaattttgcagataccattagtccttgcctgacagctatctttcacgtggaaactttcttgcttgcacacttccatacatacatacttgctttctttcttctctttccaagtctttcttctctgttccaaattgaaaacttcaacttgtagctgcatctggttacactgaagaaaaaaggagacaagacgtttttttttttttttctttctttctttagcttaagctctgggttcatgggttgcttctttagtgtaccttcaaagatcaaagctgagagccctccacgtaatggtttgaattcaaaggatggtagcaaagaagagaatgatttgagttgtttaagcagcaaggtgtcctcttcagctatgcttctaactcctcaaagtgaggatgagatattgcaggccagcaatttgaagaacttcacattcaatgagctaagaactgctacaaggaactttcgtccggatagtatggtgggcgaaggtgggtttggttgtgtgtttaaggggtggatcgatgagcatacacttgcccctactaaaccagggacaggaatggtcattgctgtgaagaggcttaaccaagaaagcaaccaggggcacattgaatggttgactcaaatcaactacctggggcagctcagtcatcctaatcttgtgaaactaattggttactccttagaagatgatcaccggattttggtgtatgaatttgtggccaagggtagtttggataatcacttgttcaggaggggttcttactttcaaccactctcttggaacatccgtatgaaggttgctcttgatgctgctaagggtcttgcatttcttcacagtgatgaagtaaatgtaatatataggggacttcaaaacttccaatatcttacttgattcta

SEQ ID NO: 14631 - DNA, 345 bp, Glycine max
  Clone ID: PAT_MRT3847_113218C.1
tgttggtttcgattccaacgccttgtctctcagccgcagacacactggaccagcaagcacatccattttttatatatcactctgatacgacgagtcgctactagccgattcccttggacgaagaaccaacagaggttgatccatacgcgaagggcccacattaaggaagagggtcagggtaatcgagccatagcggaggagcattttatactactaacactggaagtgttacccctgcaaactcaaggctctctccccttcctgcagagccttacgatcgtggggcaactattgacatccgccttgataactgcagggacataatggctaaggaaaaggatcttc

SEQ ID NO: 14632 - DNA, 1994 bp, Glycine max
  Clone ID: PAT_MRT3847_113219C.1
gttaaaaaccgcgcttgacagctaacccttcatggggaaatagttcctttcacacttgcattgtttttttttttttttttctccttttcacgggctttctcttcttttcctctggcttcatcatctctcatctgcaccccttttgagaacttcaacttgttacctaattactctactccccctctcttgcttctgtgttcttcttcttcgcttctctcttcatggggtgctgcttaagtgccaggatcaaagctgagagccctccacgcaatggtttgagttcaaaggatggtaacaaggaagaagatggcttaagcagcaaggcctcaactccctctgttcctccaactccgcggacggagggagagatcttgaagtcctcaaacatgaagagcttcaacttcagtgagctaaaaactgctacaagaaactttcgtccagatagtgtggtgggtgaaggcgggtttggttgtgtttttaaggggtggattgatgaacagacacttgcaccagttagaccagggactggcatggtcattgctgtgaagaggcttaaccaagaaggtcttcagggacacagtgaatggttggtgagtgtcactttgtagggcttattacaatttggaactttgcttgaagcctcagaatttaagatacagttccattttgaagcttaggaaaatatcaaattagttttaatgcgatttctttgggagttcctcctttggtgatatatgtagcaaaaagttaatattttagaagatttcttcggttggtgtaattaattagccttgtgttatagacagaaatcaattacctggggcagctgcgtcatcctaatcttgtgaaactgattggttactgcttagaggacgaccaccggcttttggtgtatgagtttttgaccaaaggaagtttggataatcatttatttaggagagcttcttactttcaaccactttcttggaacatccgtatgaaggttgctcttgatgctgctaagggtcttgcatatcttcatagcgatgaagcaaaagtgatatatcgagacttcaaagcttcaaatatcttacttgattcgaattacaatgcaaaactttctgattttggcttggcaaaggatggaccagctggtgataagagccatgtctctacaagggtaatgggcacatatggctatgctgctcctgaatatatggccacaggtcacttgacaaagaagagtgatgtatacagcttcggggttgttctgcttgaaattatgtctggcaaacgagcacttgacagcaacaggccaagtggggagcacaatttaattgaatgggccaaaccttacctcagcaacaagcgcaggatcttccaagtcatggatgcgcgcattgaaggccaatacacgttgcgcgaatcaatgaaagtagccaaccttgccattcaatgtctgtctgtggaaccaagatttagaccaaaaatggatgaagtggtgagagcattagaggaacttcaggattcagaagacagagctggaggggtgggaagctctcgagatcaaactgctagaaggagtggccatagctcaagcagcagtgggcctagacaacatagaggtagacaacatgaaacaacaaggaagtgaaaagtgaatgttgatttcatgctgtgatcatctgattttgctagagttggtacattgtatttacgtgtatcatgatgaacttaagcatggctctagatgtctgatttctgtacagttgttgattgagcaataatattgaaatcttcatttcttccgtgaatgttgatttcatgttgtgaacatgattttgctccagttgctattttgtatgtatgtatgcatatcatgatgaacttaagcattgcttgcttaagatgtctgattgctgtacagttgttgttgattgagcaataatattgaaatcttcatttcaaaaaaaaaaacaatactccccttccctttccacctttctatcattata

SEQ ID NO: 14633 - DNA, 379 bp, Glycine max
  Clone ID: PAT_MRT3847_11321C.1
ctgttgatcaacaacctatatcaattcacgcaagactatttaaactttaacctttaatggctgcaagtttgagatgcaagaacagcattggctttctgcttaccttttacatttgcttacagagtacgatgggagccgataaccgcaaactacgaagtaactgggcgctcacaccgggcgagacctctactttagctgtggctgttgttcatgcatattctggattcaccgaaaactggagagcatttcacttgcaaccactggggttctctttccaacattcttacctcttacaattggaggacggtgttgttggtcctgaagaaccacggtgaaactacagagagggcactgaatccgactcattataatggaaaat

SEQ ID NO: 14634 - DNA, 136 bp, Glycine max
  Clone ID: PAT_MRT3847_113220C.1
tccgggtcgacccacgagtccgaacagccgtcagaagaggagagaaaggggaacaaacggggtcgatgatatggtacatggtcattgaattttcatccatcgttggcagctgtcatgcaatctcctcggactgatc

SEQ ID NO: 14635 - DNA, 330 bp, Glycine max
  Clone ID: PAT_MRT3847_113221C.1
gtggaagatagggttacgccgatgcgcatcgaaatcatcatcagagccaccagaaccctagccgctctcggttagaacgtaaggagaatcagggagcttacctacgtggctcagatgaggctcaagtttcctgagaacagcgttgaactctatgctgaaaaggtcaacagtaggggtctttgcgctatagcacaggctgagtctgtgcgatacaatctccttgttggcctagctgtgcgcaaggcttgctatggtgtcttgaggtttgttatggaaaggggtgctaacggatgctaggtcagtcgtagtggctaattgagagcccatata

SEQ ID NO: 14636 - DNA, 2243 bp, Glycine max
  Clone ID: PAT_MRT3847_113222C.1
acggctggcgagaagacgccagaaggggagagaacgagagaaagaacaatgggggcgaagaagcagagccagggagtgaaaaataagggtaatggcgccaacaatgatgttttcgcgtcatgctccttctccagccttggacttgattccaatttatgtgaacaacttcgtgataggttggggtttgaagttccaacgctggtgcaagctcaagcaattcccgttattctctcggggcggcatgcattggtgaatgctgcaacgggcacggggaagactgttgcgtatttggctccgattattcatcacttgcagggttatgaaaatcggattcagcgctctgatggaacatttgcgttggttcttgtaccgacgcgggagctatgcttgcaggtttatgaaattcttcaaaagttattgcatcggtttcattggattgttcttggatacatggtgggtgatgaaaaaagatcaaaagagaaatcaaggctgcgcaaaggcatatcaattcttatagcaactcctgggcgccttttagatcacttgaagaacacaacagcattcttgtactcaaatttacgctggataatttttgatgaagctgaccggattttggaattgggatttggaaaagatatagaggaaatactagatcttttaggctcaaggaaaaaagggcatggtgatcaagagaatacagttctaacacactctaaaattcaaagacagaatttgcttttatctgccaccttaaatgagaaagtgaaccaccttgctaaaatgagtctagacaatccagttatgattggtcttgatggtaagaaaatggaaccaatttcaacaattaaaaggcttgattcttcagaatctgatgaagacagtgaagataaatattccagtaaagtaccaacagttggagattacaaagtccccatacagttgattcagagatacatgaaagtgccatgtggttcacggcttcctgtacttctttcaattctaaagcatctctttgaaagagaaccttcacaaaaggtcgttttattcttttcaacatgtgatgcagtagattttcactattcactgttaagtgaatttcaattttcatcctatccacaaacagaaggggtccgacaggtgtttcttggatgcaaaactttccggttacatggtaatatgcaacaagaggaccggagaaccagttttcaggcctttaaaactgagaaatctgctctgcttttgtccactgatgtttctgctagaggattggattttccaaaggttaggtgcatcatacaatatgattctcctggggaagctacggaatatgttcatagagttggtagaactgctcgactgggtgaaagaggagagtcattattatttctgcaaccagttgaaatagactatttacaggacttggagaaacatggtgtctcactcacggagtatcctgtcctcaaagtgttggatagttttccactacaaaagaaccacacaaagaagtctgttttcttagagtcacatccctgggtcctttgtctccagaaggcacttgaagccttcatcatgtccaagcccgaaatggatgaacatgccaggaaggcattttgctcttgggttcgtgcgtacacagcccatcgcggtgagctgaaaagaatatttatgatcaagaaactccacttggggcacgtagcaaaaagctttgcattgaaacaacaaccctccttagttgggcagtcattccaaaagcaaaataagaagagaaagagatttgagaagaaaaacgggtttacaaaaaagagaaaagttgccagtgtgacagaatgcagaccatgaaagtggatttgatataaagttttgataaaaacaaaatgatggtgacgaatgatgactatggatggatccaagggagaccagaatcttgatcattgtatcaacaatagggttactaagagacgtgagatgaggtagtgtcaatgccttcggttctgttcatttttgtagaccaaatttctaaccttaggcttcaagccagatgcttgcatgtatactacttttatttaatattttatagtgatatttatataaaccttttttatggtggtggcgaaagcctgaaaggggggaaggggatgttaaaactactagaaaaaaaattctcttttgaatgtactagtataactaatcctctaaagcattagcatagcattcgcaatgaatttgtttagatacaagaaaaa

SEQ ID NO: 14637 - DNA, 684 bp, Glycine max
  Clone ID: PAT_MRT3847_113223C.1
cacgcgtccgcgcaatcgcagggatctatcatcagaagttccgtgaaatctaatgaggggaggtggatatatggagtgttcggagactcgtggaatggagaccttgcaattggtggctacaaggccatcaaacaggtactacttttttattttttccattgatctttgtctctactaaatttcaactttgaaggttaaaaatttgttatattgaatgaacttttgtgattactagattcattttgttttcatttaagaatctcaagagtatcatagggatagctatttttttattggcaaattttagttttttagaaatgtctgtgtggggattcgaacccacgacctctcctcccttcatccttctccaaccaatggaccttatatctcccatagggatagctattggtgtcatagtaattgaagttttggaaattacatggattagatctacttgtgtgtttaatttagtagttggaatttggggcgtaagcttggttttttattgttatttggacttggatttgcaatgggtaggtttaaattgttgagggtgggtgagggttgctgattggctttttattttctgaatccaccttaattggctttcgttgcagacaattgcttttcgttttttgtttatttcttgaaatggtgcagctctaccattacaaactaatggat

SEQ ID NO: 14638 - DNA, 773 bp, Glycine max
  unsure (1)..(773): unsure at all n locations
  Clone ID: PAT_MRT3847_113224C.1
tcgcaatattcaaaataagcctgtggttaatcaagatttcatctccaatgagatgcagcaattgcgccagcagttgaagtacttgcaggctgaactttgttttcagggtggggttcctgctgatgaagtgcgggttctcaaggaaaggattgcttggcttgagtctactaatgaggacctctacagagaacttcataaatatcgcagtagatgtgcttttgtagggagatgtgaaattgatgaacctaatggacacatttatctcatgaaaaccgatgggcttgagaggcactttcagagcttagattcatctgatcattccctggttggaagtctatcaggtgaggattctaaggaaactgatgaagcagctaaagagttggagcatgtactattgcaaaataccatggataaagaaatgaatgaattgaataagcgcttggagcagaaagagtctgagatgaaggtcattgcagttgatactgaaacactcaaacaacactttgggaagaaaattttggaacttgaggaggagaaaagaaaagtgcaggaagagagggaccgtttattgcacgaggtagagaatcttgcttctaattcagatgggctagcacacaaaactcaagatggttcgtggccaaaaattgaaggcattggaagcacagattttagacctcaggaagaaacagaaagccttgtgcagcctattaaagcaaagaaaagagtgaagacgctgcanaaagactgcagactgagatacaatatatcaaggc

SEQ ID NO: 14639 - DNA, 518 bp, Glycine max
  Clone ID: PAT_MRT3847_113225C.1
gagtgggagggagacagatctctcttttgattttggtggggaaaattttggtttttttgtgtgggagatttctttaatctgaagttccttttctcgtgtcaaatcaatagtgggtgaaaaaacctaactaaatggtgatcttgatcggacagctagacccctgtttgtcttttttgtttcttcccgtgctatagagggagatctgtgctagtatgtttagtgagtgtgttcatttggagactgaaaaaatatattttctgaacctaattaaatttttggtgtttaagaacatttaagacagtatattacagtagttgtatgtcaatcaaactgctgcatcaaggattacaattttgaagctttaaactagttatattatctgaggggtgttgatgtgttccagtcttcaaggacagtttttttgtgtgctgtcttcattattattattattattaaattattaaattgcatgcccataaaattgtacttcttcagttagttaaaaatttaaactgata

SEQ ID NO: 14640 - DNA, 380 bp, Glycine max
  unsure (1)..(380): unsure at all n locations
  Clone ID: PAT_MRT3847_113226C.1
tgnctgaatgcgacaaagaatagatcctcaatataatgaggttcaggctcagatggaaacaaaactgttgaaattgcctcttgatgacgttgcaactactaaaagttccatgttgcatcttaaaatttctcaatctaaaattgcactttccaaaaacacagttggaggaaccattctgcgtagtgatctattggccaattttttgacagagggcaatcttagagcacgtgttgatttgcagctcactcataccattatacgaacgattcaaatggtggccacagctggtattcctgataataccagcctagcattggcctgtcctatgaataggtcttttaggacgcgcgccaagactgatatttacactatcagctctc

SEQ ID NO: 14641 - DNA, 310 bp, Glycine max
  Clone ID: PAT_MRT3847_113227C.1
ggagctattctggctggaaacttttacattcaattgacacaggacatactgcaaatatattctgtactaagtttataccagaaacttctgatgagcttgtagcctctggagctggagatgctggagtccggttatttaatttgtctcgcttaagtgggagtggatttagtgacaatgccatcattgctccatctgcacattaccaatgtcacactcgaagagtcaagaaattggctgttgaaaatggaaaccccaatgtagtatggagtgctagtgaagatgggaccctaaggcaacatgattttcggga

SEQ ID NO: 14642 - DNA, 380 bp, Glycine max
  Clone ID: PAT_MRT3847_113228C.1
ggctcgaggatcaaccccactacctggacgttggtgatcagccttgatcccttggacctggactggggtctgtcgctacgggctatatgggttgctggagctgccgcctagtccgacaatatatgtatgtttcggaggctcagccatgtctcttctgctcagggccgagcggacagtactatgaatcttcgagatcgatgttgcacgtatggtcgagctactgtccacccacgaacctccagcctgcggtcagaataaaacaagaacctggatgtgagttaccagatgatcgatgtctatgattactaatgggtacagtaacgggggagggtgcgagggtctctttaatctagctggactgaaacggcttggaaggcctc

SEQ ID NO: 14643 - DNA, 266 bp, Glycine max
  unsure (1)..(266): unsure at all n locations
  Clone ID: PAT_MRT3847_113229C.1
ctcatcttcttcatacgtntttncggtaatgcgattngntgttggttggngtcacacggcgaaangttgatggtggtggtctgtngcggtggcgcgtgttgcccgnttcgtcctattcttccttccattgtnctccctccantgccccctttgtngtcgtcnggtgcctctccgaccgtgccggagactggacgtactcgccattgaccacgggaaggccctcatctaccgtgtcgtcgttcagaagcaccctccggcggacatgg

SEQ ID NO: 14644 - DNA, 373 bp, Glycine max
  unsure (1)..(373): unsure at all n locations
  Clone ID: PAT_MRT3847_11322C.1
cactanntcttcggctcttcctttttnttttactaaataaaacaaattattccatttatcctatcaggacagggagtataattaatggggaaaaaatacattcactctcacttatataaaaggatgtattttgtgaccatataacatacaacaaaattgttaacttttatgaataccaattaacaatgttaaaaaattcaatcttatccaaacaaaatctaataattcttttacaaaaaaatcaaattgaaaacaatatcataaatttacaaatcgtaaataaaagaaaaaaatacaacaagaaaataaaattttactttttcacaacaaacatatttgaacacaaatgacttacacaaaataaacatcctta

SEQ ID NO: 14645 - DNA, 238 bp, Glycine max
  Clone ID: PAT_MRT3847_113230C.1
ggaagttgtgagtgatgttgatgggttgaccaggtcaagggtgatgtaatgcatgcaagtacttgtgtactctgatactcacatgtgtgcatttggaaaagagagtgctccctacctacagcttttaagtgagtccaagcttgaactacttatactacattcttatttaggattccttacccaggtgttaaagctttgatggagtaccctaacttaaaaagcataccaacccactgaa

SEQ ID NO: 14646 - DNA, 184 bp, Glycine max
  Clone ID: PAT_MRT3847_113231C.1
ggggaagcttcagtggtgttaatcatgagaaagcgaaccccaaaaatatataaactaaaagacaatactagaaagaggggtcttccgggtaactattataccttgaaactctagagatttttttttcaaagaagcgaaaaagtggggaactgtacttcattctcctgtgcatctctgaatatat

SEQ ID NO: 14647 - DNA, 332 bp, Glycine max
  Clone ID: PAT_MRT3847_113232C.1
tcttcctcttactcttaggaaaaaaaaaaataaaaactattactatataaaaaaataactataatatatacgtataagtcataaattaaactacagaaacataacataataaaaaaaatcaataatatcataaataatgcctcatacaaaacacaatcaaaccttccatataaaatatcaatatattaaacatattcaatccatacttaatattaatcatattctcttcatatactatgacaaacctattcaagaattgtaacataaatcatcatatcaatataaacacactcagattatacccattctaaataattcatcttaccttcccc

SEQ ID NO: 14648 - DNA, 371 bp, Glycine max
  Clone ID: PAT_MRT3847_113233C.1
ctcgagccgattcggttcgagcattttaagggtcattatctctgtttaaaaactttggttttgaggaaaatttgcaggcgatgatggatgatcagagaaggaggaaaagatggttatcaaaccgcgaatttgaacgccgatttggaatgaggaagcaaaaaccctgggccaatcttgttcccaaggggtttcatttcaaaagagagacccaccatattttcaaacgcgtaaatatcaccacgcaacaactctaacgcgttggggttgaaaactgggcttttaggtctaaggggggtgagtagtgacacggttggggctctgtaaaagagatcgtacacgtgtaaaatcccaccccctctgggggggttttg

SEQ ID NO: 14649 - DNA, 221 bp, Glycine max
  unsure (1)..(221): unsure at all n locations
  Clone ID: PAT_MRT3847_113234C.1
accatactacaaggagttccanttttggggggganannaagatcngtgggggtgtaaatgtgtaagtttgtgctgttttgtttgtggggattgttttcttgagaaaagagtaagcggtgtgtgtggtgtgaaaaagtgtgttaatatgagtaactggttggggttctctctgactccacacttgaggattgatgaagaatttgagagagagaaccaagagc

SEQ ID NO: 14650 - DNA, 274 bp, Glycine max
  Clone ID: PAT_MRT3847_113235C.1
aggcccccaaaaatgagaaatttgtttccaaaaaaaaaggagcaccgattttttgtcaaagggggggacgaaatggtctaggtgaaaaaaggacaataaaaacgccaacattgggaagggatagacagaccctttattaaaggggggggacttaacccaaggggttggggaaaggggggggggaaaacacctgggggataaagaagggcaaaaaaacaatgttaaagtctaaaggggaaacagtttcaagttggggggggggccgacaacccca

SEQ ID NO: 14651 - DNA, 276 bp, Glycine max
  unsure (1)..(276): unsure at all n locations
  Clone ID: PAT_MRT3847_113236C.1
agaacttcagtatgagctctcgcacgctcagtcacgccctccgtggcggcctcagcgttaatgtgcgtcgccagacgtgatcactcgtggtggccacgcgcatcgtccacctcctccaccttttgcacgtatcaaggcacnngaacagccgctacacgaggaggcggactggtttggaatgacggcgtctccnccgagacgctcatcgactttgacgcgccgcatattcccaagtatcaggcgttgcgacattggntttgtggattggcatgcttg

SEQ ID NO: 14652 - DNA, 825 bp, Glycine max
  Clone ID: PAT_MRT3847_113237C.1
cacgcgtccgaacgaacacatggacgtggaggagccgcgtgacgaaggacaaccaggaggttctgtcgagcaaagcccagagcaactggtggcccgtgccatagcccccgtcaagaaggatttcctccgtcctcctcccgttcgctcttcctctccaaacgacggcgtttccattcccaatgataacaacaagacctctgttctcgccaaggagaagaagtccaagcgccaactcaaacgcgaacgtcgtctggaacaaaagtcagcacgaaacctgtgtcccgaaattgccaaaacaggggatgttagttcatgtccttataaagacaagtgtcgtttcagccatgatttggaagccttcaaggcacagaaacctgctgatctagaggggcaatgtcctttctttaaatctggaggcgcttgcccatatggtttagggtgtagattttcgagtacgcatgaagatggtgtgccttctgccaatctgaatggtcttaagaataattccgaggtgaatgggttgagcaaacatgttcaaaagcttttgtggaaaaataagatgagcttctccaaggcagatgcccaactcaaaagtctaggcctcgtgggaacctctaagtcaaaaaggaatgacttggaaaataaagatgaaggtgacactggttcaaataagtgtgatcattctgattacagtggatcttgtgttgttacctccgactcatgttgtaagttggaatgccctgaagaagttatgaaagatgatgacaatgacatagatggaaaatctgaatctgatgtactttgcccccagaagagaagaaaaat

SEQ ID NO: 14653 - DNA, 234 bp, Glycine max
  Clone ID: PAT_MRT3847_113238C.1
tattcgtttcgtttgctgactgatgttagattctctggctgcaacggaccattataggaagtttgttatcgggaacgcaccctggcccattggtgtaactatggttggtattcaccaaagaactgcccgtgaaaagatctacaccaacagtgatgcttacatcatgaactgatgagaccactatcaacatatcttgcaattctgtgaagaagacttaatgacatctctgccaac

SEQ ID NO: 14654 - DNA, 278 bp, Glycine max
  Clone ID: PAT_MRT3847_113239C.1
cctttccgatcttccacgctaccgaaagatgcaggtaatgggggagtttttgatggcaatgccgctttagcatttacaactttaagagtgcttgttgcttaaagtttaaagcccaacatatatgaagttttccattacagatatcttaattgtgccaaataaagtgcatagtatgggtagaaggccactatgtctttctatcagtctgttttagtaactttgtctaaacgcaaagcccgcttgataatgggaaacactgatgctcaaatcttgatggt

SEQ ID NO: 14655 - DNA, 385 bp, Glycine max
  Clone ID: PAT_MRT3847_11323C.1
tccacgccatcgcccacgcatcctcaaacatttttacaaactataaatctaatactagggaggcgtttaatgatacagaacgggtatcgtaacatatctacgatacacacctacctcctgctgtggatgctgctaccctctaacaaagtctctaatcatcagacactgaccatcgtcacacaaccacccctcctaaccttcatgtgacttataaacctcgttggaaacgggacccctgcaaccatcaagaagatcactacccctgcagctcgagaaagcatgcttatctttcacaaaatagaatatgttgatgagcctcacttcagatacacatatagctatggtcatggaatggcattgccagacacactgacaaacatcacat

SEQ ID NO: 14656 - DNA, 3012 bp, Glycine max
  Clone ID: PAT_MRT3847_113240C.1
cggctcgagctctctttctctttctgcaaccgaaccaaaaattagggtttctcgatcttcttcatttgtcactgctctcaccgtttcagggttttaccttcccaacacgacacagggctgggttctgagcaatttttcgttttgaagagtatttatctgtttcagcatgcgtttttaaattgtggctttatttatctttttaattggtaaaggtgttaacccgattcaagttttccctttgaattacaactgttgacttcgaattccgaattggaaagatagggatgggtattgagagtatgcacttgcaattgcgttttttattgataacaatgcttggctgctaagggacctggtagctctgatgcaagatggcagatcaagaagaacttcatgggctgacacggtttggctgcaaattcttccttgcagctgagaatggttccgttgataaggaggaatgtgggaattggtagccgcgaccttcgaagagagggtttatttatcatctgaggaaccgtcaaccagcggcagaatcccctgcctctgctccagcatattgtggcccttcttctggtgctggctctagttctggtgctggtaattctggatcccgttatgctgcacccagaaatgattatcgtcctgggtatggtggtggtggtgaacgtacagggggatggggaaacaaaagtggtggatgggatcgtggcagggagcgggaagtcaatccctttgaagaagagggtaacgctgaagaggcattcagtgagcaggagaatacaggaataaactttgatgcatatgaaggcattcgagtggacaccagtggtgacaatgtgcccccacctgtgaatacgtttgcagagattgatttgggtgaagcacttaatcagaatataagaaggtgcaaatatgtgaagccaacacctgttcagcggcatgccataccgatatctctagctggacgggatttgatggcttgtgcgcagactggttctggaaagacagctgcattctgcttcccgattatcagtggaatcatgaggggccaacccctgcagaggccacctcgcggggtgcgtacagtgtatccacttgcgcttgttctttcaccaacgagggagctatccatgcaaatacatgaagaggctaggaagttttcataccaaactggggttagggtggttgttgcatatggtggagcaccaataaaccagcagggatcttgaaagaggggtggacattcttgttgcaactcctggaagactggtagatttgctggagagagctagagtttcactgcagatgattcgatatctggccttagatgaggcagatcggatgctggatatgggttttgagccacaaataaggaagattgtagagcaaatggacatgcctccaccaggtgccagacagactatgttgttcagtgcaacatttccaaaagagatacagagattggcttctgatttcctttcaaattatattttccttgctgttggaagagtgggttcaagtactgatttaattgtccaaagagttgagtatgttcaagagtctgacaagagaagtcacctaatggaccttcttcatgcacagagggcaaatggtgtacaaggaaagcaagctttaactttagtttttgtggagactaagtagggagctgattcgctggaacactggttgtgtcttaatggttttccggcaactactatggatggagacaggtcacagcaggaaagagaattagccttgaggtcatttaaaagtggcaacacccccatattggttgccaccgatgttgctgcacgtggtcttgatattccccatgttgctcatgtggtcaactttgacctgccaaatgacattgatgattatgtacaccgaattggaagaacagggcgagctggaaagaaaggtcttgcaactgcattctttaatgacaacaattcatcgctagctagagctttatcagaactgatgcaagaagcaaatcaagaagtacctgcttggctctcacggtttgctgctcgatcttcttttggtggaggcaggaaccgccgatcaggcggtcgatttggtggtcgtgacttccgaagagatggctctttcagtagaggttcttcagattactacagtgcaggaaacggcagtggtggtggatatggaggctcgggtgggtatgctggtggagggtatggtcctggggtcacgagtgcttgggattgactttcttcttttcatagcattacataccatcttaggtataggtgtggatgcgcctacaggatgatttttctccccccagtgtttttatgatcttcaatttacttgtgtttcaagccatcatcattttgtactattttacagtgctaatcattgtggggaatgggttgtgtatgtggtctagtatccacatcaataaaggttgtgtaatgatggtaggtattggtgattactaacatattaggaatttcttgtcgacaactttttatacccttcattttgggtggtaattttggtgggagactggttgtagattatgcaaggggagaaatcgagctttttgttattgccgatcgtggttatctgacttatttctctcgaagcatactctttccagtgtcaaccaatttatgttggaatctaaatttccccactttggtgggctaaggttttgtaatattatagtggtggatgaaatgaataggaaaaaaaaaaaaaaaaaatcaataggtgttggcaatggcgcccactaacttattagaagttctttaacaactttctgtactcttcattttgggtggttattttggtgggagaaaggttgtagaatacgctgtgggaaaggtggtggcatttctttacagtcgaatcaatttatctcttgatcatgtttcaacccaacatatgttgtcatcttgatttccccattttggtgggctaaggttttgtaatattttagtggtcactccaatgaatgaaaagtattcttgccaccactaa

SEQ ID NO: 14657 - DNA, 608 bp, Glycine max
  Clone ID: PAT_MRT3847_113241C.1
gacacacgccagagtgagtgagtgagtgtgtgtgcgtttctttctttggctctcgctcttcttcttcctttgatcaactccccacacagcacggcacaaaaacgatggtgtccaaacctaccgactctgcttccaaacctcgaaaacaacatggagagccagcaaatgatgcaattggaaacttgtccctcaagataaatcagttgaaaaagcaaatccaggcggagagaatattgtacattaaagaaaaaattcagagcaatgagaagaagctacaatttcatatgtcaggagtcctgtcagaaatatcaacaaggggatcttcaccgccagaggaaaataggaaaactccaattctttcttcaagaattgaccatcctttatgtaaattcagtggtttctctccagtctcaggagacaaagaccacagcaatcaagatgcattatctgggacaagtatcaaaattacatatattgaaacattaccgctatatacctcttggatatttctagacagaaatcaccacctgatacctcttggatatttctggtcggaaatcagagaaatactatgatcaacatggaagtgaagcactgatatgtagtga

SEQ ID NO: 14658 - DNA, 867 bp, Glycine max
  unsure (1)..(867): unsure at all n locations
  Clone ID: PAT_MRT3847_113242C.1
ccacgcgtccggttttccagcaactactattcatggtgacaggacacaacaggaaagagaattggcattaaggtcatttaaaagtggcaacacccccatattggttgcaactgatgtggctgcacgtggtcttgatattcctcatgttgcccatgtggttaactttgaccttcctaatgatattgatgattatgtacaccgaattggaaggacagggcgagcaggaaagaaaggcctggcaactgcattctttaatgacaacaatgcatccctagcaagggctttagcagatctgatgcaagaagcaaatcaagaagtgcctgattggctctcacggtatgctgctcgctcttcctttggtggtggaaggaaccgtcgatcaggaggaagccgttttggtggccgtgactttcgaagagagggttcttttagtagggggtggttctgattactacagtgcaggaaacaacagtagtggatatggcaattcntggtgtgtatggtgcaggatacggtccctgggtaaccagtgcttgggactgatgtgtatgtagctcattctgatagcattatatactgtctaggtagtgcagtgtcagtaggtgcagacatacaccttactaacatattaggagttctttttaacaactttctgtactcttcattttgggtggttatttttctgggttttatggtgtcgaatatgcggtgggagaggtggaggcatttctttaaagtcggatcttttatctcttgatcatgtttctacccaatgtatgttgtcatcttgacttccccattttgatgggctaaggcttgtaatattttagtggttgactgaaatgaatgaaaagtattcttgccgga

SEQ ID NO: 14659 - DNA, 226 bp, Glycine max
  unsure (1)..(226): unsure at all n locations
  Clone ID: PAT_MRT3847_113243C.1
atcgattttgtacaccatttaagctgacgaagatctagatgcagggccaattaagtactagggaattgaggaggtataaggttgatctagtggtgaaagaagaaggaaagggaggaaaagccataggtttgaatctccggttaataaaaaactaacatctgatatttatcgacaaaaagagtactagagaattaaattccgtttcaaaaaaaaaaaaanaaaaata

SEQ ID NO: 14660 - DNA, 2672 bp, Glycine max
  Clone ID: PAT_MRT3847_113244C.1
ggcgcatccttaggcacaaaagatatttttgtatccatcccatgccatccaaatttgaaggcgtgtttgttgtgtgtggcgtttaaggtttctcgatcttcgtcaataatcgtcgtctccatttcagtcggggttttagtcttctcttccatacactaatacagggagatgcgaacttcatgggctgatttggctgcaaattctgcagccgaaaatgcaggtcctggttcttctgctgacaatgtgggaactggtagcactttagctcccacgcgacctgtttatgtacctcctcatctgaggaaccgtcagccagcagcagaatcccctgcccctgctccagcatatagtggcccttcttctggtgctggctctagttctggtgctggtaattctggatcccgttatgctgcacccagaaatgattatcgtcctgggtatggtggtggtggtggacgtacaggtggatggggaaacaaaagtggtggatgggatcgtggcagggagcgggaagtcaatccctttgaagaagaggataacgctgaagaggcattcagtgagcaggagaatacaggaataaattttgatgcatatgaagacattccagtggagaccagtggtgacaatgtgcccccacctgtgaatacgtttgcagagattgatttgggtgaagcacttaatcagaatataagaaggtgcaaatatgtgaagccaacacctgttcagcggcatgccataccgatatctctagctggacgggatttgatggcttgtgcgcagactggttctggaaagacagctgcattctgcttcccgattatcagtggaatcatgaggggccaacctgtgcagaggccacctcgtggggtgcgtacagtgtatccgcttgcgcttgttctttctccaacgagggagttatcaatgcaaatacatgaagaggctaggaagttttcataccaaactggggttagggtagttgttgcatatggtggagcaccaataaaccagcagggagatgcaagggacacttacacagtggcttcaggggtggacattcttgttgcaactcctggaagactggtagatttgctggagagagctagagtttcactgcagatgattcgatatctggcattagatgaggcagatcggatgctggatatgggttttgagccacaaataaggaagattgtagagcaaatggacatgcctccaccaggtgccagacagactatgttgttcagtgcaacatttccaaaagagatacagagattggcttctgatttcctttcaaattatattttccttgctgttggaagagtgggttcaagtactgatttaattgtccaaagagttgagtatgttcaagagtctgacaagagaagtcacctaatggaccttcttcatgcacagagggcaaatggtgtacaaggaaagcaagctttaactttagtttttgtggagactaagaagggagctgattcgctggaacattggttgtgtcttaatggttttccagcaactactattcatggtgacaggtcacagcaggaaagagaattagccttgaggttatttaaaagtggcaacacccccatattggttgccaccgatgttgctgcacgtggtcttgatattccccatgttgctcatgtggtcaactttgacctgccaaatgacattgatgattatgtacaccgaattggaagaacagggcgagctggaaagaaaggtcttgcaactgcgttctttaatgacaacaatgcatccctggctagagccttatcagaactgatgcaagaagcaaatcaagaagtacctgcttggctctcacggtttgctgctcgctcttcctttggtgggggaaggaaccgtcgatcaggcggaccgttttggtggccgtgactttcgaagagagggttcttttagtaggggtggttctgattactacagtgcaggaaacaacagtagtgggcaattctggtgtgtatggtgcaggatacggtcctggggtaaccagtgcttgggactgattttcaacctgatagcattatatactgtcttgggtattaggtgcagacatacacctagggtgatttttctcccttttttgtcttctttttaagtttatggtctttaaatttatttttaccttggtgtttcaagcctattcattttgtgcggtttataatgctaatcactaaagggagatgtgggtgtgtatgtagcatcatttccgcatcagtaaaggtcgtgcagtgtcagtaggtgttggcaatggcgattactaacttattaggagttcttttaacaactttctgtactcttcattttgggtggttattttggtgggagaaaggttgtagaatatgcggtgggaaaggtggtggcatttctttaaagtcggatcttttatctcttgatcatgtttctacccaatgtatgttgtcatcttgatttccccattttggtgggctaaggttttgtaatattttagtggttgactgaaatgaatgaaaagtattcttgccggatgtttgtattgtgacatgttcattatgtttgaatactatatttagggagtgatgaacatagaccaatggcaaaggttatcttattacattgcaccacagatcgtgtgccacattatcaaacactgtttactcgaaaaa

SEQ ID NO: 14661 - DNA, 560 bp, Glycine max
  Clone ID: PAT_MRT3847_113245C.1
ggctcgaggtccttccttcctctccttctctctctagaaattccatttcaaagagatgctcctatctgcatcttgctcccattaacgggagttttctttttctggtgatttgaggttggtgacaccattaagtaagggatagagctgtgttctccagtcctggttgatgagggtgctattggtgtggttttgttgatgtaagaagctgaatattgttgtctacatcagaatgggtgctgtttgttgtgttgctgccaaagataaaaccatacaaagtgcatctcccagtgaaatcttgcatcggaatattcgacattctccgacatggaacttccggtgggatcatcgagggcgtgtagctggtgaagatactgctgtaacttggttttctaacgatattagtgggaataatggattggagaataaaaatgaatcctcatatgtatcagaggatggagacccgttgcagaattatcaaattcaaaggatagattgcaaaatctccatctctgaagaactgctaaaatgtgataattcattttgatcaactattcaaggat

SEQ ID NO: 14662 - DNA, 398 bp, Glycine max
  Clone ID: PAT_MRT3847_113246C.1
agagagaagagggagcacatccatggaaccgcgcactaagggctaatgtaatattactatataagggcgcatttaacactaaccttgtggggctgtgaatacaaggacccttgctcaacgtattctaggaccctctaggatgactcagggactgtggcacataactctattatttaagaatactaaaaaaaagggaggggccatggtcaacactaacatgctggaccaacattgggtccatcacattttagtgttttcaagatcagggtgaggaaatctaacaattgcggctctgcctcttatgtgggctagttgttctccaaagacatgcatggacgaaaaaacatgggctgagcctcttgaatacttaaaagagttgacccagttaacctactttt

SEQ ID NO: 14663 - DNA, 215 bp, Glycine max
  Clone ID: PAT_MRT3847_113247C.1
gacagcactgtactctttgcaacacaacatataatgtcttcccagagagcgcgttttattaaacgctcttctatgaaaacccccatatattatgttttttcattttaaattacgcttcttcgatctatagatcttcgagttgaaaaagagtgagtgcattttaattcacattcgccaggcctttattcatgttggaaacgcctgcttggagcttt

SEQ ID NO: 14664 - DNA, 138 bp, Glycine max
  Clone ID: PAT_MRT3847_113248C.1
gaatcagaaaactaaagagggttttagctaacgattatggggtctgctagggaggttggagctatcgctgatagagcgtttatgtgccgttcatcgattagttcggacactaaaaaacccgttccgtacaattggagc

SEQ ID NO: 14665 - DNA, 264 bp, Glycine max
  Clone ID: PAT_MRT3847_113249C.1
cccacgcgtccgcccacgcgtccgcaaacagatgcctctaatttgtgcttaaacatgttggattgcttgtatataagttttttaatgtcgtcgaaactagtgagtttgttcttgtggagcaattatgagaagtctatatacacatatagccaaacagatgcctctaatttgtgcttaaacatgttgcatagtttgtcttataaactaaagaaatattcaaaaaaaaaaaaaaaagggcggccgcccttttgttcctttttttct

SEQ ID NO: 14666 - DNA, 270 bp, Glycine max
  unsure (1)..(270): unsure at all n locations
  Clone ID: PAT_MRT3847_11324C.1
agtgtgtccattacttctaattaattccgtgttcggagttgtccaaattcgattgagttctccttcttacttaccaaaagtgatttccgtatattaaaactgcttttctcagtaaccacttataaganaagaaaacaaaaggaaggaaaaatgaagtttctccctaagttaaaattagcttattcataaattaaaaccagcttttgaacaagttaattagagaatttctacgtattagctttatcataagttngttttagcttttggggc

SEQ ID NO: 14667 - DNA, 290 bp, Glycine max
  Clone ID: PAT_MRT3847_113250C.1
cacccagggagacgaaagggaaggttttcccacatgacccacatggctcaataaggcaaatgcaacaaagatgtataagacttgcagacgataggacgtcggatgaccccctacctcggcgaaaaaataaggcctaaacccagcaagaatgaaaataagaaaagcctaccttctagagaaaagaaacgaaggaatctctgatgctcaatattgctggacaggctataaagacatgccctctacctcgcgacaacaaaaaggcaaatcactaaacggtacataatttcaac

SEQ ID NO: 14668 - DNA, 181 bp, Glycine max
  Clone ID: PAT_MRT3847_113251C.1
gctgacacacatccgctcctgtgttctgctgataaataacgaggtctcaatgcagcatatttaaagggcggtatgaccattatgcctataactcacgcaacaccacttccatcaacatgggaatgccaacatcaacagcctgggagagtacacacccttacacgttaaggattaccagata

SEQ ID NO: 14669 - DNA, 274 bp, Glycine max
  Clone ID: PAT_MRT3847_113252C.1
acggctcgagaagacgacagaagggatcgtacttccttttctactcattttgctttatagtggggcaggtcccttctctattaaatgcactttcaacgacgactaaaatattttcactccctaaagacatctttcccattagttgtaaaaatggcttttttttttttcgtaagtcgttgaagatgtatatggggctgttcccgatgatgggagatttacttttttaccgtatagccttgtgtatattaaatgacttttttttttccattaattc

SEQ ID NO: 14670 - DNA, 216 bp, Glycine max
  Clone ID: PAT_MRT3847_113253C.1
gctataatatctattaatggctttacacagttaccgtatcacttatgataggttttccagaaatgacaaggttgctaaaccagctgcccagacatcattatctagcacatgctcttgtggagagtgacttatagttttgtaattgaatttttggttttagttatcctgttatcaggaaacggctccaagttgttatgcatgttctttgccagtgtc

SEQ ID NO: 14671 - DNA, 352 bp, Glycine max
  unsure (1)..(352): unsure at all n locations
  Clone ID: PAT_MRT3847_113254C.1
taggagaaaagctttttttaatttttttcccaaaacaataaattttcattactcgaacattaattacgtatacaagggaaaagggaattaaaatgtttttgactgggggatacactgaaaaaagagaatatactacgttactcgaaaaaaatttaaatnnagaggggtannncnccaaanaaaagaggttaattaataaaaccccccacttccgagggacccgggggggcaaaattattttacacgtttacattaataaaacgaaacacttagaccaaagactacgtactgtcctggagtggaagatgtgagcgagtttaacagggacctgactaaggaaaggaatggaacg

SEQ ID NO: 14672 - DNA, 202 bp, Glycine max
  unsure (1)..(202): unsure at all n locations
  Clone ID: PAT_MRT3847_113255C.1
ctatcttttcnaacatcctgctattctntnatacactgcagattctagaggagcgtggaattgacganttgagtggccatgacantataagccantcagaagctcgcaccctccaacccccanngtccacaagcagantaaatnnaatcanaacaaccanaagnaaaggagntcagattccgaggaagatggtccgctctgg

SEQ ID NO: 14673 - DNA, 628 bp, Glycine max
  unsure (1)..(628): unsure at all n locations
  Clone ID: PAT_MRT3847_113256C.1
gcatgcacgcgtcgcgtagctcggtattcggctcgagtgcccatctttcccctaatgcttggnggcgggctcagcccctccggcgaggaaggatcataaagaaggaagctcctcccgtgtgcgagaaggaagaggacaaaagacggcatggggagagggaagaccgcccccacccagaccgcgaccccgccccgcctacacgtcccccccctccatgcggcgaatcgcccagcccctcaacgccccctcccctcccgctccctgtcccccacccgccgctcccaccctcccactcccccccgcgtctccctcccgcgcttctcccacccaggccctggcctcctccccccccccggctcccttcacccccccatccccacccccccctcaccaccctcccgatgcgcccccccccccccggaccctacctccccagcccccttccccccccctttccccgctgtcactcccaaccccctctcccctcctccccacgatccctggttcagcccccccatgcccccaccttcccacttcccccccccccccccacctaccccccgtatccccccctcccccctcctccccccagaccccccccttcccccccctctcctcggcccccccc

SEQ ID NO: 14674 - DNA, 472 bp, Glycine max
  Clone ID: PAT_MRT3847_113257C.1
ttttttgggtctatctgctttgggcgttgggtgttcttgctgagatgagtgagatcaaatatggctatccatacccagctcaaggtccttatcaggggccgcctccggtggcggcacctccacagtactatgctgctccaccgcctagaagagaaccgggtttccttgagggatgcctagcggctttgtgttgctgctgcctcttggacgagtgctgctgtgacccaactattgtttttgctagctaatgcttatgctatgactttaccatacagggaaagacacttattgtaacaatattttgatttaacagttgctattgtttagtggatcccatcaaattattacgcatgaatgagtagtaatcaatatgttgtttttttcatcttgtattgttatatttaaatgagtattttcctttggtcaaaaaaaaaaaaaaaaaactcgagcggcaccagcggcaccagctcgt

SEQ ID NO: 14675 - DNA, 425 bp, Glycine max
  Clone ID: PAT_MRT3847_113258C.1
ggcaaaaaaaaaaaaagcccccttttaaattgggtttgggggaagggaaaacccatttttactttgcccccccccttaaagtttttttgtttaaaaaaattttttaggggcgaatacccccccccaatagatccttctaaaccccttaaaagtttatttccttaaggcaagttgcaaagtttttttttttgggggcagggttgggttttttttaacccttttggggggcaaatttaataaaccctcacaattttagggggtttcaaaaacggttggaacaacctaagggaaactgtttccccctgaatccaaagctgggggaagtcccattgttttcaaacccgggggggttgttttttgccctaaaaaattttttgccccaaaggggggccccttgttgggaaccacattaatttaaactcttt

SEQ ID NO: 14676 - DNA, 284 bp, Glycine max
  unsure (1)..(284): unsure at all n locations
  Clone ID: PAT_MRT3847_113259C.1
acgaantccgaagcntngttnncggcaaancaaatctgtcatagcgatggcgcctacgaagctacttgcgtatttgcgcttncagtaactcctgattttngccatgcgttggggccgaagccgatgtgtccgtcganggancnactcagancctgatacntccgcnatcaagatccanttagatcaactcaattccaagatccanattctcgagtctcanatcagtgaaaagttggaagaagtgaanaagaaggacaaaattatagcaganaaagaaaattcca

SEQ ID NO: 14677 - DNA, 302 bp, Glycine max
  Clone ID: PAT_MRT3847_11325C.1
aaaaaaaaaaaaaaaaaaaaaaaaaaaaaaaattttatttaaaaaaaaaaaaaaaaaaaaaaaagggagggggaaaaaaaaaaaaggggggggcggtaaatataaaaagggccggcctttttaaaggtgccactctatcgcacgcgtccttgcaacagaaaactttttttttagggtcccctaatttcatttaactgcccgccttttaaaaccgccgggactggaaaaaccctggcctttccaaacttaatccccttgcaacaaatcccctttttgcaaattgccctattttcaaaaaggcc

SEQ ID NO: 14678 - DNA, 305 bp, Glycine max
  Clone ID: PAT_MRT3847_113260C.1
agttaaataaattggtgtcttttcagctgcacttcagctacactatatgtattgaactcattttgaagaaaaggggacttttggcattttgaggaaatacatggatcttgtgagagcttctctctgggttcctggttgaaccaatctcaaacttatcaagggtgaacccttgtggcgtctacccttgacgtatcgtccatctctggaaggggcatcatctgatgccttgacctttaccaagcggtctgcgcctaataaggcgcacatcacttactaaagagggcatgggaaaccaaatgttcttt

SEQ ID NO: 14679 - DNA, 311 bp, Glycine max
  Clone ID: PAT_MRT3847_113261C.1
gccaagcgtacggtagagtccagagcatcacgaggatcagcacgacactgggcatgcgcaagggctagcgcaggtctggctctagaactgactctgaagacctattggaggaactgttgctgacaccgtgtccgaatcgctgtgatcctctacgggctcaaatacgaatacatgctcatggatgtgctctctggagatcaatctctccatgtgaatcttgagctgaatgctgtcggtctagtgcacgatctagtggatgaccacgacgctctctacgacactatggacatgattaagtattatgaagacaa

SEQ ID NO: 14680 - DNA, 665 bp, Glycine max
  unsure (1)..(665): unsure at all n locations
  Clone ID: PAT_MRT3847_113262C.1
aggaaccaaataattataagcgttgtatatatgttagtggcaaaaagaagcaccctcctttccaacaagaaaaaatctggacaccagagacactatttattggacattattggtagcccactaatgaaagaaagaaaggaaaattaaaggatatatcttctatctccctccccccatatgatgattgatgcatgggccatgcctccattaaatgcatctacctaaattaattaactttatccccattaagtagtccctttgtctttgtgtacgtaatgagtgttgcgtggcttttatatgttggatatgacatgatcaaggatacgaatattatgtaagaaaaaaaagatatatttttaatttaaattttaaaagggtacgtagtcatttctgtgtgtatattaattataataatatttaccatatcgttgaggattactgatgaagtcgatgtgcatctgttgcgtgttgactccaacgaagacattggaaccaatttcgctgttgagttgttggataatctgaacaagttgagggttgaacaaggctgcggctcgctgcngctcagctgagcagtcaccgttggtgcttcgctgggccaattccgctggaacacaacccaatggaccagttcccgttcccagcaccctacgggctccaatttc

SEQ ID NO: 14681 - DNA, 1699 bp, Glycine max
  Clone ID: PAT_MRT3847_113263C.1
gttagtttcaacatcgaccggtcgtgatgctttttcaccccattacacaagaactctccaaggatcccacatcccctgaaattgactttggttgagaaattccacaaataggggccaaattttcttccgccatattccacaagaactctccaaggatcctccttcccacgagattctttggtgggaaaatccaagaggtttgaaatttcaaggcagggaagatggattatttcaatgcaccaggaagaaaccatctctttgttccggggccggttaacattccggaccagatcatccgggccatgaacagaaacaatgaggactaccgttctccagcaattccagctatgaccaaaacactgcttgaggatgtcaagaagattttcaagaccataactggaatcccatttctcatccctacaactggtactggtgcttgggagagtgctctcacaaacacactgtctcctggggatcgaattgtatctttcctgattggccaattcagcttgctttggattgatcagcagcaacgcctgaaattcaatgttgatgttgtagagagtgaatggggccagggtgctaagcttgatgttctggaatcaaagattgcttcagatacttcacacactattaaggcaatttgcattgtccacaatgagactgcaactggggtcaccaatgacttggccaaagtgagacaaattctcgattcctaccggcatccagccctccttattgttgatgggatgtcttccatttgtgctcttgatttccgcatggatgaatggggagtttgatgtggcaataactggctcccagaaggccctttcccttcccactgggataggtattgtggttgcaggccctaaagctattgaggcctcaaaacatgctaaatcacttagagttttctttgactggaaagactacctcaaattctaccagctaggaacctattggccatacactccttccatacatttgctgtatggtctgagagctgctcttgatctgatttttgaggaaggactcgaaaatgtgatcgcaaggcacagtcgtttaggcaaagcaaccagacttgctgtagaggcatggggtttgaagaattgcacccaaaaggaagagtggtacagtgacactgtgactgctgttcttgttcctgcttacattgatagtactgaaatagttaggagggcatggaagagatacaatttgagcttaggtcttggactgaacaaagttgctgggaaggttttcagaattggacatcttggccacttgaatgagttgcaactgttgggatgtctagctggtgtagagatgatactcaaagatgtgggttatcctgtaaagcttggaagtggagttgctgctgccagtgcatacttacagaacactattcctatgatcccttccaggatttgagtcacaaatcattcttgtctttacttcctttttctgctctttcagaaattctgtaaaatatatattaccctcttttacactcctttgaagatgaacgtactttctactttcagctttaatgcattgcttcttttattgtcctgtatatcaaaaatcattgcatcttatgatcttatttgtcaaaatgttatggtcatcaaattcatcagcagcagggttattgtattgtatatggataaagagaaatgctagtaacatgcacattccctcc

SEQ ID NO: 14682 - DNA, 368 bp, Glycine max
  Clone ID: PAT_MRT3847_113264C.1
cttcactctttataccaatctattttgtttctataacacatgacctattattgtgcgtagggggtgaacattcatccgcccgctcttgatgaaacacggttaaactggggtgtgagcgggaactaaccactgacactccttgtcttacaacagttggactaggcttagctacggcttctataatcaacaagggatgtgagctagcattctctcttgactggcaaatgcagatatgcattctacaaaggaggagagggtttggctactgactgacaggccggctccatacgaaaaggcaatggactacatagaggtctctctggctatgtatggctcatgtatgtagctcttcttgctgttccatgcat

SEQ ID NO: 14683 - DNA, 377 bp, Glycine max
  Clone ID: PAT_MRT3847_113265C.1
cccacgcgtgcgatctgatgtcgtcaagagagtattgtcaattgaagatccctctgcacaggatggggttcgacttgggataaaggactacccttatgctgctcatggacttgaaataaacaatgctattaagacatgggtacatgaatatgtatccttgtattacccaacagatgcagctgttcaacaacatactgaactacaaacatacaggaaggaagctgtggacaagggtcatggtgacttaaaagaaaaagcttggtggtctagaatgcacacaacttattatgtgatttcaatcatgctttattatcgtttggacagcttccgctatacatgctgctgttaaattttgaacaatattcttatgggggctt

SEQ ID NO: 14684 - DNA, 493 bp, Glycine max
  Clone ID: PAT_MRT3847_113266C.1
tcggaattcggctcgaggcaagcgggaggttgtttttacatcaaacagaatcccaaataatccattaaaatgagaatttataaagacatttttactggtgacgaaatgttttccgatacatataagattaaattagtagatgaagtaatatatgaagtttatggaaaattaattcaacgtagacaaggtgatattcaacttgatggggcaaatccttctgctgaagaagctgatgagggcacagactctgctgtggaatctggagtagacattgttctcaatcacaggttatgtgaaacttacgcttttggagataagaaatcttacaccgcatatttaaaagattacatgaaaaaattagttgccaaattggaagagaaggcacctgaccaagtggaagttttcaagaccaatatgaataaagtaatgaaagacatattaggaaggtttaaagaacttcagttttttactggagaatccatggaaatagatg

SEQ ID NO: 14685 - DNA, 523 bp, Glycine max
  Clone ID: PAT_MRT3847_113267C.1
gctgctcgtccttttttttttttttttaaaatttttacttgtattgatttattattagggataggcgtgtaatgattgatcctcatgcataactgaagcatcaaccaatgctggctttgatgccggcgcataaggaaggttggccaataatatacttgaacggttacatactggcgataaattatgcaaatatgcaaccagccccatcaacaaaacgacctgccaaaatataaggcaaaaacctctagggggcaaaacatacagctaacgtaggaagcgacggtgaccttggaaaccccccggcgtttacacaacggctaactcagggcttcgcgggaaaagagccttttatagctggaccataagctttagctcccaaaacaggagaggcagcaacccatgcattgggtccagccaggaacaccttgtaagccgctgctggaacaactacggcatcaacgtcaattcatggatttactacctgggccgacacaaaggggacaaatccagatctgggtacacg

SEQ ID NO: 14686 - DNA, 419 bp, Glycine max
  Clone ID: PAT_MRT3847_113268C.1
gtggaattggcctcgttgtgtttgagaaagacagcaaaaaccccactacgaagaagatgtttgattgcagtgattcttctgattgctcttccttctgttccactgtggagagaatcaaagatggttcttatgtgattatgggaatcaaaggtgacgtctttaagaccttaacttctgactgtaaaagatgtatctccaccctcggttcttctgaaattaaccgtttaagtaacaaagatagttgggctatgatggtcaaaaaaggatcccctcaaactcttctcgagtaccgaaaacaagacctcgtcaccttcaaccaaactttttaattggtaactgaatgtttttctaactttattgacctcttttctattgttaattcaaatagaactcaataaaaattgcactcattcaaaaaa

SEQ ID NO: 14687 - DNA, 389 bp, Glycine max
  Clone ID: PAT_MRT3847_113269C.1
aacaatagctaccaacatcaccatttatagcaacccagggcgtgtgctcatctgatgagctagcctaccctgggaattaatctcagaccgtatcctgcagagtgcaccaggttcacctataaagagtccactcatacctaggcgaaaacacggtcataggtattaactgagagaattggaaaacgcttcacattactcctcattgtacgaactgaattgataaagtgtttagcacagtggtgcttatggagtcgattaactgctattaactcgagatgcgataactgccaaggatatagggagaaacatgggaagaaagatggtgactgaatggtgcatccttgcaggagagaaagaattgggaatggggctcatggtaggataggctt

SEQ ID NO: 14688 - DNA, 304 bp, Glycine max
  unsure (1)..(304): unsure at all n locations
  Clone ID: PAT_MRT3847_11326C.1
gaagaagaagcattgtgcgactgaaaaaaggtcttagatcgtaaaaactaatcactactaaaacaagagatatcgtatatggctcctcccaaagctaatgggatcgtgtcgtccaataccgtcttcannganatataaatctattgacctttgtgcgtagatttgaacaagctactagatgacctatgtgctaattactaggcgctcttaatagactcttaatattatggaaaggagtttgaaataccattaggtgagaggactgatcgtctaacctagcataatatgcttatcggcagaaacc

SEQ ID NO: 14689 - DNA, 312 bp, Glycine max
  Clone ID: PAT_MRT3847_113270C.1
ggggaaggacaaaatgcttgactagagaaagagagagagagagcttccaatcgaaactcataactggggatatacggggatcggaaatgctattcctaggttccactccatcaatcaccgtgttctcccctgacagacatctcttccaggtcgagtgcgccctagaagctttccgctagggcaactcctgcgtcagcttacgcagaacctacaatgttgtcctatgcgtcgagaagaaatccaccggccaactctaagagtctaggtcggggagggagacaatggatctggacaaccacattgcgctttcct

SEQ ID NO: 14690 - DNA, 377 bp, Glycine max
  Clone ID: PAT_MRT3847_113271C.1
cacacaatggaaatggattgtcgctgcacctagagattcaattcaacacttcagaggtagtgtcgattttggagtttctccgcgtgatttcatgtgagtatgttttcaacaccgcggctgatctccttcttatttgaatgatgcatttgatttagcgctatcgacccttcatggtttatcaatcttccctcaagaaattttggtaaaattttgatcttttctaccctttctatcaacccttcttgctgcatgttgaagcgtggatacataccaaagccatggattggagcacagaattgcggggtctctgtgtttctcatgtttttcacattgatgcctatgttagtgggtttccttttagtatttcattatgatag

SEQ ID NO: 14691 - DNA, 282 bp, Glycine max
  Clone ID: PAT_MRT3847_113272C.1
gttatcagaacacaactcaaaagccttttgtgcaagaatattcccgaatgcctataaagagatctggaactgttgattgataatgcgatgccaatctttctcactttgcactacggcagctgacattacaatccgtccctcaatgcttgatactatacctacccgcacacaactgaccttcattgaaccaattgccaggcattttctacttatgctgagcaatcacttagtcagcttctcttaagtggttacatggctacccatatagtaccgcttacccat

SEQ ID NO: 14692 - DNA, 496 bp, Glycine max
  Clone ID: PAT_MRT3847_113273C.1
tgacccaaaaaagggggcagtgaaggtggaaacccaaaaaccaaaagaaaaacttctggaatccaaaaacaagccaaaaccaccctttttctgaacaaggaacagcccaatggccctgagaagccacgggaggaaaataatggaagaacttatttttgcaaaaagggttgcccaattcccaaggaggggccacgggggggttggggggttcaggggaaggggttcatgggccaaggttccccttaaacagcctccggttccggtggttgggggggacctcctggaaaggtttgaaattttgtccttaaccggaattttcctaccgggcccggttcctccagaaccaccaggattaaccgggattctggttgaagaacaaggccagtaatgggaaggaatggtggtggaatcttaagttgcacaagaaccagtaagggccatggttgcaactttggttatggcaccgaataaaaaatttcaacttaatgagaataat

SEQ ID NO: 14693 - DNA, 427 bp, Glycine max
  Clone ID: PAT_MRT3847_113274C.1
ctcgagccgattcgtctcgagctcgagccgctttgagggcgtacttacacccccagacgatgattaagagtcattcaaggaactattataaagggggccttggccatacttatatttataggacaacatatgcatcatgcatcactatgtctacctgtatagctccttccacacacatgttattatttttcttgatcctttctcttaccctttataccaaaatttaagcatcaatattatcatccgtataccaacatcctcatgcaacaaacattagttcccttacttgaatcaatactgatcccaaacaggcaattcataccccagacacgattgtaccgtctgactaccaacatttatttatatggaaacatactgttaagattacactgtcataattaaaggctaaggttgtcctcctctactt

SEQ ID NO: 14694 - DNA, 445 bp, Glycine max
  Clone ID: PAT_MRT3847_113275C.1
gaaccaaacaccaaatactatttgccatgatagcctttatttgatgacagcttcctcttaaaatgttgaggcggcttatgctcctttacataactctacaccaaacattgacgttaactatcaagatttgttgtccctagacaagcacaaattggtcacattctacatggcaacaattacctcagaactgcttatctttcaacaagccaagcttaactaaagtacatgtgattggagcataggtatattttggatcaagggaataatagggataatgtgacataatatacataatatattacttacatgcattgatcatacaccacaaggcacagactaaatatgacttaaattctgttatacctaaaaaattagtcatttttggattactacctaacattcatatttattcaacccagtatctgaactaagattagggtttaat

SEQ ID NO: 14695 - DNA, 457 bp, Glycine max
  Clone ID: PAT_MRT3847_113276C.1
tagactcttaaatgaatttatgtgaactaccaattgcagaagtttgaaactgtcctcaaatataaatgctcctcacaaacaggtgggtctgacataatccgataaacatacactaattgcgctcagcgcgcacagaggacaggactgttgttgggatcgccttcaatgattactttgagcaacacccatatatgtataagcaagctcttataatattttatgccaacctcgggaccagatggcttatgctttaataaccatcatggcgcctgcttactagtagctgtttcaactgggacgctcttgacgatacccgctataggcatgcctactgcttcgattaccactataagcaaaaatgaatcggcagattatcaggcccagtgctcggcacaggttccaagcgaattaactatctacacttgaaatgccacggctgccaaatgcatccccaaaa

SEQ ID NO: 14696 - DNA, 252 bp, Glycine max
  Clone ID: PAT_MRT3847_113277C.1
cacggatagaagtgaacgttaaggttaagagcgttatcggcgcataaatttttgcactcggggttgcagtcaagattcctgttccaaaacagactgcaaatacatatttacagttacatctagccatgcaaaacacaatgcttctattgattgtttggttaggaagattagaaaattcccttggcagactgagtgaaccttatatgcacaaattgaacttattttcaccattaccaaaaaaaaatttttgtc

SEQ ID NO: 14697 - DNA, 278 bp, Glycine max
  Clone ID: PAT_MRT3847_113278C.1
aaagaatacaaaccttgtctttgaaccagctcatggatcttccaccccagttcatccgtctagccaatgatatgcctgagagcaccatagccatagacggtgtcactgtgcctctcatctcactgtctcatacatatcatctcacggtgacggcaatagctgaagctgctccatagtggggatcttccgtcatattcgcttatggtatgtctacaaacatcgatccaacgttcgcaagtggtaggtacggtagtctgtgccctccctcaagaagagaa

SEQ ID NO: 14698 - DNA, 437 bp, Glycine max
  Clone ID: PAT_MRT3847_113279C.1
gcacacgtatgcaagcacggatcccgaatagcggccgggataaacgggttgactaaacaaacgttgtacaaatttttttaaggaaaaaagcctacaccataggttgttctgatgcaagagaccgagcaccatggcatgctctcaatttacaaccattgcatcaaaaactgtaatccttaacaaaacgactaatcagtgacggcttcatgttcatcctacccccacacttaatcaaaaccgaccaatttaaactaataaccaactcaaactcttaacaacccaataccatgcagcaaccacacgctttgttgcatgcttctgcaggagtcgagactccgaagttgggtgaggacaccacgagatcactggattcggtgaaagtgtgagagctgaatggaaacaggatcacaagctccgactggaggaacgataggaaa

SEQ ID NO: 14699 - DNA, 359 bp, Glycine max
  unsure (1)..(359): unsure at all n locations
  Clone ID: PAT_MRT3847_11327C.1
cgcttggatgctttactagcgggcggtcgtttcataattttgttttttnccccacccgccgggcaaaaggggggggtttatttgtactgtggcatggatttaccaacacagtagcaaggcttcaagccgagcacgttttcgggaatgtaaaaaaccaaaaactggctccccctgcacgggagaaaacatcaacagtgcaaaaaagagctaatgctgccccaacaagaaacactgctgggttgagtacccgcttaattcccacctctccttgagctcttgggcaagacaccaagttggagctaaaaataaacattcaggaaaaaggcgtagacagggctctttggaggaacaccttaaag

SEQ ID NO: 14700 - DNA, 380 bp, Glycine max
  Clone ID: PAT_MRT3847_113280C.1
aaaatttagaaacaaaaacatgttggtgaaggtgtacggtccaacctatggagcccccaagagggtgctggtgtgtctgattgagaaggaaattgagtttgaaacagtacatattgatctcttcaagggagagaataaggaacctgagttcctaaagctgcaggttcaattttaactttatttgctctatcacacactgtttgcttcactttgtttccatttttttttataatatgttttcatgttcaattacacttgtgtctaataaatctgcagccatttggatcacttcctgttattcaagatggtgattatactctctatgaatctcgtgcaataatcagatactttgcagagaagtataaagaccaaaggacaga

SEQ ID NO: 14701 - DNA, 386 bp, Glycine max
  Clone ID: PAT_MRT3847_113281C.1
ggcaaatctcaagagagtgtgagtgaagccattaacgcctattacagcgtgtacctggtgggcaagtccttccaggttccagaagtggagcacatgggtcatattctacttgccttggagatccgcggtgcacagacgtactggcagatgccgtctacctctaacatttacgagcctatttatgcggccaacaagatgacgggtcaagtcgctgccacgaaagtgtcttatacgacgtggtttggaccacaggtggagcatatgcacctgatcaacatgatccccttcacgccgattacaggcgagttcttaaagcctgcgtatgtccaggaggagtacccaattttgcagcagcaggcgtttgaccgagcaaaagaccctatcga

SEQ ID NO: 14702 - DNA, 260 bp, Glycine max
  Clone ID: PAT_MRT3847_113282C.1
gacatattcaagattatcatcatcatcacactacgtatccttaacgagatttcctttgtcattgatcatcatggcattcatttaacgaggagagaaaaaagaaaataaacaaaacagacaccctgacacgaccatagataaattatgagcagaaaacaagtggcaaagcaggcaaaagagaatgcatggttgttgcatttgcataccttgttttaataatctctgtgattattcttaaaaggagagcatgcaagaaagaa

SEQ ID NO: 14703 - DNA, 421 bp, Glycine max
  Clone ID: PAT_MRT3847_113283C.1
gaatacactactgatccttgcttcttttggagctgctgttgctacccccaccaacgacggtgacaagatcgctgggagctacacccgtgaggagaaattcgccccctaccaggggtgcccgaatgcaagctataacttttgcggaggctccctcatcagtgaccagtgagtggtgtccgcggttcactgctacaagatccgcatccaactgagactcggagagtacaacatacgatctcctggaagggaatgagcaattcatcaactctgccaaagacattcgtcatcccaactattacaatctggatcctggacaatgacatcatgctcatcaagctctgctcacctgaggtcctgaatgcccgggtggccaccatatttctgaccaaggcctgcgcaacccctggcacccaatgcctta

SEQ ID NO: 14704 - DNA, 388 bp, Glycine max
  Clone ID: PAT_MRT3847_113284C.1
aaatcttaacccttaatttttctatttgtggaatcaagaacaaaaaagaaatattaccattccaaatgtaaacataataataacttgtaagtttagctatcccaagcaagggtaataatgcgacgttcttccaagtcttctgagtctcaagctggaatatttttatggccattggtcatgttcttcatgcattcaaatcgaggagcctttttcaccgaacttggtgctgccatagagcttcaaatagtccccataacggaaattgcttgggtacaagagcttaggagctggggaaataatggcatctccaatgggattataaaaggtagcaatggaggttctgcttccactattgtcaggcatgaccctatgcacaacacttttatat

SEQ ID NO: 14705 - DNA, 443 bp, Glycine max
  Clone ID: PAT_MRT3847_113285C.1
ccccaaacaaggacaaggggtaaacaaaaaaaaaggggtgggggggaccataaaaggaaaacattcaaaaaaaaccaaattttcctttttaaaaacaaggaacacaaaaaacttttttaattaaggcaaccccctcaatagcgggaaaaaaaaaaaagcgggcccacaggggcaataaactttaatcatgggaacataaaaagggcctccccaaaaagttttataagcatccccccccaaatgggtggaccacgggaccagttgggtggggcaaaaagggaccatcccggccccaaatcaaggaaaaaataggggctgaaagggtggcccccaaccctacaaggggaggagcccggttttgcttccccatgaaaccttgggggaaggggcccaggggaccatggccccaaaaggcaaaaaccagcttcccaaacaaaggcccc

SEQ ID NO: 14706 - DNA, 655 bp, Glycine max
  Clone ID: PAT_MRT3847_113286C.1
cccacgcgtccgtacggctgcgagaaggcgacatatttcggatatgaacggtgaaccggatcccccttcgaagtgaattatattgcagcgaatcacacacactctgaacaacgcccaccatgcaggccagtgataggtttaacatcaattcccagcttgagcatctccaagccaaatatgttggaactggccatgccgatttgaacagatttgagtgggcagtgaacattcaacgagatagctatgcatcatatattggacactaccctttactgggattctttgctattgctgaaaatgaatctattggaagagaacgctacagctttatgcagaaaatgctcctgccttgtggtttgcctcccgaaagagaagaagattaaggattacatctggattacaaatggatcacacaacactgttaatatagcctccgacagtttgttgtaccgtgttatcttatcaaggaaacagatggttgtgtgaccttgattagcttgtggatgctgaagctttagttgttatggatcttggaaattatgtctagtttattctgaaatcttaatgttgccgtgtttcctatatgatggccctttaaattgaatcaaatttgtgtttgcatcctggaaaatgtgagtattcttgaactcgtact

SEQ ID NO: 14707 - DNA, 409 bp, Glycine max
  Clone ID: PAT_MRT3847_113287C.1
aaggcaccctcattggctccagaaccttcaagtgatgcagcaaaggcgcctaaagccgataaggacagatcatcttcttcagattcgtcacgggttaatcccactgaacagaactctggcgccaaggagatcagtgtttatggaatgtgggtgtcacttggacttgcattggtggcaacagcgatgccaacttgatggagaggggtggatttcacagctatcaatttcgttctttaaaacacgcatgtatctttatatatgtggttgtcttgttttgggctttgtatgtgttagcctaggaagtgtatctctgaactatgtaaaaggtttgcatgattgtgctgttttctgttttcataaaatatatagagctacgtactaattctggcaaaaacgaaaagaaaagggg

SEQ ID NO: 14708 - DNA, 867 bp, Glycine max
  unsure (1)..(867): unsure at all n locations
  Clone ID: PAT_MRT3847_113288C.1
gtcaaaacggtggcaaaagacaaccgaaaggggataccggctcgaggctcttttcctctttccattcacttgttctgtggatgaacggtgaaccggatcccccttcgaagtgaattatattgcagcgaatcacacacactctgaacaacgcgcaccatgcatgcctagtattgggttctagcagcgtatttcactcaccatgcaggctagtgataggtttaacatcaattctcagctcgagcatctccaagccaaatatgttggaactggccatgctgatttgaacagatttgagtgggcagtgaacattcaacgtgatagctatgcatcatatattgggcactaccctttactgggattctttgctattgctgaaaatgaatctattggaagagaacgctacagctttatgcagaaaatgctcctgccttgtggtttgcctcccgaaagagaagaagattaagaattgccatctggattgcaaatggatcacacagtacagttaatatagcctatgacagtttgttgtaccatgttatcttatcaaggatacagatgggttgtttgaccttgatctgattagagattgtatcatcatctttctttagcttgtggatgcttaagctttagttgttatggatcttggaaattatgtcaagtttagtttcttcttaaatcttaatgttgccgcgtttcctaaatggtggccttttaaaaaaaaaaaaaaaaaaaaaaaaaaaaaaaaaaaaaaaaaaaaaaaaaaaaaaaaaanntttttccccccctaaaaaaagggggggttgggccccccccgaaggtttggtaattagggttttcccccccccggggggagccgagccccccaaa

SEQ ID NO: 14709 - DNA, 355 bp, Glycine max
  Clone ID: PAT_MRT3847_113289C.1
gcacagagcagacgaccaaacagccaaaaaaaaccaaacccaggacagggcgcacagacacccgaacagagacccgacagaaagaccaacacccacggcaccaggagaccccaccaccaagcaacaccccaaacaaacgactaccaaaaacaaaacaaaaggaaccaagaggacagcccaaaccaaacgaaaccaaacagcaactgcccgaacaaaagaggggagcagcccaggcaaccaaaaaaaaaaccgaccaaaaactgaagaagagcagccagaacccaaacacgacaacaaggaggcaacacagggaagagacacacaaatacccaacagaaacagaaacagagcaagg

SEQ ID NO: 14710 - DNA, 567 bp, Glycine max
  unsure (1)..(567): unsure at all n locations
  Clone ID: PAT_MRT3847_11328C.1
ggtgctatgaatcaatgagggantccgaatgcacgactacgtatgctcgcattcttggttgagattacacgatcaactaaaaatttatccatcaaaccctcgaacttcacactgcggacactcttaaaaatagggaggaagttcaagaccaaggaaaatcgatgttttgcttgaacctcacaaagatggtgtcctcagaacctgtgccttttcgctccctgcaatctgttctttcggtctgtgctcagccattttgaggtccattgacaataacccaacttcatgcactacttaacgctcgttagccgcccaaattcagtgtggtctgagagaacttagaacccgaattgttatcgtgaagaacactcataaagataccgagggtgtgaagcttgcggctgtggccaaagtgagaagagcttatgaagctggtgtgaacggtagacccttcttagagaccctcgttggagtcctctacaacataaacgagcagcttctaactgaggacgtagacatccctctaacaaaggttatgcctaataaaaaagttgcacttgttgtggtcac

SEQ ID NO: 14711 - DNA, 282 bp, Glycine max
  Clone ID: PAT_MRT3847_113290C.1
gcaagccctgcctttttttacttgaacaaggtttttccaaatccccaaccttttttaaagggtgttatttttaaaaccccctgaaggggaatccataaagcttccaaaaattaactttttggagtttaaattaaaaaattccttaatttaagaccaatttacaataaagggggccccaattataaaaaaaatttttatgggaaccacttgaattaccgggcttaattttggatgccttccattctgaaaaaaagccctttttttttttggaccccggggttc

SEQ ID NO: 14712 - DNA, 459 bp, Glycine max
  Clone ID: PAT_MRT3847_113291C.1
gataactgctaaataactgtgcttagctaaaagagaataaagtgaaattatgtttaaaaataattatttagcagttatttatgttaatttgttaagaattaatgttttattaaatcatggctgtagatataaaaactggagtgacaaaaagcaaaaaggtggaaaaataacgaagaaaagaaggaatcagaatggcccagcccaatgtcgcgctcagcgcgcaactcgctctaagcacaccgagaattagcagtcgcgctaaacacacagcacgcgctaagcgcgcaacgccaaaacaacatgcgctaagcgagctcttgcttatcgaggcagggcgcgctaagcgagcatacgaaggcccaagtccactttaacagctataaatagagagtcaggccaagggaaaaacaaaccactacagaatcccctctaggggaaatcatttactccttttctttt

SEQ ID NO: 14713 - DNA, 114 bp, Glycine max
  Clone ID: PAT_MRT3847_113292C.1
ggctcgagcacaaacgcgcataagggatatttattttctatgaccgatctacatgggggacctggggacatactgctaaagctgatgacacattgcatagcctatcacccgacc

SEQ ID NO: 14714 - DNA, 239 bp, Glycine max
  Clone ID: PAT_MRT3847_113293C.1
aactagatacactctctgtctgacattcatagaacagactctgacatcatacagattaacgggatgtcctctgggttaactcttaatcttaaaaagaaatacaacagaaagtcctaagcttaaagaggaggaaataataagaactaagagggggcaatcaagaagattgttaattgttattttggtcaatcaacatcccaagctccagatatttattacatgctgcagaaatctaaatt

SEQ ID NO: 14715 - DNA, 386 bp, Glycine max
  Clone ID: PAT_MRT3847_113294C.1
cggggaaaaataatttaaatttttttaaaaatccccccaccccggggggtggggtggaaaaaagaaaaatcacccccttttttatccgcccaaattaataacccctaggggcgaatttggaaagcccttgatgccttcccttatccaaactgggcccgggccacccttaaattaaaccaaaaacccccccccaatcaccccctttttcccccccgggattgggggacaaaaaaactttgcctttttttttatgggcccccgggttttaaatcaaaaccctttggcccccgccccaaagggggccttttggagctaggaaaaaccgggggagggccccggggcatacaaaaaaaatttcccccattctaccctcctaaacataaaaa

SEQ ID NO: 14716 - DNA, 387 bp, Glycine max
  Clone ID: PAT_MRT3847_113295C.1
gcccaagacctcatttccaagcttgaggaatatgtcccgaagcactgtggcgtggcaccaaagcaaagttgggagatggaccaacagttataaacagttaacactgcaaattgccaaattcagacacttgaagttaaccaagtcgaatctacatattttctctgccccattagaaaatagctttctcaatacaaatcaagccttatggctgacattgtgttatcgcggatcgatcagaatctgatctgtatgatcaaagaacgtaacaccagaaaacttccatcattaatcgtcggagcttatagattctgtgctatatagtaaggcttgcttcagtcaagtgatgggtactttctaaatagctatttcaaccggttattaagtttt

SEQ ID NO: 14717 - DNA, 821 bp, Glycine max
  Clone ID: PAT_MRT3847_113296C.1
tggacgcctgcggaccgtccgattcccggtcgacccacctccggttaactcatagatgaaggaaggaggaggattcagtaaggggtgaagaggttgaggttgtttcatttcatgctcttcaatggcggttccactcagaatgaaccacaacaaacgaggcggcatgcttgctcgcttgaagattctcgtcaactctcactctcagagcttccactcccctgcgcccaaacgaccaaagcaagatcaatcatcaacagaaaatgacttggattactctatttgccggggccgcattgatgtctcaaaatggaagactttggatgcaaaggagcttggtataactagttctatgatttcatacccatctcagtttgtcctgaaacttcttcggagaaatggatttggtcctacttagtaggtgggtgtgtgagagatctactattgaataaaactccaaaagattttgatgttatcacgacagcaaagctgatggaggtgagaaagcggtttcgtggttcagccgcgccgaagttgttggacgttgttttccaatatgcttggttcatataaaaggctctgtagttgaggtaaccagttttgagacagtggcacgaacttccaataggaaggaacaatttttacactctctgttgcccaaatgcagtaataaaaaggacttatttcgctgcaaaaactccttgcgcagggacttcacaattaatagtttaattttatgaccccctttggcaataaaatctaccattatactgatggaatggctgatttgaagtccttaaagctagaaaactgtatccctgctc

SEQ ID NO: 14718 - DNA, 451 bp, Glycine max
  Clone ID: PAT_MRT3847_113297C.1
taataatagcataagtgaaatatattctgagctagagattatgaccttgtgaacaatttagaaaccactacacaaatttcacaaagaccctttaaagcattgttcatgaagtcaagagggctatgatgacatcctttgaaagtatcttggcaattctcaacaccatgagaagcagcaccagccaaatcagccaactcataggtctcagagttcatgtcattttaagctgtttcaattgcagatatagctgtttcataatcactggcacacttttgaagatgctcgaggtaatgtgttgaagtggctttctttagcagctttgtgatgtagtccctcactctccttgtgctagtggcattgaggtattccaagcgaagtgcaacatatgctaggccataactttctgattcttgggcatgaggggcagaatatagagactcaatgcagaaag

SEQ ID NO: 14719 - DNA, 372 bp, Glycine max
  Clone ID: PAT_MRT3847_113298C.1
gctgtttactgtcgctcagattcctattgaagcgagaaggaaaggtctctgtcgcatgtaatgcatgacaaatgattatgaaacatccttcttctaatttgcactgacctaaatgaccatcctggtgagacttgctcatgactaaaatgactaacactatgactcgggaggacatacataaatataacactatgtgcgcactcaacaccggacttgacaaaacggattttgaacattatggtgtactgcttctatcacacaaatgctttgatgcaaccctttcaagatattgtcctctaccatatttggttgagagaatatgtatatgcaaatagtgaccgtgctaatcttgcaattgtaaatgatcactgg

SEQ ID NO: 14720 - DNA, 463 bp, Glycine max
  Clone ID: PAT_MRT3847_113299C.1
tggcattgcaagggcttcactattttcagacttacgattggctgatgctcttttctgtaattacccttgggtatgttggctggatgatctatcttgttcttcatgttctgcagtcttatacctcactgccaggaaatgcttttggaatggagcaagcagttcagaaaaataaccgtggaaaaaatatatctatatggatctatggtgacgggaatgctttgtttgcttttgttgctggagcagtctcctcctctttaccatgcatacatcataatgacttcatttttatgggttcggataattagtgaataccagtttataaaaacattatggaagcacttatctagaaggcggatgaattatattattaagcttctagcaatcactgctatctcagttttcattcttgagttcctggttaacagcttcactgagaggaagctctatacgtggtgttttttga

SEQ ID NO: 14721 - DNA, 222 bp, Glycine max
  Clone ID: PAT_MRT3847_11329C.1
ggctatttaaagcttgtcttgtgcagaattagggtacaaagggcacaaaattttcttacaacaattccagagcacaccataatgcctatttcgaaaaaagagctctagaggcgggaggaggagcaacttttttttttagacctaggttttgtaattagacagagattagtggggggcggagtgattgcccccccctgagaagaggaggagggatcccccttc

SEQ ID NO: 14722 - DNA, 1634 bp, Glycine max
  Clone ID: PAT_MRT3847_1132C.1
ctcttttttaatctgcagctatttggattactgaggtgggtgcatttaatttagaaagggggtactctatttggtgacattggaagctaactcatagacagaggcaaagatgttgggaattttcaagcagaagttagttaatgcacccaaggagctgaacagtccagcttctttgaattcatgcactaagcctaagctaagtcatgaagtcctgaaggatttcatgtcctgcaattcctccaatgctttctccatgtgctttgggagtgatgctttgctagcctattccccttcaaacaagccctccattcatcataggttgtttagtggtttggataacatatactgtgtcttcctgggtggcctgcacaaccttagcatgctcaacaagcagtatgggctatcaaaaggaacaaatgaggccaggtttatcattgaagcgtatcgaactcttcgcgacaggggtccatatccagttgatcaagtcctcaaagaacttgaaagcagttttgcatttgtgatctatgacaacaaggatggaacagtttttgttgcatctggttctaatggccatattgggctctactggggtattgcaggtgatggttctgttataatttctgaaaatctggagcttataaaagcaagttgtgctaaatcatttgcaccatttccagctggtatgtaaacttggtttctctctacctttgcaaaatcagattttgtaactttagagtttggaaaaattacaattaataaaggatttcataatgtgcaatcaaatattgtagcattgattctaaaccaccgttcggattacatgtcaaagtaatacaattataagacattgatattggaagagtaactacatttcaaagagtgatttgtgtctagattctagaatttaacgcatgaccgggttgaaattgcagggtgtatgtttcatagtgaacacggtctcatgaactttgagcatccaacacagaagatgaaagcaatgcctcggattgacagcgagggggttatgtgcggggccaacttcaatgttgactctcagtcaaagatccaggtgatgccacgtgttggaagtgaagctaattgggcaacttggggctaacaagcttagctgattcttagtccagcatttttctttctaagtggttaaaagtgtaacctaatatgatgagtgtgtgactctttgcttttagcccgtttggatatctgcttttctcgtttggttccattgttgtgtacatattcatacttcaatattgaacatgactatggtaatttctaatatgaataacaagttttagtttttgacttttaaaaaaaaaaaaaaaaaaaaaaaaaaaaaaaaaaaaaaaaaaaaaaaaaaaaaaaaaaaaaaaaaaaaaaaaaaaaaaaaaaaaaaaccaaaaaaaaaaaaaaaaaggggccaaagccaagggggcccccaataaccttggaaaccttcccccaattttttggggctaagggcccaaaaaccctaaaacccaaccccaaagggaaccccccaattaaaatgttggggggaaaacccgccaaaatggcaattgtcaaacccctttttttcagcccttatattaaaaaatgggtgccccccccccttt

SEQ ID NO: 14723 - DNA, 435 bp, Glycine max
  Clone ID: PAT_MRT3847_113300C.1
gggaagggaaagttcattttattttatttttataaaaaaaaaaaaaaaaccggggggccctaattgaaccccccctcatgggccccatcaaaggatttccaaggttttccaaaaaaatgggccccaaaaatacctgttttaaaataatttttgggcaaagcacccttaaaaccgggctccttaattcccgcccaaagggggggccccccccaatccccttttgaagatgttccaagcttccccccccctggagggatgctgtttgaccctttttggtcccccccccccccggtgggggggtttggggggggccctttttaaatggaaaaaagcccccccaacccctgggggcctttcggatcatgccggggaataggatttttcaatgggggtggataaaagggaagagggggatcattttgcacaggaacaaat

SEQ ID NO: 14724 - DNA, 247 bp, Glycine max
  Clone ID: PAT_MRT3847_113301C.1
tctgtctcctcacattctcttcaattatattaacaacaccatcatattctccaaattcaggaccactctacactttataaaacatctcatatggcaaggacaaacatcattctcaatctgacaaaggaactctctcacaccttgctcatgacttaactcctacatcacatcatgaacattcttaccaacctctgtctaacccatcaccacctaactcataccctacacaacaaagatatcctccaac

SEQ ID NO: 14725 - DNA, 851 bp, Glycine max
  Clone ID: PAT_MRT3847_113302C.1
gcatcgtttttctccgctctttgattgcaccgtcgtaacccttcaaaccgacatgtgattgatgtgtgaattttgaggtggttgtgttccgtttgatgaaaatgagcgttatccgagtttctccatgtcttcctggggtttatgcctccccaattacatcgtctcagttacgccgccgcgattttaactcaagaccgcgttcattgccgatgatggggtttgaccctctctctgtggcttccctgagcctcagagccgaaccttcgcctcgcttgcaatgccagcctgcccttaaatcacggcgacctctcctcgtttgttttgccgccagtggacaaggaatgatggaaaataacagggaagctatgggacaatggaagggacagtcaatagaggatatattgcgacagcaaatggaaaagggcgggagtgggggcaagcctccgggaggacgaggtggtggtggtggtagtgacagcagctctggtggatcagatgggatgtcaaatgaaactcttcaagttgttttagcatcagtttcctttatattaatgtatatttttgttatcaatggcttagaacttctaaagctatttaaggactgcatcaagtttgtgtctggtagaggccagagtgttcgattgaagcgagcagtatacaaatgggtacgaattttcaagaatatcattgagaagatggaagctgccaggaatgggttggagaaagcctccacttgtttgttggaccgtgatttctttcgaggtgtctttcagtgtaacatgaaatcaaatccagaatagtttttctgtatgtacctattcatataaattatgatttccttctttaggaca

SEQ ID NO: 14726 - DNA, 392 bp, Glycine max
  Clone ID: PAT_MRT3847_113303C.1
ccgcttcctcagccaggtttgggcagaatagcggggggtgttatgtattattagcatagcaaaaatgctttcctcgtcattaatatgtttgctagtggaaattgtggcttctcgggagaattgatgaatgcatcaaagatgcacttgctattgctagtaccagaacatctaatatttctttattgtttggtttaaatagccccatactgcgaaacaaagtagtatcctgaacctacaccgagtcattgactgtaattctcaaaattttcaaaacttaacaaacttggattcactttgatatattgcttaccaatcaaattctggggtataccaagctatctactttttttaacgcccacagtgaacctatatattccgtatcacattttttt

SEQ ID NO: 14727 - DNA, 426 bp, Glycine max
  Clone ID: PAT_MRT3847_113304C.1
agcagtttagtttggcatttagcgaaggcaatggagaagaaaccgctgttggcggagagcgattactactacagggtggagttcagagcgtgcaaggacgacgcgtggtacgcgacgcgcgtttcgctggagggagaaacactgaaagtgaagtacttcaacttccccgacgaatacgacaacgcgtttcgagcctccgagtttggggacttggaaaagcttcaggagtttggggaacgcttcagaaccctctccaaacaggctcaggacagcgattgtcgttcactcgctgagggtgtctgggtctgcgcgtgtcagtgtttcggcgatgatgatcttcgctactacgacgctgtcgtcgacggggtgcaacatggaaagcattattggaaagcaggaaaggaaacatgcttttgcaccttcata

SEQ ID NO: 14728 - DNA, 317 bp, Glycine max
  Clone ID: PAT_MRT3847_113305C.1
taaatggaggacatattccaaatcagctgtggcagttttaaaaatagctatgaccactgttccagtcttgcagcttccttaatttgctcttccttttgatgacgaaacagatgtgttcaccactgctattggtgtcatcctttctcaactaggtcacccaacttctccggtaagaaactttgcctgcgcatgcaactagcttctacatacgcaaggggaatgccttccattacagatgctgtaagaaaatggcaccattatctaatttgcaacaaatttagaatattcacaaatcaccaaaatttgaacgcccttac

SEQ ID NO: 14729 - DNA, 207 bp, Glycine max
  Clone ID: PAT_MRT3847_113306C.1
acgttttctgagtttcataggaggaaaaaatgacagaagaacaaaccaaaacacgtgactcagaatcagtgacaccaccagctggtgctggtccttcacaggctcctccagctgctgaggctgaacatgttcatgaggctccaaaggatgtggctgaggagaaatctgtaattccagtgccttcttctgatgacaacctgatgggtc

SEQ ID NO: 14730 - DNA, 406 bp, Glycine max
  Clone ID: PAT_MRT3847_113307C.1
ggtcgccccgcgtccggaggtttatctttaagggttgtattcaagtatttggggaaaaatacaactgtagctcgaggacttcaaaaccatggggaaaaatccattcttttgtacctttttatattagaagaatctagcaatataggatagtgatggaacttaggaattaatattttgacttcaagaaatatggtggggcttagttgaccacctaagctaccgcgtggcatgtgaggagcagacttttcctgcattgtagggttcaaattcccctggaaacacatggccagagccgggctaccaaatattccgatgagtgaatggcgattctgctggctcccagaaaggtggtgggacaccttgggggagaccaagaaaacatgagttgaaatgcttgcctctttga

SEQ ID NO: 14731 - DNA, 422 bp, Glycine max
  unsure (1)..(422): unsure at all n locations
  Clone ID: PAT_MRT3847_113308C.1
gaattcggcacgagagatgatcacaaaacaaaaccggggttgatgtgcaagtttagcgatacggttgtcgtctgatttgattttttttctttatttcttttttgataatcaaaatttactttacatgattcttttgattctttgtaaacttgatgaagccatggcccatggtgattaagggtgagctcagttgtttattggagaaaaagttttaatattttctctgcaaagacctctccaactcatggatagcgcatgttggggtatctttttttcacttcttttttcattggtgttaggccagccaaagaatgtgatgtattatgactgcagagagaaagagaggcagagagggtgttggtagtggtactatccaaaaaagtcttnnnntaagtttcattgtttagtccanannaanncat

SEQ ID NO: 14732 - DNA, 336 bp, Glycine max
  Clone ID: PAT_MRT3847_113309C.1
cggagatctctttcatggcttttactctcgagacttctgactcttctgttacggtcacctcctccacaaccaatcctcttcctcaagacatctctaatgcctattatgttcaccctaacgagaatccctctgcgaaactcattactgctcttcttgatggttaggctcaagcgatgacgttggtattgaagatgaagaacaaaattggcttcgtggactgcacgatttcaaaacctcatgagcaacatccaaactacagttcttggaaacgatgtaacaacctgattcgctcatggatcaatcatccgatttctcctgacatcgcaaccagcattc

SEQ ID NO: 14733 - DNA, 379 bp, Glycine max
  Clone ID: PAT_MRT3847_11330C.1
ccccccccaaaaaaaaaaaaccaaccaaaatccaaaaaaaaaaaaaaggggggagggaaaaaaggaaaaaccgaaaaaaaatttttttggggggcccaaaacccaaaaaaaaaccccccaaatccaaaaaaaccccccaaagggggaatgggggaaaaaaaaaaaaaaaaaaaaccctttccccaaaaaaaaaagggcccccaaacccaggttcggctaaaaaaccccgggggggcaaagaaaccatttaagggaaaataaacgggccaaatccccgggggaaggcccaaaaaaaacggggccctttgggaatcccctttggacaaaagaccccgggggcattaaccccacccgggaaaattaccccggggccccgggg

SEQ ID NO: 14734 - DNA, 657 bp, Glycine max
  unsure (1)..(657): unsure at all n locations
  Clone ID: PAT_MRT3847_113310C.1
gggccgacggacgcgtccgcccacgcgtccgagcttttctctttcctttgtgactgcaaaactgaaaaagccaagctcgcctactccccatcctcacgcatgtccttactgagcgccagtttcaccgcctcgacgccaattgccttggcctcctcgtcgtctctgtcatcaaggccaaccgcacgctctatactgggcgatggtcctgccgagaccctttgtgaaagctgctaaaaattttagaattcttttgtttttgaaagaatttaaaattctaaatttatagttaaaaatatattccatgttaaaatgttaaaattttaaatttcttctatgagcatctaaaaagattattcaggcggaaaaaattttaaatcctctaaataattacttttcccattttaattccctcattcaaacataaaacaaatccaacttgtactgttttcactaatttttcccccactaatttttccccgctgtcattgagaattaattgcggcttccaatgctgtactattttggactattgatcttgcattgtgaatgtgatttcagcatgacacagaanaattgcatcaatttggcttaatactattttcaaccactaaatgcttgttggcctccatcggaagttcgattagctcaatgacattt

SEQ ID NO: 14735 - DNA, 1890 bp, Glycine max
  Clone ID: PAT_MRT3847_113311C.1
ggtatcaatggaaagggagacgatggaattagaaattcaatcaaaagaatagtagaatacaaatccacgtaagacatatacaagatataatttatttaacgtaaaaaaactttcttttctagaataaatactatttaaatgttttcacctaaaagtgttcgcatttgtataagcctcaccttttaatacacacttcaagtttcttggggcagccaggttctctgatttgtcctcaataacagtatttattgttaaacttgccttcaaaagttcgatcctggtaccgctgttcagattgtaaccagaaaaagtctcagcgaaatgaagtacataaccttggggtctactcatctatagaagcaagtctacataagcatcaagtccttgtttgacaaggcacttcttcagcttgtatagggctcggatctccaattgacgaaccctttccttagacaaaccaaatatgtctccgatctctgataaagatttctgttcaccatcctcaaaaccatatcttaaccggataattctcctctcttttgggtgtaagacacttaggacattgagaacatgccttctcataagctgtttttcgacagtcacatctgtggcctcaacagtggggtctgcagtaatctcctggaaagttgtattttggtcagcccacacagtttgctgcattgaaattggaattcttgcagaaaatagtaatttgtcaatcttttctacagtaactcctacccttcttgctaattcttctttagttgggtgaaggtttccttcctgaatgtacaatttcttagcctccattaccttgcccaataggataaataccttctccggtagacggattgtcctggaatgtcgaaacactgccttccttattgcttgccttatccaccagaatgcataattaccaaatcgactaccggctaggggattgaatttttcaacactcttcataagacccatacttccctcctgtagtaagtcctgaaggctgagaccacgcccctgataacttttggcaacatggactaccatgcgtaaatttgcttgaataagcttttctctgcttctgttaccagaatgaagctgtgattgcagcaatcgacaattaagtcctgcaccctctgcccattcagccatagttggttcccttccaaattgagattgaagattggtcttcacttcttccaatctcaataagtcctgtatctgagatatcagttgagattcttctcgaggtgtcaaaagcttcgtcgtttcgggaccccacaagaacaagcgcaggggatcatcttgatcaagttcttcatttttcttcttttctgcacgtagcttttcttgtgcatcatcctttcttgcaaggtaggtttcatcgtctataactttcgacttaggtacttttctttgttttgatcgtctctctagaagccgtgttgacctcacagttttatttcttccaattgaaggatcagccaagctagtagaggccagaccaaaaggaattgaatcatcatcagctttaattgatttcaagtcttcaactactgaggattcttgtttcgaggtagacaaagctttcttagcaagagaaactccattaaattgcacaccatttggacgcctctccaagtcaacagaaacatgctctaaagttgaagaagcagcaacttcccctatttgtgaggaagttaataagtactgtaaattagaccagtgatgcaggtgcttcctaaagtcaagcactacctgatcagcattttccgtgttattctcttcatgaaccgtgactgtatccatctgccttgtacttaacattgcctgtgatgtcttgtcttccttagacatgtgcagaagaggcctatttctcacgccggacgcggg

SEQ ID NO: 14736 - DNA, 2158 bp, Glycine max
  Clone ID: PAT_MRT3847_113312C.1
aaacaaaatgatatgtattatgtagattatgcaggcataacataatattatgaacaccatggccttgaccagtgaggagttagaagaacctcaataaacacctggttgacaatcagcaagtaacccattaggcatcaaacaatcaatttcattaacaatggaaaaattaccggtattacttcccaatttagagtgcataagcacagttgttttcaagttgtaacagattcctataagatggtgaaataaagagcatgtgccatctactccaccactgttgtatttctctgacacatttaaactcagattcaaacgttagttttgcttcccagctcaacctttatacagaacttggcaccctcaaattatcccactgcataaaactatgatcatcttgctcctctttgcctcttctcttccaatgcagctgcctcatttaacatatcagccgcatccttgtgcatgtccagttttgcaagagcaactgattgcatgtagaaagccgtgggccagtctggataaacacactgtgcttgcattgcatctcgtagtgcaggatctggttgatcacataacagatagcacagactgcgccttgcaaaaacagttggagagatcatcgttccaacatcaataaactgggaatagttatcaatggctgtcttaaagtccttgtcacggaatgcatagtctccacgcttccttgcctccagcatatctctcatctgttgagtccactcttggaacgacaactcattagttccttcatcgtctctgtagtgtgtcgcaaccaagatctgatgtattgcagttaggtccattcttgaacaagcctcacccattgctgaaagaggacgttgtggggttgatggagcctcctcgtgctttggaattccaagcataatgtgagaacgaacatcgggttttgtatgcaatggggcaagtgttgtgaccaaatcctttgtatcaggccgctccctaggttcatattgcaaacatttagaggcaagattaacaactaccgttgcctcttctgttgaaaactttccctctaaatgtgaatccattaagagcatattgtttttcccctgtatcatatcaagtgcatgactgggagggatgtgcttgccactgaggaggtctagaagaacggttccaaagctgtaaatgacactttcaggcgtgacccttccgtttcttaaatattcaggaggtgtgtaagcaagattggtgctataactcttaccatccctgctgttcttcataaaaccaaagcaagagagacggggatcgccttcctggtcgaagagaacacggtaagcattcaagtcatggtacaagggacgaccctcagagctgcaataatgcaaagcctgggcgatgtaaagagcgactcgcaaccgcatggcccactcaatagtctgagtttcccagtggaaaagatgcttggcaagagtatcattaggcatgtactcggcaacgagaagcctctcatcgccgtcgcagcagaaaccgatcaaaatagcgagccttggatggcgcaacttgccgacgccggaagcctcttcgacgaattgcttgggatcaggccaagcagacttgctgaacttcttgacggcaatccagcggctatggttctggaggcgacccttgtaaacaaggttgggtgccttctccccactctcagacacgatatagtcagagctgaaattgttggtggccgccttcagctcagccagcgagaactcagagaaggagaaatcaaagccctctttctcggcctcagagagcctctggtggtctttttccttttccttttcagggtgagtctccctctctcccactctcagcaacgtcgatgattggcaacaacccatcctttccctcctctctctctctctctctctctctctctcaccgatctccactttgtttcttgacccctaattactactaatcactctttacttattacattaaatgaatttccaacttcatcatcctcaatattacctttttatccatactagaaccctatctgcttcccttcttcaccaacccaaatcaatgcttcccattcttgttactattttaccttgagccttttttgttacctggtttttcgacacattacaaatattttcctcgaaccgaattt

SEQ ID NO: 14737 - DNA, 1101 bp, Glycine max
  Clone ID: PAT_MRT3847_113313C.1
ccccctgggatcaaaatcaaagagccatgacttggaaggaaagtgcttggcacttgaggaggttaagaagaacggttccaaagctgtaaatgacactttcagggggtgacccttcgtttttttaattattcagggaggtgtgtaagcaagattggtgctataactcttgccatccctgctgttcttcataaaaccaaagcatgagagacgaggatcaccttcctggtcgaagagaacacggtaagcattcaagtcatggtacaagggacgcccctcagaactgcaatagtgcaaagcctgtgcgatgtacagagccactcgcaaccgcatggcccactcaatagtctgagtttcccagtggaagagatgcttggcaagagtgtcattaggcatgtactcggcaacgagaagcctctcatcgccgtcgcagcagtaaccgatcaaattagcgagccttggatggcgcaacttaccaacgccggaagcctcttcgacgaattgcttgggatcaggccaagcagacttgctgaacttcttcacagcaatccaacggctctggttctggaggcgacccttgtacaccagattgggtgccttctccccactctctgacacgatatactcagagctgaaattgttggtggccgccttcagctccgccagcgagaactccgagaacgagaaatcaaccacctctttctcgccgtcgccctctcctccctcagactgcctctggtggtttccgtacgcttgctctttttccttttccctttccttctccttttcagggtgagtctccctctctcccactctcagcaacatcgatgattggcaacaacccatcctctctctctctctctgtctctctctcttcaacaattatcaccgatcatgaatgagatctcgacagactctatactctacaactattgtgttcgcgtgatttgcctttttggcaatttttttagtttccctgtttctatgctatgcttcagtacccttccttcaccctcactgttgctaattactactaatcactgtttacttattacaatccagcactcattaatattctattaaatgaatttccaactataaaaa

SEQ ID NO: 14738 - DNA, 397 bp, Glycine max
  Clone ID: PAT_MRT3847_113314C.1
cgcgtatggggttgtaattaatccacataatggatgcaacagctgctacggcatcagtgctccatgtgccatcatcggacgctgaaaaagggaaacccaaaggagtgggaagctgatgcatatcggtgaacctaccgatgactcaaagagaagcagggattgtgcgaacactcagcaggtcaaggcatacgcaaaagcccattcgaagaccatggatatagatgagaatgactctgcatagaaggcgacgacggctatcttacacgccccgaggacttttataaatcagctacctgactggagcatgcttctggccatcatcaccacacgcgttactcgcaggcgaaaagcattggatgatgctgagattggaagacgctccgccccgacatgctca

SEQ ID NO: 14739 - DNA, 338 bp, Glycine max
  Clone ID: PAT_MRT3847_113315C.1
atgccccattcctttttctatcttcggactattattgagtaaacatataatcagtaaaatccaacagaaaaacaccattaaattgtttgtgggagacaccctcgaatcccctacatatattaactctgcatctcccacaaaactagggtgaccatgattaaggaaatgagagaaactcccatcttcaaagaccaaatatatatatatatttatttatatatatatatatatatatatatatatatatttttttatcttggcgttcgtttttggaggcttatctatcttatttgaatcttttttgagaactatctttatgtacttttaaacaaaatttc

SEQ ID NO: 14740 - DNA, 110 bp, Glycine max
  Clone ID: PAT_MRT3847_113316C.1
acaccgcttatattgagacgtgtgggtgcgcataaatctgaccattggcacaatcgtgctttcttttacatggcctagacaggaaccggaaatcccctctgacaaaaccc

SEQ ID NO: 14741 - DNA, 943 bp, Glycine max
  Clone ID: PAT_MRT3847_113317C.1
aaaataaacagaattatgtagattatgaatttatgcaggcatcacataatatcatgaacaccatggccttgaccagtgaagagttagaataacctcaataaacacctggttgacagtaagtaacccagtaggcatcaaccaatcaatttcattaacaatggaaaaattaccggtattccttcccaatttagagtgcataagcacagttttcaagttaaccgattcctataagatggtgaaataaaatgcatgtgccatctactccaccacttttgtatttctctgacacattttatactcattcaaacgttagttttgcttcccagctcaacctttatacagaacttgacaccctcaaattagcccactgcataaaactatgatcctctcgctcctctttgcctcttctcttccaatgcagctgcctcatttaacatatcagccgcatccttgtgcatgtccagttttgcaagagcaactgattgcatgtagaaagccgtgggccagtctggataaacgcactgggcttgcattgcatctcgtagcgcaggatctggttgatcacataacagatagcatagactgcgccttgcaaacacagttggggagaccattgttccaacatcaataaactgggaatagttatcaatggctgtcctaaagtccttgtcacggaatgcatggtctccgcgcttccttgcttccagcatatctctcatctgttgagtccactcttgaaaagacaactcattagttccttcatcgtctctgtagtgtgtcgcaaccaagatctgatgtattgcagttaggtccatttttgaacaagcctcacccattgttgaaagaggacgttgtggggttgatggagcttcctcatgctttggaattccaagcaccatatgagtcttttcattagagtgtgcctataatcgtaggtgtgttg

SEQ ID NO: 14742 - DNA, 267 bp, Glycine max
  Clone ID: PAT_MRT3847_113318C.1
tgcctagaaactagtagctagtgtttgctgctgtcgaatgacactatgcaatgtgatctggaacctggtttcttgggtgcgacgcttgtagccgtgttatgactgtcgtccgtaaaatttgggggctccccgtaagggatgctgcctggcaaggcctcggtgtcccacctcgtctgtggcgtggggcgctggagcccggtctggttgggttgggaagccctttaaacttgtgtcacttgcattttaccttttccatcgctgttaaaa

SEQ ID NO: 14743 - DNA, 492 bp, Glycine max
  Clone ID: PAT_MRT3847_113319C.1
aacaacaacaataatactagtactaataattaataagaggaatacaaggctgatatatatacacttttatgccccatgtaaggaattttataggttggcatatatatagcttggtccttaattcaacccatcttttccaaagatactgaagagattgctaaactaattcaacctcatgattttgacccaccacatttcacttttgacgtgctaccgaaatgacataacatcgatacaattcaacaagtgatttcttcagtagtagtactattcaaaagactgcagattgcgcccggccagattggacttgaactcaattcaatgtttcccactactactaaaaagaatcattgttgcttgaagagttcatcaccaatatattgcaacattcctttagaatatccccatctgtctctttcccacaaattaaattaaattaaatgtacttagctacataatattattttcttatttttggcccaattgaatttg

SEQ ID NO: 14744 - DNA, 447 bp, Glycine max
  Clone ID: PAT_MRT3847_11331C.1
cggcaacattgtcatgtctggtggtaccaccatgtaccccggtatctccgaccgtatgcagaaggagatcactgctcttgccccatcctccatgaaggtcaagatcatcgcgcctcctgagcgcaagtactctgtctggatcggtggttccattcttgcctcgctctccaccttccagcagatgtggatctcgaagcaggagtacgacgagagcggtccttccattgtccaccgcaagtgcttctaagcgtatcctgcgtataactctcgagatcatgacaagcctgttagcggagatatcgatgcatctgcgctgtgttgccacggggatttcagtaacggttgttcacaaaagcgagctttcagttgggtgatcagttacggaggagctcaagccattatggagtgaagtaggatcataagaatgtagcttagaaccttgtcaaa

SEQ ID NO: 14745 - DNA, 588 bp, Glycine max
  unsure (1)..(588): unsure at all n locations
  Clone ID: PAT_MRT3847_113320C.1
tcttggacaaaaaaagaaaatcatatttacatgatttctatcttttccactagttttaagcnnnangccctcttagtgctgatgcagctctttgaatggccctggcaaccccccagatctcatgctgaattgcagcaagcctgtctttttcactcattttatccatcccagacagagagtcagcgattccagggaagaaatccaacttgctttcatggtcgctgggaggcccaaaaacaagatgcttgaaccattgccttccttgaagcccatcaacgtccaagaagcctctttccgcaagcattagtctatcattcaatgctcgcattttcatatctatagaacgatctgaagcttcttgccattttaatttctttgattcatcattagcttctttggcagcagaagcaaattcttgaatcgaagtatttagtggatgtagagtaatctgcttgtctaacaagttgctcaatatgttattgtagacctgtaactgattcgcataagaaagataattgaaaggtataatggaatcatcagcaaggcgaagggctagaagcccccaaattccagtaacagcttcatggc

SEQ ID NO: 14746 - DNA, 527 bp, Glycine max
  Clone ID: PAT_MRT3847_113321C.1
aaaaaggaaaaactaaaagggctttgtttaaaaaaaacaaggaaagggggcccccattttatgtttaaaaaaaaaccgggccttaattttatcccatgccctggggcagggggagtaaaaaaaaaaccaatgggtttatcccgggttttcataaatcccaaatttcccccccttgggggggttggatgcccccaggggaaacccgggtcaaaaccccgggggattaaaaacctatttttttcttagcggggaaatcattttaagggcgttccgggtggttaagggtccggacaaacccctggaacaaaggaaaatgctttggaaaaaaaaaaaaccccccccttttatgaaatgggaacaagcccaaaacattatctccaaataaaatttttttaatttgtgaaaacccccctggaacccccaatttaaaccaattttgacccgaaacccgaaccctatgctttttggaaggttccataatttgggcaaatagcaacccaggggtaaaaggggtttcctttgggggg

SEQ ID NO: 14747 - DNA, 346 bp, Glycine max
  Clone ID: PAT_MRT3847_113322C.1
aacgctttcagaacccgtgaccgccaagcactcggatacgggtatggatgaacgatacgtgtacggtgtctctgaaatgcagggctggcgcatcagcatggaggatgcgcacgcgaccgtactcaagctggatccgcagactaataatgcgttctttgctgtattcgacggccatggaggctccaccatagccaagtattccggctcccatattcacgagcgactcaagtcagatgctggttaccagagcaaggattacaaagcggctctcaaacgcgcttttttgggcactgacgacgacttgcgtgcagatcccgcattcttccacgacccatctggatgtact

SEQ ID NO: 14748 - DNA, 105 bp, Glycine max
  unsure (1)..(105): unsure at all n locations
  Clone ID: PAT_MRT3847_113323C.1
gntatattacttgaccctgaaagaccaattccattcgcagagaaggagangttncctgttgctgattttcttgtggtattgctgctgccagagccctgtagtagc

SEQ ID NO: 14749 - DNA, 343 bp, Glycine max
  Clone ID: PAT_MRT3847_113324C.1
catgcagtgtgtggccaccagtgtggcaagcaagaagttgtgagactatttggctacactgcccagacctgtgatgatccgacaagttggcaataggaagtggaatacccttcgtgaagaagggattggatcgcgttgcttgccaattcctagcgtggagctacggtttacatgtacgcgtgagcacaacaaggttactcacgatacttacgatggacgctactggaccatgtggaagctgactatggttggttgcactgatgcttctgatgtgtggaaagagcttcgagaggctaagactgcataccccaacggcttcatccgtatcatcggattccacaac

SEQ ID NO: 14750 - DNA, 716 bp, Glycine max
  Clone ID: PAT_MRT3847_113325C.1
cctgccatatattcagtgaagagaaatatatatgtttcttccactgggaataaattgggcattctaatctgctgcagagtgcagagtgcagagtgcatcagcattggatctggaaacgcgtgaaagaagacatggctcgcgcgggagggataacaaacgcagtgaacgtgggaatcgcggtgcaagccgattgggagaaccgcgaattcatctctcacatttctctcaacgttcgtcgcctcttcgacttccttgtccaattcgaggctacgacgaagagcaagttggcgtctttgaatgagaagctggatgtgttggagcggaggttggagctgcttgaagttcaagtgggcaatgcttcggctaatccttctctttttgccacttgaatttgtgttgtgagcattctccacctatatgtaagcttacatattcaccttcttctgccgccaactcagattcatttgagacatattttcgtgccagactcaatcacgtacttgaggtccgggaaatcagtcatcttagttgtagtaatggaaagaatacatcaattggttaagagtaagctcagttggcagaatatggaattctttctgtagatagaaatggatgatatcggtttccttagtttgacattttccatatacaccttaaggaatgttattattatccctaacatatttttcactcattctttttaagccattggatga

SEQ ID NO: 14751 - DNA, 634 bp, Glycine max
  Clone ID: PAT_MRT3847_113326C.1
gtgcattctaatgtgctaagtgcatcaagcattggtatctggaaacgcgtggaaaagaaaaagtggctcgcgcaggagggataacaaaacgcagagaacgtgggaatcgcagtgcaagccgattgggagaaccgcgaattcatctctcacatttctctcaacgttcgtcgcctcttcgacttcctcgtccaattcggtacacacgcatttccttttcccactctgcagaacgaacccatcccggtgtcgttttatctatccatgaagcaacaccaccactttgtccttcacataattggaggctacgacgaagagcaagttggcgtctttaaatgagaagctggatgtgttggagcggagattggagctgcttgaagttcaagtgggcaatgcttcggccaacccttctctttttgccacatgatttttgtgttgtaagcactctccacctataatgtaaaatctaaatggaattctttatatgtaagtcgtttataaagcaaaagtgaagtgtttgattagtgtcatgctttgttttgtaactctagcacttggttttgcaatttattgggtgatgtatagttaagtgcattgctttattttcaactttgggtaaaaaaaagaaaatataaaa

SEQ ID NO: 14752 - DNA, 415 bp, Glycine max
  Clone ID: PAT_MRT3847_113327C.1
tgcgaccgcttacggatatcgaacggcagcgagaggacgacagaaggggtgttattcaggctctatatcgtctaacaacaggtgctcgggaagctgctttcacaaacaataagacaagtgctggatgcatggccgatgaacttagtaatgcaggcaaaggatgagaccaatagttatgctaatcaagaaaaaggatgaaattgagagagccgccagaggttcaattgttaacacaacccaacaaccagtgttgtggccagaaagaattccacctttggctgaaatgatttaaatttagaagattgtggattacttgtgatgaatttagaatgatttttcgcacgcgcaaggtattctacatgaacgaattattgagctaatacagctcagcgtacggaatttacatgaacgatct

SEQ ID NO: 14753 - DNA, 564 bp, Glycine max
  Clone ID: PAT_MRT3847_113328C.1
caggggtcattggaaagttaaaaaattccccgtctccacaggtaaataaaataaaataaacaacaaaaattgtatgcttccttgctaaaactaccaacaacagatttgaaggaaaatccctaccaaaactctcactaaacaaataaacctgtttccacgggtcatccaaggtaaataaatacagctgcaacatgtttctaaagagtatataatgggtcactgcaccacatttgtccttgaaatatattacccctcctaagtaggtcgactttgatacaaccctcctccatttgagttgcaaatatcccttatttgctgactgttatgtctcaaatttacttattcccttttctgttcctatgcatccctgcttttaaaccttgtgtctcagggccatttggagtactaaaagtgccataattagaaggtcttgggctattgggagcactaggatgcctggggataccctcatttggagcactaaaattgccataactaaaagatcttggggtattggtagcaccaagatgcgtagggatactctcatttgggctactaaaattg

SEQ ID NO: 14754 - DNA, 463 bp, Glycine max
  Clone ID: PAT_MRT3847_113329C.1
gtaactgtttacaaaggagactctcctttccacaaggactagccttgtcaacaccaaagctaaactctacataatccccaactattgctaaaagatatatttatcctcattacccctaactaccatgctctaatagaatgatactaagtgccataacagtatgataacaaactctttagctacaattaatgggccttattcctcttttggtacactcgcaaggcctttggcttccgcggtgactgaatctgatcaacacctgttaggaatacgatgatttgctctattcggaggtaaactcttgggctcagaaaatacttgagcatattcatccaacacctgttgtatttgtctctgctcctctatttttgcatcagttcgattctgtccttgctccttctctttatccccttcagtttccacaacccacaacattgatacagcctctatttctgcctcgtgc

SEQ ID NO: 14755 - DNA, 429 bp, Glycine max
  Clone ID: PAT_MRT3847_11332C.1
ataaaaaaaagaactcgtgtttccttattacaaaaaaaagattgaaattcctacaaaatggaaatgaaaattcaggggtctggtgaactcaacttcaaccaacaaaagaagaagcacaacatttttgctgtacctaaacagggtttaaacaaaggtaaccttggcaccagctttttcgagttgcttcttcgcattttcagcttcgttctttgaaatcccttccttgaacttttttgggaaccctttgatcaactccttcgccttctttaaggcttggtttgtcaatgccctcaccgccttaatcaccgggatttgagcgttggtcggcaccttcttgatcaccacggcgaactccgtttttttcttaaccaccggcggggcgttcagcacaaggcctccggcacccgcggtgaatgccacatgggcaaa

SEQ ID NO: 14756 - DNA, 372 bp, Glycine max
  Clone ID: PAT_MRT3847_113330C.1
accaccccttcaacaacctatgccgattgcttacacgcacgctgctcaaacacctacgctcgaacaccttcgatctcctcacttgctaccacacttctccgtcctactccaacctccacttcatcactcgctcttccatccctccgataacatgcacctctatcttcaccgatgccagctcatcaactaataactctaaactctatccaagatcaaaccatgctcatgttataaaatcaaagatacgactgaaaatggtatatttgctgccaattgggaatattctgcatcagaagccaattcttcaaatctgaataacagaacaagcctacgcatgtctcaacaagcaatgaatgcaattagtcacatatc

SEQ ID NO: 14757 - DNA, 412 bp, Glycine max
  Clone ID: PAT_MRT3847_113331C.1
gagaaaccaaaaaagtattcattttttataaaaattattgccttacaaaaatggaagattgccccacctcctaaaatacaattgggtaaaacaaatggggggtaaaaaaatgatccctcaaaagctggatgaccaaaacaattggcccagaaaaaacttaatgaaaaaataaatcatggggttagatgttggggggggggacctttatcctaaattttaaaagcagggcctaatgcacctaattgccttggaattaaaatattgaactcccaccttaattaaggtggggggggattttgggcaaactaatcatgggcttggaattcccatgtgcacaagccttggggataggaggatttttggactaagccttggggagggaaatggggctttggaagcaatttttgcaagg

SEQ ID NO: 14758 - DNA, 815 bp, Glycine max
  Clone ID: PAT_MRT3847_113332C.1
ccacgcgtccggttgaagggttccttcctcattctagttgggaatcgtttctcttcgctcacattcgcacttcgctaagtaagaaaaatattcatgactgacaccatctattggataacattcaccatcagaagaacacacactggatttagtaatgcaatctcaccatcagcaattgaatgtgatccccaatccagaacctacagagaaagccataatcggttgctcatcttctcctttccgtcacttccaactcaacacaaatccaagttgaggttatcgcagtttgtcaacaagcaaagtgttgctcacctgaccatttctgatcaagacaaatcatattggcatatacttggagtaccaaagttaagagcaaccagaacagtttttgtgaagataaaggatatcaatgaaaagcggaaaagaaaccaaaacagtttccatttgcatggctagactttgatgcttgctttgaactcttggaagaagattgagaaagctgaagttggtcgaagatttctagaagttatgttttggtgaatgtatttccgacatgtttagttatattctaagttttcaaactttactttcatttccttcgatgttgatgtattatcttttaagcgctacaaggtgattttaccaccttccagcttaaaaagtattagtggtaaaaagattttgtgatggttccatgttagtgatgtaagcttctgggtgattagattttagttattaagttagtttgttacaaattagttacaaatttaactatataaaattcaatgtattcatgtaaaaaattgatttgctca

SEQ ID NO: 14759 - DNA, 265 bp, Glycine max
  unsure (1)..(265): unsure at all n locations
  Clone ID: PAT_MRT3847_113333C.1
tacggctgctataagactattgaagggattccaatccattttgcatatgataatattatttagtaatttagggtgttacaaatgaattttttatcangagagttagataaaggtgataaaggtaatcattataaaatggatgtggtagggtgtaaatggtaaatatattcccaacacaatcaaatgacgaatccatatctacgttagagacttttctttctagagttttttttcgaatgctttttctttaataaataaactatgc

SEQ ID NO: 14760 - DNA, 329 bp, Glycine max
  Clone ID: PAT_MRT3847_113334C.1
attggccgggagcgacccacgcgtggcgcgcaacgaaacgcaatgtgcacctgttgtgtgtgtgcgggccaaaacacagacacgtggcaatgccccgttgtgttgtttgacatgcgcactgttgaaatggcactggagacgaaccgtaagcggtgatggtgtgagagctgacattgcggtagggggggcaagtgtgagagtggcaagcaatggcgagtggagacgaatgacagcgctggtggtgggagggtgcgcaggggggggaggatgctacggggggggactaggtggaggggggggtggggggggtggtgggggggggggcggga

SEQ ID NO: 14761 - DNA, 319 bp, Glycine max
  unsure (1)..(319): unsure at all n locations
  Clone ID: PAT_MRT3847_113335C.1
gcagaattagtgctcttggacttttggagttatttgcctatggnggnaaacaggcccccccagggacctttgggcctgggttttttaaagaagaaccaggccccccccccccccctttgttttatcgcggggcccctgggggggccccccgtccttttggggggggccccccccccctgttttcccgggccctattccccggcccggccaaaaaaagccttggccccccggggatgggggggggaaacccccccggcccccgggcccccccccaaaatccccgcccgggccccgggggcggcccccctttccttaaggg

SEQ ID NO: 14762 - DNA, 628 bp, Glycine max
  Clone ID: PAT_MRT3847_113336C.1
accgccgttaccgcttaaggcctttggacatgccttcttaggaggcggcgcgccttccccccccccctccccccctccttttttctggttaattgatctgcaaaagactacattcatttctcaccgatgacaaggggattcccttttttggttcttctaccatctgcatagacactgctttattccccgaaagttccctaacgattcctgcacaacttaccaattgttctttttcttacctaaattcattctttgccacctcatgtggattaaatcatccttttttagactgtattcttggccacatttgctcagcctgttacttgacaaactcggccattatctggatatttcctttttccaaaccagctccaaatgttcactgaccccctgacttgccctttttaccaaagcctgcctttcgtcctttcccctattaggagtccccatagatggcttgttcatgtataaactccatttgtctcaaaatcctttgcaaatatagctccccccggttgcattatgtttccacctgtttccgggcatcgcctacaagcttgacaaaacagtgcgactcttatttgaatatctacgggatgagcacttgaaactggggtgttctgaattg

SEQ ID NO: 14763 - DNA, 381 bp, Glycine max
  Clone ID: PAT_MRT3847_113337C.1
ctggagagacatacaatggtgaagatctagtgtgctactcttggggttataacagccgtggccaattaggcttgggggatcgagagagcagactgcatccggaagttgttagaacatttgacgaggagtccccttatgaggtagcatgtggtgcctttcacactgctttgctcactcttaaaaagaaacctagtgacacagtagaaagcacatgctggacctttggccttgggggtaatggccagcttgggcatggaactacacaaagcacattatttcctacacctgttaaagaattgccacaaaatgtatcacttatctgtgttgactgtggtttgtttcatactagttgttgtttcctcaaatggggatgtgtggtca

SEQ ID NO: 14764 - DNA, 346 bp, Glycine max
  Clone ID: PAT_MRT3847_113338C.1
tactgtcgcaaaaagatcacagtcagctacggttgcgagaatgactacacatgggtctaagtgttgacaaggtagaccttcatcggaccaatgccatcaaagccgtcgctaagaaaaagtcattgcaattgggcaactttgctagcacatgtgatcatcatcgtggttacacctttataataattttatccatgcagagtcctaagtgttctgtttaagttatatttataagtctctgccgacttcacgtacccgtaactttcaaaactatagttcttgatcagaggtggtcaattttcactgctgtcagtttttgatgagtactgttttttgttttgatggtaag

SEQ ID NO: 14765 - DNA, 385 bp, Glycine max
  Clone ID: PAT_MRT3847_113339C.1
ggctcgtgatcccctttttcttagtaccaactttttggacaaaattttttcccctttcccctttgagactattcaatgctgagtcgctttatccaatctcaacgtttgagtttttcaggcatccattcattagtttcatcatctggacattcatcaagctttttttagggtatgattcgtaatgtgcgtatggtgggttttgctggaagatttgtttgaacgtacttcggatgtttgaaataattctgggtgtaccttactatcaaccaatttggatttggatcaactaattgcgacgcgctgctggcattgatgactctggttatgggatctccaataatcaccgtttttcattgtcagtatgttgttttaaacgacatgagat

SEQ ID NO: 14766 - DNA, 556 bp, Glycine max
  Clone ID: PAT_MRT3847_11333C.1
tttctttttttttttttttttttttgttttttttggtttttctaactaggaaaaatcccttttttttaaagtttaccgaaaatttaatgtcttcctaaaaaccgaacctgagcaactgattaaaccgattaggctttaaaccactcttggatctgagggggggggaatttcctgattaaagtgccccgaaacaatttttgaatcaagttccgggatcaacctaacccatggcttttattgatcaactaatgctaccatacgcaaatcacatgtgtttacttgggaagagccgaaccttttttcaccttaaaaattagcacatggttgataacttttaagaatcttcctaaatcgcctcagttcctttaaaaaagctttgaccaacccaatgatctgtgcacaccataagctatgcggaggcgaccattttatgacccatttaacgcgcggaaagtcacaaggctaatgacctatttttgccatacaaacgaagttgcccacaagggaacttgctccaactatatcatggtgcacactgccgggaattcaggaggcc

SEQ ID NO: 14767 - DNA, 1130 bp, Glycine max
  Clone ID: PAT_MRT3847_113340C.1
ccgccctccacgcgtatctttgctattacctctttttccaaactctaaaaatttttagttccacaaaaccaaaccaaaatggcagcagcctcggcctcatccaccatgatatcaacaccagccttataattctctcttatcatctttgttattacctctttccaaagtccaaattttctagttccaccaaaccaaaccaaaccaaaatggcagcagcctcagcctcatccatgatatcaacaccagccttatctccaaccatccaaaagcaccatcatttgaagccatccaacgtgtgcttccaaggtcttagacccctcgcaaggttcaccaaagcctcatcaaccaaagtgagcaccaccaccaaaagggttattccaaagggtggtgttagagctgaactcaactcagcccttgtgataagcctcagcactggcctctccctcttcttgggaaggtttgtgttcttcaacttccaaagggagaacgtggcaaagcaagtgcctgagcagaacggcctcacacactttgaggctggtgatacacgtgccaaggagtatgtcagcctcctcaaatccaatgaccctgttggattcaacattgttgatgtcttggcttggggctccattggccatgttgttgcttactacatcttggccaccactagcaatggctatgaccctgcattctttggctgatttaatttcatcatcatgttgttccaactgtgtttcttgcttactttttagtatgtaatgtaatcaatgtcatgatgtataggttctctctaaagatccaacaagttcagcatatgctaatttgatcactattttcggctgcaatttggtttgctattatgattaatggaaaatgggacttctctacgtattgaatttggattctctttatcatgttccgctgtgtttgttgctttatattttttttcttgctagtttgtaatgcgatgtataggttctctcttgttcaagcaagtccagcatatgctaatttggtcactcttttgggctgctatttggtttgctattgtgattaatggaaaatgggacttctctctcttttttgaatttgaattctctttattatcaaaaaaaaaaaaatataaaaagggc

SEQ ID NO: 14768 - DNA, 552 bp, Glycine max
  unsure (1)..(552): unsure at all n locations
  Clone ID: PAT_MRT3847_113341C.1
gccagttgggcaaggtcttcttggtgctggggaagacagaatggagcaatcatattcatgggagaattgggctcttgacaaggaaatgggggaggatgaggaggagttccttcgcgacatccttagtaaaccggctttttcttccgagagtgaaagtcaagcaccagttgtctcatgctctgccaaaagcaaaagggctccgatgacatacattttgtcttttgataactccaccataacaccagcaccttcttccccccccaccctagaggcccaacctggaaagagggctaaaagagcttcccacattatggctgaaagaaaaaggagacagcaactcacccagagcttcattgcactttcagccaccatccctggcttgaacaagattctgctctcatctctcgcctcggtactggaaatgaaatagcggaatcctatgtagagattttagtatattcttttttttttttaattcttttctttgtagattaacttttttagagacgttattagaatattagttccgtacttaanaaaaaaaaaanaana

SEQ ID NO: 14769 - DNA, 314 bp, Glycine max
  Clone ID: PAT_MRT3847_113342C.1
ggcccacttttccttcttccatggtttgcctctctctctctctctctctctactctcctttcatttcagaaatcatggggaaataaacataattaatctccgaaataaacaaaacatttttcgtgacattcgatgaatgatatgaaggtgagaagtgggttgtgcgtgtggccaaatttgagacaactttgctttagaaaaggcattctatatgggtttatgcgattgttttctactccgttgaaaacgctgcgtggagctagccgctcgctgagagtggctcaattttgcagtgttgccaatatgtcttcctc

SEQ ID NO: 14770 - DNA, 1509 bp, Glycine max
  Clone ID: PAT_MRT3847_113343C.1
ccggatttcccttgtcgttccacgcgcccgactgatgccagagacgacagaagggggctgcgagaagacgagaggaggctaccttgtgtcaaggcaactaaagctgctctcgatatgcaagagggaaagcagagaaagataggataggagaggtacatagcatagaaatgttgattgcctataaaggtgagaatccagaggaagggggagttcaaggagatggagcaaataaagcacagaacagttgaagtgaatggcataaaaatgcatgttgcagagaaaggagagggtccagtggtgttgttcctccacggcttccctgagctctggtactcatggcgccatcagattctctctctcagctccctcggctaccgcgccgtcgctcccgatctccgtggctacggtgacaccgaagcaccaccttcaatcagcagctacaactgcttccacatagtgggtgatctcgttgcgcttattgactctctgggtgtccaacaagtgttccttgtggctcatgactggggagccatcataggttggtatctatgcatgtttcgccctgacaaagttaaggcctatgtctgcctcagtgtccctctcctccgcagagacccaaacatcagaacggtggatggcatgcgtgctttgtatggagacgactactatgtctgcagatttcagaaaccaggggaaatggaggctcagatggctgaagttggcactgagtatgttctcaaaaacatccttacaactcgcaatcctggtcctccaattcttcccaagggaaggtttcaattcaatccagaaatgcccaacaccttgccctcttggctcacagaagaagatctcgcctattatgtctccaaatttgagaaaaccggattcactggacccttgaactactacagaaatttcaacttaaattgggagttgacggcaccatggacaggagggcaaatcaaggtgcccgtaaaatacataacaggtgagttggacatggtatacaactcgctgaacttgaaggagtatatccacggcggagggttcaagcaagatgtgccaaatttagaacaagtgattgtgcagaaaggagtggctcacttcaataatcaagaagcagcagaggaaatcgataattacatatacgattttatcaacaagttctgatcttgtccaaaaacgaattcaaccagatataaagtcgcagctgaagtgaaagggtgttataattgcgcttttgttttgatatttaaggtatcgagatcttttttatgggcaggattcatcaactgcagaaaacctccataccatcaaccttcctatgcttgtttgtattaattaactgataataatactgtatggtttggtacttgctaaataaacttagtcttgtcatgcaaatggtatatcttaaaaaatgttttgaagtatgtgtatttggaactaagcttcaaaaaaaaaaaaaattagggcttatggcatatttgggatgacattatgcataaa

SEQ ID NO: 14771 - DNA, 192 bp, Glycine max
  Clone ID: PAT_MRT3847_113344C.1
ctgcaggtcaagagcggtaccgtgccattacctgaagagttctgatcacatacctcttattcccttaataccaatgtgtatgctctccatcactttaagatctcccatactaacgcctttttacgacgaatctttctcctgtttcatccataacagctttacgcccgttttctaacttccaccacattttct

SEQ ID NO: 14772 - DNA, 692 bp, Glycine max
  Clone ID: PAT_MRT3847_113345C.1
ctgtttggaaaggcgatccgttcgggcctttttgctattacgacaactggcgaaaaggggatgtgctgcaaggccatttaattgggtaaagccagggttttttcaatcccaacgttttaacaaatctgcattgtaatatccattcacaaatcacaacacaatataaaggatcaaacatataagagcaacttgcaagttataaccaaaaatgaactgtatccatgtttgcagttgtaaccaagacaatgagacaaaaagattacatgcagccaccaattagtcaaggcttgattaatacaaattttgttgcatacatcttgagctccttagaaggaggatcaaataataaagaacatacctgtctctacatctaaagataagacagcattttatcctttcttccttcaaatacatgaatgatgtcatcactccttgaatggagtcataattcctcaacaatcaactacaccactactgtcataaaagtttagaattagttcagataagcatcaagagcttctctctggaaaagggaccataatcatcattccagcaacttaccttctcccacatcttcaatcacactacatgtttcaacccttaaaaaatagccaaatcaaaagatcccaaattggctccttttttttagcataacaaagacaaatgattaaaaccttccttaaatcattttt

SEQ ID NO: 14773 - DNA, 153 bp, Glycine max
  Clone ID: PAT_MRT3847_113346C.1
gacacgcgtgcgggcactcgtcatgacacgcgtacgttataatcatatgtatagcagcggcaagtgcaagttgtgcggtttcatttactaacagcttaggcgtgagtaaacactggcctatcgggtcttcgagctctcgtctgaacagtctca

SEQ ID NO: 14774 - DNA, 681 bp, Glycine max
  unsure (1)..(681): unsure at all n locations
  Clone ID: PAT_MRT3847_113347C.1
ccacgcgtccctcttcctctcatctgggaacccttcactttgaatctccattttatgggtcgtcacagtcagatactctactctcttgtatttcacgcacgcagattgatttcacgacgtccggcgggcggctcgctcgctctttcttctttctggaatttatttaacgcaagaaaggataaccaacggtgagattagactagaatcaggatcatacaatcgagaacatgctgagataacagggattatgcacactgatatgagacttgaatcgggaacttgcaatgtgtgctgagctccttgctcatcttgcatgcatcttaaccatgctctcatggggtcaaaggctgaagagttgtctgatgaaaactgtcgcataggagaggccaatactatggatgaggataatgcatgttctcttaggagcagagcttgtgaaagctcacagcacactgtcagtgaaacaagtaatatgcagagtggtaattcaagtcatgatgctgtgtctgaaaatgccgacagtagacaaatcataccgaataagtatcaggattacaagcatttagaacgttatgatgacaacacttcttgtatcagtagagccagtgatgctaatttagcgaacgatagtcatcanaggaatgaagagagaatgatactgcatgcggaaagggatcatgt

SEQ ID NO: 14775 - DNA, 487 bp, Glycine max
  Clone ID: PAT_MRT3847_113348C.1
tgtgagctttctaccacaaattcagacataagaaaatttgctaaccagttttctttacttccagggaaacctactcataattccctaaactgcagcttatcccccatttgtcgcaaaattttgcaaatactgtaactagcacagccgctcatcactgaaactgaatgctagggtacttagcatgaaacgcgtgagaagcacctttttcataaacgggggagccccgacatcctttgtaaaacagttgagccttgaaagtacgcagcaaaagctctagaagatcgagagcgaacctataccatcaacttacctattaggcaaagctttgtcagttccagtggcggactctggtgaaactggaatacagggcatgctgccccaaaaggcctttctaaaggctttgggaggatggaggccttagttaagggttcaaaacttgggatttgcatgagctccacccataacatcaacattctctttataagga

SEQ ID NO: 14776 - DNA, 201 bp, Glycine max
  Clone ID: PAT_MRT3847_113349C.1
caaatactgctcatgggtcttcagatactcgtcccctcttttattaagttttagaattcgcaggtcaaactggtcttaaggggctcattgtaatgctacgcacgaccggagttcgcctgcaaaagtcacaccaacatgccccttacccttaagagtgctcctcaaagcacgtggtttggccccgatcgtcccaagaacctt

SEQ ID NO: 14777 - DNA, 520 bp, Glycine max
  Clone ID: PAT_MRT3847_11334C.1
cggtccagcaattgcaggagaaagcgggggagcgtaatcacaccaccgactcaatgtgctttttcttccatatccgacacctgggcatttacttcctatgggggacacagcaagagtatttgcgaagcgtggggtgagtgtgactattctcactacccctgctattgcgttcaacagtggcaaaatgcgctagacagtgacttcaatggtggggatcacatcagaactcaagtggggccattcccttcaggccaagtgtgggctcattgaggggcttgaaaacatggaagatgccactaccctagaaatgtgtgggaaaatcggggatgggctatcaacgctccaagaggagatggagcttcggtgtcaagaccttcaaccagattgtgtagtgactgagatgaggtgtccttggacaggggaatcaggtgaaaaactaggcattccaaggattttcttttacaggtcaagcgacttctccaactgtgcttctcattttatcaggaggcatagacctcat

SEQ ID NO: 14778 - DNA, 428 bp, Glycine max
  Clone ID: PAT_MRT3847_113350C.1
gattcagatgagtatcatgacctcatcatcaaagtgttcaagcaaatttggtttgatttgactcaaccaaggtagtagtagtaaattctaaagatctcaagttattgtttaaattgcagttttgttagaatcctttgatattgtaagaaattgcagataaattacgtaaacaaaaaatccaaaaatctttatgttgcggtcaaaatcactgtgacatgccgtttattaaaaccttgatggggctcgagttgtatgcaaatatggttctcaaaatttgtaatgttttaaagctttattaatgtagacaaaaattcttaattagttttcaggcttttaatttttcatataatttttttttatctgtgtaattatgcatgtaatatattttggaaagttgaatagactctagtgctaagccaaatgaaaca

SEQ ID NO: 14779 - DNA, 202 bp, Glycine max
  Clone ID: PAT_MRT3847_113351C.1
ggtgcattccatgcaaaggattatgaatgcttctggttcaaatggtaatattggtctactggtgggcattgatttggtgggtttacaaagggcaaggaaaggtttttcaaacccgaatggtttttgtgataaggctggggtggcttacacacaaaaaattctttgtgggaatttttcaatggattcttggttaccaattttt

SEQ ID NO: 14780 - DNA, 410 bp, Glycine max
  unsure (1)..(410): unsure at all n locations
  Clone ID: PAT_MRT3847_113352C.1
gacccacgcgnccgctccaaaacaagcaaacacaactttggtctcttctgctctctctctcagatgcgcgcgccggtttatcatatctgatagtccataaccgtttcctctcaccacatatagccctaccggaaagcttgctcaaacacaacatgcttcgacggctgtcccatctcaacaaacatctataggaataaacgctgcaaatgacagttgtcattgctaccgagaagaaattgccatctatattcagttgatgaatcatcagtccactaaaatacatgtatcaacaccaaatataggggtcatatacagtatcattgttcccgatattcgagttttcgttcatacaagcacgaaacaagccgaacactatcaccgtacatataaagaaccaattcctggcactc

SEQ ID NO: 14781 - DNA, 400 bp, Glycine max
  Clone ID: PAT_MRT3847_113353C.1
aaaattatactcaaagtttatatccctggatggaggtttgtacctactactactcatagaaggattaaggaaatagatagagttataaaagctttgcttatggatatgattaacaagagagagaaagcgctaaaggcggatgaagccactaaaaacaacttgttagatatacttctggagtcaaatcacaaggaaattcaagaacacaaaaataataagaatgttggattgaatcttgaggaagttattcaggaatgcaagctattttactttgcagggcaggagaccacttcagttttgcttgtttggacaatgatattattgagtaggtaccctgattggcaaacacgcgcaagggaggaagtcttaaaggtttttggaaaccaaaaaccaaattttg

SEQ ID NO: 14782 - DNA, 1101 bp, Glycine max
  Clone ID: PAT_MRT3847_113354C.1
acttggcacttgacagtcacaccctcgtaactgaaacttgtaaacaaaataatgataagtatgaagtaaaaatccaaattacaacttatgccaataatcacatcaaattataaacccccttccaagtctatgacttgggtaggtgtttagccttgccacaaaacagtgcattgggaggaagaagagtctcagtgtatacgctctgctcattgttccacaccctcagatacaattcttgtcctaaatacctttggggccagattgcagatctcaagttccacatacccttattgtccaaagataccaatatggcactccaagaatttggatacacctgaacagtgtgtctagtcatcccatcaaccaagttgtaagtctttctcgaatcagggatccacaagccattgccatatccaacaacatagaagctagatccatccatgtgccatgactgcgtgtaattctcattgttttggaagattatttctgcaaagtcatggagggtgaatcctatgacagatgtgcctagtttggcaggggtgccttgaggggaaggaacatctttgattgtgttgaggtcaaagacacctggaatgttgaaccaatcagcaagcttcaacggggtgtttgggttgatgtgggaaattccattcactgcatatcgtagctttccattaattatggctttagaatttgccaacacaagtgtcctttgaacagggatggttccatagtggaatgagccctgaggatttggtcgagctgcatttgctgtcaaattcagtctgatggttctggcttgctttatggaccattctacatcgttggttgctgggccagagcgcgttggaatttgggccttactgttggagccagaatagcgaagggttgctgtggtagtgagaacaatagggtcggtaaaacggcttgatgcaacaatgatatagtcacttattgacccactaagtgtgaccaaaacagtgactgattgacccacatgaacatcaagggaatcgtacgattcctggattgtgtgagaaccttcaacttcaatgatcttcaacaaatggccctgaatcctgaagttaaatgaggttgacc

SEQ ID NO: 14783 - DNA, 836 bp, Glycine max
  Clone ID: PAT_MRT3847_113355C.1
cggccgctcaggcggcgggcgggattcatcgtccgtagatagcgagagctccctcaacatcgaggcgaaacccatttcaattctcaaatccaagctcgggaacagagaaggagaaagagaatggacgccattgattctgtgttcgatccgttgagagaattcgcaaaggacagcgtgaggctcgtgaagcgctgccacaaacccgatcgcaaagaattctccaaggttgccgtgcgtaccgcaattggtttcgttgtgatgggattcgtgggtttcttcgtgaagcttattttcattccaattaacaacatcatcgtcggatctggttaggatgaagggtactacaatcgcctcaggaattcaggttgtcaagcaaaagtaggcagaaagagttcccacatcaatagatcattctatgccctcaatcttagttctgttttcatttttgtttttttttctcatctcaggaagtgttacttactttagacgtaaaattttatgtatcctctgttagaccttgatacattgttttgatttaggataaggaggaaaaacaatgttgaaactgtagttttgtttgattctatgttaactttgctttagagtttccttatgatggctttttattggccatcgaactgaatccgagtttaaagtttcaaaagaaaaaaagttgaaggtatctagggtgggggtcgcactcctttgtgcctcgtcactttcagctttccctctttgaaggattcttcactctcctcgcctccccacggcgccgatgacatcaattgcttcttccccttcttcgtcatgcttcttcttcaaccttccttatcctc

SEQ ID NO: 14784 - DNA, 371 bp, Glycine max
  Clone ID: PAT_MRT3847_113356C.1
accacagaaggggggggggggcttgtggaatgttccgctcgtttcctccctgcagaaaggtcctagatgtgtatatacatccacaaggttgtgtgaatattgaggatgggagttaaaagcagcaaacccaaaacatcgccgttttacatggggacttagagcagctgagagacatggggtggactggtacatatctgatatccaatctggattgagagcattggttaaaacaggttatggagcaagggtgactccttatgttgatgactccgttgatattgatgttaaatcagccaatggagacatggtccctgagtttctcaggtggctgggcgagagaaaatttgctagcggaggccgtataatgcaat

SEQ ID NO: 14785 - DNA, 265 bp, Glycine max
  Clone ID: PAT_MRT3847_113357C.1
cccacgcgtacgcttgtgttcttttattactgccaacaaatattgggtatcattaatgctctagcgtgcccctctaccattggcggtgtcagccaacttttcaactcccacatgctcccaccactcaattttgaatgtctaacaatccactcctacactaatggaagagtaacaacccgcctctggattaacatctgttcggggacacactgtggatacacatgaagcacccccatatcacactatacactactcttatgcttga

SEQ ID NO: 14786 - DNA, 323 bp, Glycine max
  Clone ID: PAT_MRT3847_113358C.1
cgcacgttagcacagcgtatcattgccatggcaacatggaactgcgcatctctctccttgacgggacgcgtctccttgacgtggactcgggatcaagctggagtcatcagccacacaggtgcgacgggtgcgcatgacgaacaccgtcaccaggcacgtctccacaggaagcccatggtacggcccagactgagtcaagtacttgggcccattctctggcgagcccccgtcctacctaaccggtgagttcccaagcgactacggctgggacactgctgggctttccgcagaccagaagacttcgccacgaaccgtgaactcga

SEQ ID NO: 14787 - DNA, 318 bp, Glycine max
  unsure (1)..(318): unsure at all n locations
  Clone ID: PAT_MRT3847_113359C.1
cacatgcactcgtacattcggctcgaggtgaaatggagagattcaagatctgtgataaggagacacagacaataagcattcttcaaacgaagcttatgtcagcagcctaaaacttatcctagagggaacgctgggtcanacacaanggattggttgaacaatgctgttgggcgagtcaaaaaatcaaattgataactatgaagctgatcttgaaggactttctgtcaagaaaggaaagaacaggcctcccagattgacacatctacaaacatcaattacttcgttcaacgctcatataaaaaaatgtgaatttatctt

SEQ ID NO: 14788 - DNA, 648 bp, Glycine max
  Clone ID: PAT_MRT3847_11335C.1
gggaactgaaaatcaaggaaaaggagaaggatcaaccaacatcatatattgagttaaagccaaagccatatatatcgttcaattcctccctctcttctgcagctagcgatcgaccatggcggagaggggtagagcattacctaagtttggggactgggatgtgaataatccatcagcagctcaggatttctcagtaatcttcaacaaagccaggaatgagagaaagactggtgctaataagatccactttcccccaaatcataataacacaacaaaatgcatccccccccaggtcgttcttggcaagtcccattataaaaaatggttttgctgtataaacacatctgcagaatcatgaagaggtccgaaacgtaagatagttaagttgttcatatctggagctatatatatatatatatatatgatggctcctgctggaatctcttctcatatatctatacctagtgtccgtacttgggctttattaggatacaaatattattgcatcatacacttctctctgtattgtttccactttacagtagagtttgatatttgtgtataactatattcttatttaaaaaaaaaaaaaaaaaaaaaaaaagaaaaaataaaaaaaaaaaaaaaaaaaaaaaaaaaaagaaaaaa

SEQ ID NO: 14789 - DNA, 715 bp, Glycine max
  unsure (1)..(715): unsure at all n locations
  Clone ID: PAT_MRT3847_113360C.1
ctatnnnctttcctagtaaaacggcagtgacttttcaatatacattcataaaccctggccccaatatcactaaacaaatgatcctattcttaaaacgacctaaatttatcatctctatcattccatttacataaaacgttgatataaaaaaataataacaaattatattgaaaatggaggcaattttcatcaattacccaacttaaattgataagcaaccagggcaccctgcagccataggtgatgatgaaacattcagcctctcttcacattcatcttcttgaattgtggtttccctaatcgacgacgacgaggaggaatacgaaggcgacgacaccgagagaggtgacttcaagaatgaggttcttttcctgacaataggctctttctctgccctttctagtgctgacttgaccttgtcaagggtgcacacactctggtagttgttgcttgaggggagtgtggatgagaccaatttaaggtccaaacttgtttcatcaaagnngttcaatagcacattggagggggatgatgatgggaagtttaggtcttggagttttggccctgctggctttgcattcagcttgttgtgttcagnnattggtggaaagcctattgtggtgttgcacttttggagatagacttttcctgactgannnncgagtctcttctnncnnnnnctnagaacctgcaaatnnnnnnncaattcctgtga

SEQ ID NO: 14790 - DNA, 1094 bp, Glycine max
  Clone ID: PAT_MRT3847_113361C.1
tagctggaattcggctcgagcacccatttggtttcatctctttctctctctctctccatattttttctatcttctttctctctctctctctagaatcctctgtgagaacgcgcacagcaatggctgctgaggttagctctctgattcgggtgatgggtggtggctacaaggaggagcagcatcggacggtggggaatgaatcacacggtgagaaatcaacggctctgattactcgggacttgcttggtgggtcctcctcaattgaatcccaggaattggacctcgatttgcaggttcctagtggctgggagaagagactcgaccttcagtcaggaaaagtctatctccaaaagtgcaacaccacaataggctctccaccaatctatgaccacaacaagctcaatgcaaagccagcagggccaaaactccaagacttaaacttcccatcatcatctacctccaatgtgctattgaacctctttgatgaaacaagcttggacctcaaattggtctcatccacactcccttcaagcaacaactaccaaagtgtgtgcacccttgacaaggtcaagtcagcacttgagagggcagagaaagagcctattgttaggaaaagaacctcattcttgaagtcacctctctcggcttcatcgccgtcgtattcctcctcgtcgtcatcgattagggaaacaattcaagaagaagaatgtgaagagagacttaatgtttcatcatcccctttggctgcagggtgccctggttgcttatcatatgtaatgatcatgaagaacaaccccaagtgtcctaggtgtaactctcttgttcctattccttccatgaagaaacctagaattgacctcaatatatcaatttaagtgaggtaattgatgaaaattgtctccattttcaatataatttgttatttctttatatcaacgtatttgtaaatggaatatgatagatgatgataaatttaggtcgtttaaggataggatcatttgtttagcgatattggggccagggtttatgaatgtatattgaaaagtcactgccgttttactagcaaagttaatagaaaattctccaatttctgc

SEQ ID NO: 14791 - DNA, 287 bp, Glycine max
  unsure (1)..(287): unsure at all n locations
  Clone ID: PAT_MRT3847_113362C.1
cccacgcggccgcccacgcataacaaaaccattacatatttttttatataaaanaaaaatataaaaacccctgctcttttctttctaaaaanccccccccccaccancatanactnttacancaacaataactaanttctaccctactattatcttatcactctttaccatctacatacttcaaacattcnaaatatcttctaatcaacacttattccacttttataacaacaatatcaaacatttaacacaaaatatcaatacttaccaattcccattacaattct

SEQ ID NO: 14792 - DNA, 371 bp, Glycine max
  Clone ID: PAT_MRT3847_113363C.1
gcgcccacgtttccggaggaatcagataccatcctgaggctgaccctgatgaagtgaatgctgtagctcaacttatgacatggacagcagctgttgcaaatctaccatatggtggggccgaaggagggccagggcgtgacccatggaaggtaagagtatctgcataagaaggagtgactagagtttatacacatgccctacaagatgtgattggatctcacactaatgtgccacctcctgatactggagctggaccacataacacggtgtggtttcttgatgagctttacaaagtacccggccactctgctgctgtctacactggaaaacctatagatcttgacgacactgtgaaactatacgctgataca

SEQ ID NO: 14793 - DNA, 2236 bp, Glycine max
  unsure (1)..(2236): unsure at all n locations
  Clone ID: PAT_MRT3847_113364C.1
agataagttttatatttttaacataataaatattttcaatttcatcaagtatattttattttatatcctcaataattagtatttgttttttctttattagctggattgttgaaaatgaacaattatttttgggtacatgacgaagaaatagcatgcatatatgagaatacatgaatccttcaaattttatttagttgtttcggtataataaatagcagctaatgttgagaagtgcagttaggccagccaacaagcttgggtgatagtgttttaaggacagggttgctctcgaagaaattggttggcctcagctcaaacccgccactcaatgttggcataactggaaaatcttcctggcaagggacatgatgaaatcccattgtgtaccacaatactatgtccttgttctcaatcttcctattcctgcgactccaaaccgccaaagtatcatcgcctctgctacgatcaacatataagccccccacccatttctcggatttgttataaggtgtgacccatacatcgtaattggtgaaagcagctctgatttgtggataatcatcattaagcaaaagtgggcgcgctgctgggcctggaagcaaacgatagccaattttatttccttgttttgactttttattaggatttaccactagtagctgtgaaggcttggaccctaggttgatttttgcatcagcttcagttttagccgtttcacttacaaccgtccaataacttttcctgggtgtggtgtcatctttcactctcactgtctccaaattggacttcacaaaggagttggcttcaccatcaatgtcaaggtcaagataataggtgaagaagtggtcatggtagataccaatggtattatctgctattagtgtgccgtaaatatcctcttttatttggtctgtgttggtgtaagtccctgccttaagccctaatatcccagtaagtccaaccacagatttgatgctgccacttggcttaaattcccaatctatgacatagtcgtagttggccacagttgaaaccattctcaccactaggcttacatcagatctaacctcagtaatcacttcatctgggattccaacttctgtatgacgccacatgatatcaccagcatacttttcaaatatacagaaggcattagatatctttacaggggtaccatctgaactagcatagtatgcatctatgaattcagcattgggaggacaatcggtcaaaggttgcaatgaagacactagttctagatcgcgatattcaccagagtcaaagaatgttgcgtaataccattcctcacttgggtcttggtatggcacaaacaactctgatacgaatcctttgtatagtaccggacgatatttctgcttttggagatcataaattgatgcctgagaaattactaggccagcccgaatgtcaaatccattaacaataaatttatttaggaaacattttcttaaaaaaatagtttaggaccaaaaataaaaatttaattaaccctaaaaaattaagaaattacatatatgaggatatgtaaatccatcaaattttatttagttttttcagtccaatgcgcaccagctaatgttgagaagtgcagttagggaaatgcacaggcttgggtgattttgttttaagaaccgggtttctctcgaagaaattggttggcctcagctcccatttctgtaatggcattggcactattggatagtcttcttggggagttctccaaaccaaccaaaactttaggcattacaccgcaccagagagatattgagacccctatccctcgagaatcccaatagcaatggtttcatcgcctctgctacgatcgacgtatgaccctcctacccatttctcagatttgttgtatggtgtgacccatacattgtaattggtgaaggcagctctgatttgtggatagtcatcattaagcaaaagtgggtgtgccactggacctggaagcaaacggtacccaattttatttccttgtttagtctttttattaggatttaccactagtagctctgaaggcttggaccctaggttgatttttgcatcagcttcagttttagccgtttcacttacaaccgtccaataacttttcctggntgtggtgtcatctttcactctcactgtctccaaattggacttcacaaaggagttggcttcaccatcaatgtcaaggtcaagataataggtgaagaagtggtcatggtatata

SEQ ID NO: 14794 - DNA, 234 bp, Glycine max
  unsure (1)..(234): unsure at all n locations
  Clone ID: PAT_MRT3847_113365C.1
ctccattggtccttaaagattcatcagtcattaccatggccaagctagtgnttccgctttgttttctgcttttcagtggctgttngttcgatttcagttccagagagcagcttgtataaaacgagtgccagatcgaaaaactcaatgtcgtcaaaccggataagcgtatagagtcagaaggagggctcattgagacatggaaccctagcaacaagccattccagtgtgccggtg

SEQ ID NO: 14795 - DNA, 306 bp, Glycine max
  Clone ID: PAT_MRT3847_113366C.1
ccgagacaggtaaaagagtgctattgtcggctttggaggtactgcgtgcgtgagcggaagtgtgtagtggtgcgcttaaatactgttagcacaggtgcaggcgaggcgtgcaagaggagcaattgcaaggcagctacaaagctagaagctacaactacacacaaaacccgacaaaactggaacatagacacccaaaatgggctggagaggtgttgggggtttggtggtgagatatgcgatagagagatcgaggagcgcctgtgtgataccataaaactaatgaatacaagctggtacatagctaga

SEQ ID NO: 14796 - DNA, 430 bp, Glycine max
  Clone ID: PAT_MRT3847_113367C.1
tccaggtccgtcaccgtcacctatgattccacacacacacccacaaacacaaccacagtctatggaatatagtatatactaacacaaacacgaagacaagtcgccggtcgggctacaacaacaccggaacacaaccacgcattcaactcaacagcggattaatactggttaaaccatcggtggtggtggttgttgttgttgttgtggttgtgtcattgaataagtttagctgctggtttgattgttctacaagtagtaacgcctaataaagccagaggcaagagatgggggcctaaagctggtagtgagcgatagtattcaaacggcgtgagtactagatgaaagagtataaataaattaacaagtaagccctatcgcagcatttgctagggcggcgcagtgctgcgtgttggggcctacggctaatggg

SEQ ID NO: 14797 - DNA, 477 bp, Glycine max
  Clone ID: PAT_MRT3847_113368C.1
aagccgggccgcctccgggccccggtcccggattccaggcacgccccacgtttccggttcggcaacgatggaaagcggaggacaggttggcggaccttaaccaccggcatcagaaccgcacgggcctccatttctttaatcttcaccttgctatctccgtttttgagtgctatagattagggggaggaaaatcgctctcttaattgtgcacagaactacggacaaatagccaacaacactccatgttcatttggtgagcacgctcctataagatctactgactgtgtgccaaatctaaacttatgatgtctgattcctcagttctatgttgaatttccagttcaagactgggaaatatcggatgactacgtcccactagtactatctggaatatgatagaccgggcagacgttcatatttgggttcatcctcatgctctctccttcatactgcaacccatagtcacttaaagtggtg

SEQ ID NO: 14798 - DNA, 684 bp, Glycine max
  Clone ID: PAT_MRT3847_113369C.1
tcgagggaaaaaaaatagcaaacaagtaacatggtgcttattatttattatttacaaaaggaggttcataaattaaaaaataccactgtatatatgagttgtaagtggttgaatcattcttacgatcttgcgttatagattatagattatttacattgacacgaattgtcagcatgagtaactttttatggatcatttgccaatccatgtggattaaagatatataacattcttttcattgacctaaatgtagctaagagtctcttcaaggattagcaacgcaaaaatcattctaattatagattgtgacatgtactcaaaccattcacaatcagtgagagatgccctttgttttttcatggatgaagagaaaggccaagaaattgcttttgtgcagtttcctcaaaattttgagaacctcggtaagaatgatttgtatgggaatgctatatcagcaactgtggaggtgagttagataatattgatggactagaataatgttcatccagaaagattaaattctttcttttgccttacccctgtttctatttgatttcatttgtagatagactttggagtataacgctaagattatatatacttgtcgatttgatttgtagatagacttttgagtataatttgtaagattgtgtgtcttttttgaaaagtacataattttagtgc

SEQ ID NO: 14799 - DNA, 546 bp, Glycine max
  Clone ID: PAT_MRT3847_11336C.1
atccaactttcgccccgcattttttttttactgaatggaggtgacttccaattgaaaaaagggattcatggcctcccctgtctaccttgacacaacgacaagttgacattctacaaattgcacccttctgaacttaccaaggacttgaactcatgcaaataaacaattcaaaattattaacaacaattatcaccttcaatattttctgaccattcgaagaggcccggagatgaggacccttcaccgccttacaacatgttctcaaatgtgctagacatgaatgctctttttggtggcttaaattctgcatgggcgcaaactaaatactctgagcaggcgattaatgttaacgctcttagagcactaaatcttcttttgaaggccccttacaaatgatttgttggccattttcaccattacactttaggaagaccgattttactctagaacctatgacttgttcgcatgctccaacacttttattcctcgaaactgaaaattacagatggctaatacttgacttgttcatttcgatagacagcatac

SEQ ID NO: 14800 - DNA, 184 bp, Glycine max
  Clone ID: PAT_MRT3847_113370C.1
atatatataatccacaaaatgaaactcggtagtggatattggcagacaacattgcacttgttgaactaactgttcctaagagaaaatttcgactttccgggaaagctctggaaagtagcaccacaaccacagcctcaaactcaaaacccaaatgcagcttgacatgaatccatgccaaagaact

SEQ ID NO: 14801 - DNA, 1691 bp, Glycine max
  Clone ID: PAT_MRT3847_113371C.1
ctagcttggagggttgtactgtcaatgcaacacccatcacacaatattagaaatatcaatgaataacataattgctccaatgaaaaaaaattaaaatataagaaatagaattaactcgactgcaagtgcaaggctcgagcaggatagaaaatttgaatggagagtggtgaagactattccctgtttgagactaggaaagacaaaggaaggcacattcgaaggatctatgcaatctctttgtttgtggccatatgcttcatctgggcttacagattgagccacatacccgcatatggcaaatgggcttggcttggtttgtttgctgcagaactctggtccggtttctattggctctttggtcaagccctccgctggaacatgctgttcagaaaaaccttcatcaatagactctctgaaagatatgagaatagcttgccgagagtggacatgtttgtgttcacggcagacccaatcattgagccacccatgatggtgattaatacagtgttatctgtgatggcttatgactatccagcagagaagctcagtgtgtatctctcggatgatgcaggctcagacataactttttatgctcttttagaggcttctacctttgccaagcattgggtgccattctgcaagagatttaaggtggaaccgaggtcacctgctgcttattttaatacccttgtatcaacaaactcacacgaccataaccatgccaaagacttagatgccatcaagaaactatacgtagatatgaaaagacgaatagaagatgtagtcaagttgggtggagtacccagcgaagcaagatcaaagcataatgggttttctcaatgggattcgtattattctcgacatgatcacgatacaatccttcagatactacttcatgaaaggaacccgcacaattcgaaggatgtagatgggtttgttatgtaaactctgggcaaacagctccatggtgcttatcaatatcatcacaaccaaaagctaggttctaaattcattcattgacctaaatgtagctaagagtctcttcaaggattagcaacgcaaaaatcattctaattatagattgcgagatgtaaacaatccatcactggagagtggtgaagacctttcttttttcaaggatagaaagaacgaaggagaaattgcttttgggcagtttccaaaaaattttgagatcctcggtatgaatcatttggatgggaagactatatcagaaactcggaaatggcaaatgggcttggcttggtttgtttgctgcagaactctggtccggtttctattggctctttgccctgcctttcgctgggacgtgctgttcggccaagaaattgcggtgagttagataatattgatggactagaataatgttcatccagaaagattaaattctttccttttgccttacccctgtttctatttgatttcatttgtagatagactttggagtataacgctaagattatatatacttgtcgatttgatttgtagatagacttttgagtataatttgtaagattgtgtgtcttttttgaaaagtacataattttagtgcaaaaagaaaggaatttttattgtttttctaaaagttgtggaatttaaagactatatgattaaacatgacttaaatgaattgattactattacatatatcaatataatacatgtaatttttt

SEQ ID NO: 14802 - DNA, 348 bp, Glycine max
  Clone ID: PAT_MRT3847_113372C.1
gacagcggagcatttgatagatggaaactgcaacagcctttggtgtgctaccctgattatgcctaatcataagcttagaacgacacacatggaatcttccattgctctagtgactatcattgatgttatctttgtctacatgctcattcaaggagccactgctgactatggtagtagtcacagtgcttatgccactatttatgtcgatgctgatgcttctggcacaatgggaggagcatgtgcatatggaaatcactatagccatcgctatggaactgacactagggctctaaccactgctttggtcaacaatactttaacctgtggagcttgctatgcaatgacatg

SEQ ID NO: 14803 - DNA, 606 bp, Glycine max
  Clone ID: PAT_MRT3847_113373C.1
ccacgcgtccgtctctctctctctctctctcggtgtgtctctatctcattcccgttgtagcagccacttcgcgacacgatgcataggcaatccctgggttctccctctcccaagctccccaagctagagacgctcgtcaccgacgaagacgatgctcccaaacctcaccgtctcagcctctccccgccgcctccaccgccgcacaagttcgtccacctcattcctgtcctcactctcctctgcttcttcgtcctctacctcttctcccacactccctctccatcagacttgaatcatttcaccggattcaaccgctcgccatcacaccgtctagatttggcggagaagatcggcggcgacattggacaatacatggatgtaaaaagaagcgatgttttggcgatccgaagtttgcaacagattccgaaacctcgccctcacaggaaactcgccgatttttaagttcgcacgtgctcctcgctgcgtatttccttaatatattcttgttcccggtgtacattgcgatttgcctatatttatcgctcagaaagaaaaaaaatcattttcaccttctcacataagaaattttttatagcatttgggttt

SEQ ID NO: 14804 - DNA, 245 bp, Glycine max
  Clone ID: PAT_MRT3847_113374C.1
cgtagatctgttgctggttgattgttctgttccatccagttgccagatctgaatcaccggactcactctacagactcactcacactgaactggcctctgaaggcgaccatccaccagcagcagcaccagcatgcaagatcacgatcatcatcatcatgatcatgatcagcatcatcatcacgctggagcgggagcctgctccgcatcggtaggtaaggctgggtaggtgtaccatagccacgatg

SEQ ID NO: 14805 - DNA, 348 bp, Glycine max
  Clone ID: PAT_MRT3847_113375C.1
cccccctaccttagcctgggtcctttaatgggggcggcctctttctttttgattatcacacattaggactttcatgccaaagctactttttgctttgaacattctcaggcattactttgtacctctatactgttgacatgtggattcattatacagaagaagccatgagataatgtaatgaagaccccagatttatcggctcaacctcaaccttatcctttctaagattgtgcgcaattgccttcagagagcccctattttgcttgtagggatgaacttaccaaagccattacggctactctcattggtaaggcgtgactccaattatatcgggtgactcataatcat

SEQ ID NO: 14806 - DNA, 472 bp, Glycine max
  Clone ID: PAT_MRT3847_113376C.1
tgcctgatgtgacctattcccggtcgacagctcactagctcgcgcctttcttttttttttttttttttttttttttttttttttttttttttttttttttttttttttttttttttttttaggacaaaaggaaaaggccccaaattcaatttaaggggaccctttaacccaaaattttttgggaaaaccggcccatttgaaaaattttgtaaaaaccttttaaacttgggattttctttttgcacctaaaacattgggaattctaaaaaggttaccccccaggcccattccaaattttaacccttggatcagcacaacctttaggaaccgaaatttttacttgccaagtttgctttgcccccaattcaaaattgggagaaaggtcccctgttaaaagcatccccgttagcatttccaagggcaaccttgttcaagtacttgtcaaccaattggacttttttgacattttctt

SEQ ID NO: 14807 - DNA, 558 bp, Glycine max
  Clone ID: PAT_MRT3847_113377C.1
aattattgtgcacgcttagtttttgcacttcattttcacaacaattatcttaattattctcatttattgtttagtttgatcctaataaattagaatttagtgttcttttagattcttagtttaatgaagttaattttagcgaattcattagttttagttgtgttttgtagagttttggtacatcaacaacaattgaagaatttgagttgatgaagcagcccccttgcacatgcttaatacgttagagttagcttggaaggtcccatggtaagtatctagaggttgctgggagaaatttgaagtttggtgtgtgctgagctaattgttcccactgccattgatttgggttaagtgcacacctcaagcttagcgcacagtcacttaatcaagtgttgtttttgtatgcgcgtttagcgcagaagttgggcttagcgcgtaagccattttgaaaaaacgacaatacaatccttatggacctatttaaaccctttttttcatgaggatggaggtaacatcgatcaagagttgtgtgtggcaattgaggagctcccatctttc

SEQ ID NO: 14808 - DNA, 362 bp, Glycine max
  unsure (1)..(362): unsure at all n locations
  Clone ID: PAT_MRT3847_113378C.1
gggggtgcacccatctctcggcagatgagggaacttgattattttgtttatattgctgtgggaacacctatgggggatggattgaccttctcaacgagaggtgctctaaattttaatgatgttcantttgttgttcttgatgaagcttatcatattcttcatgtgggctttcattgaagacttggataatatcttggtgaggttgcccccataacatcagactcctaatgttctctgcaacattgccatcttggataatgcatattttccgcaattaccttgataattcctcttaccattgatcttgttgcatattctgatcacatatttgcagatggaatttcactgtactccattgctac

SEQ ID NO: 14809 - DNA, 263 bp, Glycine max
  unsure (1)..(263): unsure at all n locations
  Clone ID: PAT_MRT3847_113379C.1
taaaantaagatcnaatcttttaaagccccttactatactttgcaagatttgtgcattactacatatacttatttaactatacatcaaagtattgtttctccctgacttgagatattaaatataaaggggttttatttntntgtaaattgttgctgtgatgcaatgttattgtaaacttgttttcttttccttttaaaaatcatagcaaagtatgagtagtatgacttacgtcgggtttcttctatgtcttctgcttcatttg

SEQ ID NO: 14810 - DNA, 515 bp, Glycine max
  Clone ID: PAT_MRT3847_11337C.1
cacaaattgagggagctgaagaatattgcatgccttgaaccctgtgaacaactgcataggattgtagctttgtcagataatcttgtgcctggtattgtcgtgccataagcatacgtggagggagtggggaatgctcctgatgctgaacaccagccaactcttgtcccgtggggattgctaaatcctgcgtcaattgttatacatacgttgtgatagagccattctatgccaatgcataccaaatttagctatggtgtttttgtgcacaatgtttttattctgatgctattcgtaactgctccagaaattgcttgcatgcggatcccatatggtgtttcgacacaagaaactattcggttggctgtacgtacaattgctaccattactccttcgaccgtttacggtctttggtgcgagatattgcgagggactgtgctgggaatggtgacgggtgggtggtggaatgggtgggctagcggatggggcgggcgctgtggggggggaggggggggggg

SEQ ID NO: 14811 - DNA, 218 bp, Glycine max
  Clone ID: PAT_MRT3847_113380C.1
tccggaattcccggcgtcgacccacgcgtccggttttaatccttaaagtgtttacatattaaatatacatggtctaggtaaaacaaatttcctgaggatacaatacttgatcttactgtttatatactatttgtgcgaatcggtacacttgtcgatcgattaacacttgcacgcgttgctaatggaagattttgaggaagctaacacgtgtcaggagg

SEQ ID NO: 14812 - DNA, 139 bp, Glycine max
  Clone ID: PAT_MRT3847_113381C.1
tttttaaagctacaagtgagaatgctcacattgaagcacaataataccggctttaattatatttggcaaaattaaaaacttgggttaatttggcatggtaagggcttattccccattaccagtcttggccgggggggga

SEQ ID NO: 14813 - DNA, 178 bp, Glycine max
  Clone ID: PAT_MRT3847_113382C.1
cactctacttctcttgcggctagggttgtagcgcagattattctagatcgcaggaatatggttaacgaaccggatcacatctatattgcgtctactggccatatcaactctggacagtgcactaccactgtccacctgatataccaacctgtagacatacacattctccaacttcgac

SEQ ID NO: 14814 - DNA, 605 bp, Glycine max
  Clone ID: PAT_MRT3847_113383C.1
ttgatatggtaacctaattaaaccctcctctccttcatttcacaaccctccctttccttaccatcttcaatttcttcttcttcttcttttgcatgacaattttgcctcactcaaacaacaaatcatcaaatcataagttcatagcacaccaaaattatatggcctcggaaacccaccatcatgtgcaaggcctaacacccgaggaactaaccaaactcgaacccatcataaaaaaataccacttattcgaacaatctcccaacacatgtttttccataataacataccggatcgaagcgccggcgaaagccgtgtggcccttcgtccggagctttgacaaccctcagaagtacaaacacttcatcaaagggtgcaacatgagaggggacggtggcgttggaagcataatggaagtaaccgtggtttcgggccttccggcgtcgaccagcaccgagaggctcgagattttggacgatgacaaacacgtcctaagctttaaggtcggtggaggcgagcaccgactcgaaaactatcgatcaatcacatccggtaacgagtttaacaaagagggtcaggttaatactattgtattagaatcttattcg

SEQ ID NO: 14815 - DNA, 390 bp, Glycine max
  Clone ID: PAT_MRT3847_113384C.1
cgcatatgagatgctgcacatacatcatgttgagatgaatgctaagaggtgtgcattgagcggcgatcggttcagatctcagcgctctgaagatactgaaccatacacatacggcatacccataatctgatgtgtacatatcgttcatgagtgaggaagaacggtctgaattaacgcatgaacattgttgagtcatagagcaactcaggatatagactgatgctacaggctggaaaccctacctgctctattctgcactattactggtcacttgacgcatatggaacagtgaaagctgagctgcatatcgggcggtgccttgtcttgtagacagactagactcagatcctgtctgtgatgtgactaaggatctacacatgagtgacacag

SEQ ID NO: 14816 - DNA, 798 bp, Glycine max
  Clone ID: PAT_MRT3847_113385C.1
tggaggaaattagctctgttcctattcagagacatgataaagacactatgttgtggttggctgaacctaatggacagtacactactaagtcaacttataggttatgcatgaaccccagcacaacaagttcagataggaagatctttaagacaatttggaagctgaaaatcccccctcgggtagtgatcttctgttggagacttcttaaaaatagactccccactaaggacaatcttttaagaagaaatgtcattactcaggaagctaactgtcctttgtgtggatgtgtgcagggggttgtgggtcatcttttcttcaattgtaatctgacaaaaggcttgtggtgggaatccatgagatggatccgggtagtaggtcctcttccaattaccccagtttgccattttactcaattctgtgatggttttggggcagctgtgaatcatagtacaaggtgtgggtggtggattgccttaactagctttatatggcagcataggaatcaattgattttccaaggaaaatcttttgatccctataaagtcatggatcatgctatctttttagcttggtcatggttaaaggctaaagagaaagactttaatattagcttcaaccattggtcttccaatatatcgaatttctttggctagtttggttgggctttgtttgtttttgttgtattagtttgggttgtttttatggagggcagcactttggtgccttgtaacttctatctgtggtaccactggtactggtttatctattaataatatatatcttctgccttccaaaccc

SEQ ID NO: 14817 - DNA, 288 bp, Glycine max
  Clone ID: PAT_MRT3847_113386C.1
ttccactcgtccggggagatccgcgtagtgattggagttgggtacatgttattacggggggaactttctaaaatttggtactcccaccaataacatacaagacttactacacgtgtctgaaacgtaagtatcacaccatgaacaaggttacccaatacatcaatttaatgatatcttagctgcccaatcaaatcacccatattatcacaaacaatcatgttattgtctacaaactaaatccttttaccacaataaaaataaaaccacttataataataactttaagac

SEQ ID NO: 14818 - DNA, 496 bp, Glycine max
  unsure (1)..(496): unsure at all n locations
  Clone ID: PAT_MRT3847_113387C.1
ctatggcctaggaagattattaggcttagttcctttttatctaaaaggttcagaggattggcgtgctgtcagtaccattcatacctatgccatttggaactatggaggatcctaaaatggtgtgaggaatccaaaacttaaggttgtgatatacagctgggtatagattgggtacgactccttgatgtgctaccactgtcctaaagactcctctcttaatatatttgacatccaccactcccacatccttatataatcctctcaccttttcaaatgctattccatactcagatccttagatgctgatattaagcctcttgacaacactgtcttctccttgcatgaacatgaaatcaaatccgtttctaaccgaaaccctccctaccttccttgtaacgacttgacgatcgacttgttcatctaaagaacccgcgctacattagacagattatgtgcgaaggcacacattctagcaggagctaataangtgctcatc

SEQ ID NO: 14819 - DNA, 836 bp, Glycine max
  Clone ID: PAT_MRT3847_113388C.1
ctatcttcttctctgcactctagaaagaaacatgatgaacttcgacggcttccagaaggcaatcgaggagcgcttagagggaattcccgttgcttccgaggagtttctcttggtctcgggctcttcctcttctgcttcagcaaggacgacgccgaggctctcctcagccaggttacgcttattgacccccacgcgcgccagggctctaaagttgtccccgttgctttgaacaaggtccttcctctctctctctctgtttccgttctttatttctctctcgcgtttggtttgctttgctttctcctccaggtgtttcagctcaaggtgaacagcgttgcttttagattgatacctgagttctctcaagtcaaaaatgccctcaaagtgagtctttttcttgctattggtcattgagctgtacagtaatgataatgtatgctcgtgctttacaggagagggaaaaatctggcttcgcttccagtggcttttctggtgttccagttttccaggttcttctctctgctttttaggtctggacattccatttgtgtcgaaattcctatgttgcaagctatttgacagtagggaattcattgatatactaaaatgccaatcaaaatgggaccttttattttttggctaaaacgtcaaataatatggaacggagggagtagcaacaggcccacaattaggaaaatagttaaagtatttagagagttgttgttagttagcattctgatgctgtaatagaggtaggatataaatagggggagagaaggtaaggggaaggagttagttggtgggttagcctgggggggaaaagacaagcctttgaa

SEQ ID NO: 14820 - DNA, 542 bp, Glycine max
  Clone ID: PAT_MRT3847_113389C.1
cggccgcccttatatttcttggctacggattgtaatgaaagccttgttatctactccgccgatggccttttcttgagtagcaactccgtacattccgaatcagctctccctctatcttgggttatgaactctggttattcccctaaagtcagcacccaactcttttgaactgggtgaggcaaaatagttcgaggccccaatacttgcggagggtcccctcatggttgcgggacctgcatttatttggctgacagtgggggagagggtgttccttccggaatagatgattatggtgtggtagcgacaccgaccggtggtgccactgtgttaaaaaccaccgttgatggccttggggcgcatagggtactatgcttccaccatcccttatcggttttcacggatcctcacccgctcaaggaacccactgggatctgttgtgcatcgggtgggcctggaatctttgcctgcaccatctggggcacttcttgcacacttgtcatgcaaaagcagatctgccatgataatgttcaacctaatttgcc

SEQ ID NO: 14821 - DNA, 629 bp, Glycine max
  Clone ID: PAT_MRT3847_11338C.1
gattcatagacaaaaagactaggcttcatcacagaaatgtaacttgatattcaagcgcctcttggaccctgtagatggaaggaaggagattcagggtaccgtgctataattcaaatccttatacatcctttaaaaaaaatgcaaaacctcaaatgcatatacactttcttgtgctcgcacacataattaaacactgcctaatggaagcataaaccctagggagaccagtccaaataatgcccgggttaaaccatttataattaactccttgaatctttgaagtaaacaccaactcagttcctgttcttagcagttccacaaatccaccacggcccttgtccatgataatatacgccaggtgccaatcacctcctccgaatagacaagtaaggccttcttctagtttgggttggggatggacatggcaaaactctatccattggccattttctggctggacccaaccaacataatgtccggaatcagcacttctgcccttgtgggttaatacagcacccaaatcataaatgccagccatctgggtttcctttccaccctcctccatgggaactacagatggctcccctccattcaatgatccctcagcatcagacatttttacatcattt

SEQ ID NO: 14822 - DNA, 817 bp, Glycine max
  Clone ID: PAT_MRT3847_113390C.1
gttaagtgataacagaagggagaagcaaaacctagaaatcgcgctcgttggttttgacttggagtgagtgggtgaaaccgaaaccctaactaatattgaagaagaagatgagcattcgaaggttgaggccgaagaatcgcaaacactttactctctcctcagagcagagcagcgttcgctccatgagatcctctcccaattcaacgctgcaatcccttcctctcgccatttcactctctcttcctatctcctcatcctattgcaggacaataaggtgctcagcaccactgagcggttaatagcttttgctctgctagttgaggcttattcatcccagaaaccggcttcaaatcccttcataagctttattgtaaatgtaagcacttattattgttgttgtacttgttgaaacttttttgcatgtctaattcttttctttgaagttagaaccggtttttgaatgctagagaaggatgtgattccttaacaaaaacacgatgaataagaactatgagcaggcaccttagaataaggttttgtcattgaaactagttaaactattgtcaataataaatggatctgtacggcactgcatttatgcctccctacatgctccagatgttgatgaatgaaaagtttgtgattaaaatattataccaatatggaaatctaacattctttctgcagagtaattttctactgtgtttctcaaatcagaaattctgacaaaatagaactaaactatattcatctgaattacaattgagttacttatggacatacagtctataaaaaaaaatgaaactaactaattcat

SEQ ID NO: 14823 - DNA, 1356 bp, Glycine max
  Clone ID: PAT_MRT3847_113391C.1
cggctgcgagaagacgacagaaggggagattaaaagcaagggtagaagttttgcaacgttctcaaaggaacctactcggggaagatcttgcccaaatgaatacaaatgagctagagcagcttgagaatcaactggaggcagcactgaggaatattaggtcaacaaagactcaattcatgcttgaccagctttctgatcttcaccaccgggaaacattgcttattgaaactaataacgtgttaaggagtaagttggaagaaactgatcactcacaagttcaagtaagtctagctttggaagctggagggcctagcatccaatacaccaactttccacctcaatcagaggggttcttcgagccagtgggagtgaaccccaccttgcaaattgggtacaaccagactggtcctgatgatacaaacgtaggagcttcatccttaagtatgcatggattcgcctctgggtggatgctttgatgatattgaatttacatatgttccataaagaacagaaaagaaaactagtcatggatgtgttgaacacttccataatatatatgttttcgtttccttttgttgtgcatcatttatcaatgtttgaataaataaaaattgcgagtagtattatcataaaaatttatgaacctaaaacgttgtatatttgtattgaagttaaaactttaagccatccaatgagtcactgaacttggtttatcatatctacaccaatttgcttgctattagaagccaatctgagctcttggaagataaattgtgatataacattgatcgccattatatattcgggtttcttttccacgggcctaagtagtttggttcacacatggggcctccatcttaaaggcccagtttatatatcaatctttaagcctttgtcgatagtcgttgccgctgctttgagtgttatattcctcggtgatgcattatattttggaagcgttgttggagcagtgatactctcatttgggttttatgctgtcttatgggggaaagcaaaagaagaagaattgactgtagtggactttgatgatatacgtcctccttcaaatactaagagtcctttgttgcagagctacaaagtgaaagatgaagataaccaaaatatttaactatattgtaattttatttgaaattccaaaaaaaaacaaagcattgtgacattttctatttctgattagagtgagaatctaatgcatatcaaacatcttgatccttaaaaaaaaaaaaaaaaaaacttgagaatcaactggaggcagcactgaggaatattaggtcaacaaagactcaattcatgcttgaccagctttctgatcttcatcaccgggtagatgtgtgt

SEQ ID NO: 14824 - DNA, 901 bp, Glycine max
  Clone ID: PAT_MRT3847_113392C.1
ttttgggaagagtaaaataaacccaaaactggccaataatattgatatatatgttaatagatgcccttgtaggttaaacgtgagcaactacacgtgtcatattacattgcatacttgtgatggtaaaagaataacacatatcttctcattgggagaaaatgatgaggacaacaacttattgcaatctcagttgttggtagttttgtttttttttcctggaattggttatggcagaatgtgctgttgagcctttctgattttattacatcattcatttattttctgtgcttctcaatcgaccttttcagctcctcctttttcacccccaccactctatcagcaactttgcctttcttaacgagtatgaatgttggcaattggtagacctggagtgcttgagacacttccgttaactcctccacatcaatcttgatgaagtcaacatctgtgtaatttccagcaaactcttggataactgggtccatgagtttgcaaggtccacaccatgtggctgtgaaatcaagtaccatcagtttgttagtttctttggtggctttataatgagcattccattgagctgtggagtggaaagcaaggatgttggaactggatgactctctttttgattttgaagaattgaatgactctgaaaaccttttagaatacgaaaaattatagatggtgggagccatgttggttgcgaaactcttcttgtgctctcaggggtcaccacactggccatgcttcagagccctaacaactccatacagccagacttttataccaataaaatttcagattttctttccctgaaagctgcagctgtatgactataatatttatacattatccccacacgatggtgggaaaagccatgtatttaagaagtaagttgaatttt

SEQ ID NO: 14825 - DNA, 2769 bp, Glycine max
  unsure (1)..(2769): unsure at all n locations
  Clone ID: PAT_MRT3847_113393C.1
taaaagcaattatggctttcaagttctaattgctagaacgcngctcggggtgtacttgggttggttgtgggggatctcacttattcactgttttaacgagatgcgggtgtgaacgactctggcacactagtacctgtccttggcgggctactacacagttcagaccgttatttgtcctccggtgctcttgcttacatctttgtcaatacctttttaccagtgtatggagtatgacatgaaacagtggtggtatctgcttggcatgttcttttttttttttagaaattttttaatgttctaaaaacgaacctcaaaaagaaatttcctttcttcttcttctgtcaactcggtctcatggctcaccctcgactcactaactcgctctcttcttctccccttcgcaatctcaatcccaatcccaaactcattcctctctgcacttgctcatgccgtcccttctcttcgcaatccctaattctccattctcaccctcttttcctcgccaaacccaaacctctcctccggttcgcccgccgaaccggaccgcccctcgtcctcgccgccgtcggccaggccgaacccgaacttcctcaaaccagtgcccccacggtcattcccgaagacgaggaggatttgccctcaaaatctcaacagcagcttaggaaccgggtggtttttggacttggcattgggattagtgtaggaggcattgttttggctggtggatgggtcttcgcggttgccctagctgctgctgtctttactggtgctcgagaatattttgaattggttcggagtcatggaattactgaaggaatgacaccacctccacgttatgtgtcacgagtctgctctgtcatttgtgccttgatgccattgtttgtcatgtatcgtggtcatattgatgtttctgtgacttctgctgcttttgttttggccacagcattactcttacaaagaggaagtcctcgttttgcacagctaagtagtgccatatttgggttattttattgtggatatcttccctctttttggcttaaacttcgatgtggtttagcagctccagccttgaacacaagaataggagcaacatggcctatacttcttggtggccaagctcattggacagttggtcttgtggcaactttgattaccataagcagcgttattgcagcggatacatttgcatttcttggtggcaaggcttggtagaacacttacccatgggatattatacttcattgcaataggtcttggtgttctaagtctctttgggtctgtttttggtgatctcactgaatcaatgattaaacgagatgcaggagttaaagactctggcacactaatacctggtcatggtggagtactagacagagcggacagttatgtgttcacgggtgctctaatacaactcttagcaatatcaagatatcactgtatggagtaagttctagaaaatgacatttctctttataaatgcctgtttaatttcattaaacacaataaaagttctttcaaatttagctaaccatattcacaaaattgataaccaaaatcaccaaatctctatacaggacattcttgtggtgatgacctaaaaattatttagaaaactctcagatccaaccatatattataaaaagaagatgctctctttacacatcaaaccttctcaagaaaacaaggtttgcttcttcagcatttccctcaacctactcaaagaaattttcttattaagtcaggtctacttgataagcagttcatcgctgcttcctttttctgcatgaggtttaagcaacaatagggatactaggattctggcaatccttgttgaggcaatcaaagcagggtatttattgtattttaacttgtaaactcatcctagcacaacctccttggcgtgacgctgatgaaagaaaaagtaaaccagagtgcgatgcaattaattatgtcgggcaaagcttttcttctccgaaatgagcatcctggactaagggatttgcagctcggcctggagaagacccacaaaaaaatggaggagatgaagctacctgatttgaaaattcctccccatggctctccttcttaaacattatctctaatagctctgccccagcttttgagtcagaaccctcagcctgtggattgaaatgccatctcaaatgcctcataggcatgttagatacaaccccaactcggcgcggcttagggcaaatgacaggctccttctgttcaacaaaattcacagggcctctcatctcttcacaggctgcaaaggcgttctgctgaagaccataacagttcatcttcaaaatcaactttattccacagtagaacgcctgagagagagaaagaaatgaagggatgtagatcaatttggataagcttcttggtggaaaagaaattttttctgatgatcatcagaaaaggagcagcaggaattttcttatcatcccaggccaacttgaccacagttcacagctgctgctttttcgaatatgcatgagatcagtaggtcacagatacgaggactaagtaggggtagtatttgttgtattttaacttgtaaatagcacaattggctttgaaagaaaaagaacggttgcagagtcgctccaattacttcgatgtcttgctaacttatagtcttatgttctaaggaaactactgcagaacgatcattgagaaatgtggtgctagtgaaaataaattgtgttataaacttataattgaaaaaaaaaaaaaaaaaactcgagacgaagaattttt

SEQ ID NO: 14826 - DNA, 261 bp, Glycine max
  Clone ID: PAT_MRT3847_113394C.1
ctgccatcaagtacaagtaggcaaattcgtcaacttagtgtgtcccatgttgtttttctcagtcgtccgctgctgtaggctttccggcggcggtcgtttgtgtggttggcatccgtggccatgcctgtgcgtgcgtggccgcgcttgtcgtgtgcgtctgtcgtcgcgttggcgtcgtctcttcgtgcttcccgtgtgttgttgtacaacaagaagatgttttctggtgtctttggcggaataacagatcgtccgaacgac

SEQ ID NO: 14827 - DNA, 515 bp, Glycine max
  Clone ID: PAT_MRT3847_113395C.1
ttgccgctctacatcgttggagtgccgcctgcttgggggggggggggggggggggggggggggggggggtatagcaaacaagtagggatagaatgaataaggtaggatagcagcgtagcatataatgtagtaataagctgccaggaggactaaaaggttaagtaaccccagaagtgggtgtcgagatagctctgtttgtaaatgaggtgtactggatttgaaaggaaacccactagaggaggcacatgtcccgggtgagagaattcgagattaaagtgggcgagaggataagcgataaacacaactgataggagggcaacttcggttacttggcacctacgtgttaggggtgcgcttaagacagacatatgtggcattataagcccaaggtaaaatgcgatgtaacacctgcagtaataccgttgcttatgagtaaacctaattagatagagtggcacgtgtggaacggcctaccaggttattcagtacttagcaaaagaaagcaatttccaaac

SEQ ID NO: 14828 - DNA, 1879 bp, Glycine max
  Clone ID: PAT_MRT3847_113396C.1
ggctcgagcttgaagttaacgtcagtgtgtaattcggtttgtcccacctgtttaagaattaagatgtttcagtatcatggttgttttgttcataatgttacttgtcttctgttaatcaatgaatagatgtcattctagtctaagatgaacatttgtacatttaccatgcaactttatatcctgtgaacagttattgacatgtggtcatttgtggtttttgcatgggttttgtcagtgcaataggtcttggtgttctaagtttctttgggtctgtttttggtgatctcactgaatcaatgattaaacgagatgcaggagttaaagactctggcacactaatacctggtcatggcagccttgaccaagaataggagcaacatggcctatacttcttggtggccaagctcattggacagttggtcttgtggcaactttgattaccataagcagcgttattgcagcggatacatttgcatttcttggtggcaaggcatttggtagaacaccacttaccagtataagtccaaagaagacatgggagggtactattataggcttttgtgggtgtatagttacttctgctgttctgtcaaaaattttcagctggccaatacctttatcaagtgcaataggtcttggtgttctaagtttctttgggtctgtttttggtgatctcactgaatcaatgattaaacgagatgcaggagttaaagactctggcacactaatacctggtcatggtggagtactagacagagcggacagttatgtgttcacgggtgctctagcatacaactttatcaaaaccgttttaccactgtatgagtaggacaagaaaatgacatttctctttataaatgccggtttaatttcattaaacacaataaaagttctttcaaatttagctaaccatattcacaaaattgataaccaaaatcaccaaatctctatacaggacattctcgtggtgatgacctaaaaattatttagaaaacactcagatccaaccatatattataaaaagaagatgctctctttacacatcaaaccttctcaagaacacaaggtttgcttcttcagcatttccctcaacctactcaaagatattcatcctagttaagtcaagtcatttttataagcagtcacactcagcttcctctatatacatttctctgaatggagtttaagcaacaacagggatcctagaattctggcaatccttgttgaggcaatcaaatccatctactctaactgcagccggtttaagtccgaaactcatcctaacacaccctcctttgcgtgacgctgatgatggagatagtaaacctgagggcgatgaaattaataatgtcggacaaagcttttcatctccgaaacgagcatcctggactaagggatttgcagctcggcccggaggagacccacaaaaaaatggaggagatgaagctacctgatttgaaaattcctccccatggctctccttcttaaacattatctctaatagctctgccccagcttttgagtcagaaccctcagcctgtggactacaagaaaaattaaaacacaacagatcagaccttgaaaggcttcaaaaacaaattaatgtcatcaaaactcaaaagggaagcaatggattccaataaattacttgaaatgccatctcaaatgcctcataggcatgttagatacaaccccaactcggcgcggcttagggcaaatgacaggctccttctgttcaacaaaattcacagggcctctcatctcttcacaggctgcaaaggcgttctgctgaagaccataacagttcatcttcaaaatcaactttattccacagtagaacgcctgagagagagaaagaaatgaagagatgtgaagctac

SEQ ID NO: 14829 - DNA, 516 bp, Glycine max
  Clone ID: PAT_MRT3847_113397C.1
aaaggatgtcctcgttttgcacagctagttattcccatatttgggttattttattgtggatatcttccctctttttggcttaaacttcgatgtggtttagcagctccagccttgaacacaagaataggagcaacatggcctatacttcttggtggccaagctcattggacagttggtcttgtggcaactttgattaccataagcagcgttattgcagcggatacatttgcatttcttggtggcaaggcatttggtagaacaccacttaccagtataagtccaaagaagacatgggagggtactattataggcttttgtgggtgtatagttacttctgctgttctgtcaaaaattttcagctggccaatacctttatcaaggagttaaagactctggcacactaatacctggtcatggtggagtactagacagagcggacagttatgtgttcacgggtgctctaacatacaactttatcaaaaccggtttaccactgtatggagtatgacatgaaac

SEQ ID NO: 14830 - DNA, 2141 bp, Glycine max
  Clone ID: PAT_MRT3847_113398C.1
cttcagctcacactaaggtgttaattgctcataaaaaaaatggagtctgtcaagttcattaacatgaatgccaaacactcctccatcttcttattagccatgatctttgttctgatcttagcttcagcaaatgccaaaattcacgagcacgagtttgttgttgaagcaactccagtgaagaggctgtgcaaaacccacaacagcatcaccgtgaatgggcaatacccgggcccaacgttggaaatcaacaatggagacactttggttgtcaaagtcactaacaaagctcgttacaatgtgaccattcattggcacggtgttaggcaaatgagaacaggatgggcagatggaccagaatttgtgactcagtgcccgattcgtcctggaggaagttacacctaccgttttaccgttcaaggacaagaaggcacactttggtggcacgctcatagctcatggttaagggccactgtttacggtgctttaatcattcgtcctagggaaggagaaccctaccctttccccaagcctaagcacgaaacacccattcttcttggggaatggtgggacgcaaaccctattgatgttgtgaggcaggccacgcgaactgggggagctccaaacgtgtctgatgcatacactatcaatggtcaacctggtgatctttacaagtgctctagcaaagacactaccattgttccaatccattccggcgagactaaccttctacgtgttatcaatgctgcactcaatcaacctctcttcttcaccgtcgcaaaccacaaactcaccgtggttggcgccgacgcctcctacctcaaacccttcaccaccaaagtcctcatgctaggacccggtcaaaccaccgatgtattgatcaccggcgaccagccaccttccccctactacatggcggcgcgtgcgtaccaatctgcccaaaacgccgcgttcgacaacaccaccaccaccgccatactcgaatacaagtcacctcatcacagtaatcattctcaccatcattccaaaggagcactgaagaaaaaaaccaaaccgatcatgccctcactccctgcctacaacgatacaaacacagtcactgccttcagcaaaagctttagaagccctagaaaagttgaagtccccgctgaaatcgaccagagcctgttcttcactgtgggcttaggaatcaacaagtgccccaaaaactttggaccaaagaggtgtcagggacccattaatgggacgaggttcactgcgagcatgaacaacgtgtctttcgttctcccgaacaacgtgtccatcttgcaggctcaccacctcggaatccccggagtgttcaccactgattttccggggaagccgccggtgaagtttgattacaccggcaacgtgagtcgttcgctgtggcaacctgttcccgggacaaaggcacacaagttgaagtttgggtccagggtgcagattgtgttgcaggacactagcattgttactcctgagaaccaccctatccatcttcatggctacgatttctacatcgttgctgaggggttcggaaacttcgacgccaagaaagatacggccaaattcaaccttgttgatccacctttgaggaacactgtggccgtgcctgtaaatggatgggctgttattcgatttgtcgctgataaccctggtgcctggcttttgcattgtcacttggacgttcacatcggatggggtttggctacggtgttgttggtggagaacggagttgggaagttgcaatccatagagcctcctccgctggatcttcctctttgttaggatatcatttcaaaataatcgttggtccccaacaattggagttttgcagtttcattttcttagtttggaagctggtttatgtttgcattttgggagggtttttttttttgcttcattgcttgttttgattctacgttctttttatagacagataaattgggtttgaaacctaggaaaggtggtgatgcggttttaacccaaatatataccatctaaatagtcatagcccaaccagttaaattgatgatgttatttttccctcagagttcatgttacaaacagattgcaagttttgaatataaatatatcacctggattttattttttttgttacaaaa

SEQ ID NO: 14831 - DNA, 515 bp, Glycine max
  unsure (1)..(515): unsure at all n locations
  Clone ID: PAT_MRT3847_113399C.1
ccacgcgtccgcgtagctccacatctcttcatttctttctctctctcaggcgttctactgtggaataaaggtgattttgaagatgaactgttatggtcttcancacaacgcctttgcagcctgtgaagagatgacaggccctgtgaattttgttgaacagaaggagcctgtcatttgccctaanccgcgccgagttggggttgtatctaacatgcctatgacgcatttgagacggcatttcaaggaatttattggaatccattgcttcccttttgagttttgatgacattaatttgtttttgaagcctttcaaggtctgatctgttgtgttttaatttttcttgtactccacacgctgagggttctgactcaaaagctggggcagagctattacagataatgtgtaagaaggtaagccatgactttttgacaatctgtctacttcttattgtggcctacgaagaaaatatgtcaattaggatagtctttggttcctttggtagacatttttttat

SEQ ID NO: 14832 - DNA, 720 bp, Glycine max
  unsure (1)..(720): unsure at all n locations
  Clone ID: PAT_MRT3847_11339C.1
ctagtgctattaaatattgtgtttgagggtttattatttcactggttggtttatatatagtgttatgtttgattgagtgaattcctctttggccaacttgtgttgtgtggtttagattcctagttgtgaagaaaaaaaaaaactgttttcgtactcactgatggtggttcatgcaagagcctatgtggatctcggatagagttttagtatttatttgttgatattatacagatgaactattggatcttgtgtgttaaattcatgaaataaacttgtggtggctgaggttaagagtatacattgttttatgttagaattattgtcttctgtgtgttgctttcctatttcacagataagttctttatatttgatgatgtgtgcatatgataaaatgttatgctatgtgatagcagttaggtagaaatagtttatttgtgctactatagcagttgatatcgattcaaatattctagtaagatgaaaaagacttgtgcagggttttggagttgccggcctccataaaggatagaaataaccatgatgaatgttgggaaagcaacagtgtagacaatggtgctgaatccatggaagaagttcatgagctagaggtaattatgcatgataacatcaatggggggttttgaaccttgcgagccagcatcagggatgtcatttccttctaaggaagctgntaaatcattttataggcagtatgcttct

SEQ ID NO: 14833 - DNA, 2077 bp, Glycine max
  unsure (1)..(2077): unsure at all n locations
  Clone ID: PAT_MRT3847_1133C.1
ctgggggaatctcgcgtaacgatttagatgccgcttgtttatcaacaaataaacttaggcgcaaaccaataactaaataaaactacaaactcaactatcttcgagtccaatctacacctaggttaagaagaaagatctcaaacctctgaaaaccctgaaccctctctttcttcttcacatcattctaaacccattctgaaacccctcacattatttcctcaaaccatgctaaccatagcatcaaacctatcatctaggttttcttcctcttcttgtaccctttccgaaaacccaatagtccccagatgcttcttcccctttcccagctgaaccttatgctgaccactcacccgctgctaagacaaccacatcctcttatactcctggcagatttatgcaataggagcgattgcgatttcatcataggtttgggcaagatggaatgagaggaagggccgaggtggggggtctcccaatgatgagaggggtgaaggaaggcaatctgatgatggaaatcagtgatatttaggcgagaaagggcaagcttgctatgtccaatttgttgtttgaaagaggagcgtacgcagaagcgattgagaagaaagtgggtcattcaagagtgtccaaattctgaccttaggtgttacatgttgttgcttttggaactcgggcttggcttcatttattgatgaggcaggaggatttggcagggagtggttgttggataagttcatgaaggatggttggagaatcaagagaaactattagaatatgaggatcgatttgtagtagtatgaggcacaatttgttcgtgctaaagcactaaaagggctgattgaacttgtcaatggcaatgctgactcagctgaagatttcttcgacaagtctctccgcgagaagtattgtgatggtactgctggtctatcatatgcggaattcctacataagatagggaactatccaatggcaaaggaggtttaccgaaatgtcgtacaaggggctattgaagtaaaaaatgctggcagaccatacttaggagctggtaacatgagcgtggacgaattaattgtagggtccatgtttgctttaggacagctggaattacttatgggtaactactctaatgcagagtgccatttgacacaggcattaagtagggcagaggaagcctatggagactctaaacatcctacggtgggggttgccttaacaagcattgctcttttgtatcggcgtaaagcaatccaggaacattcaagttcgctgttagttcaagagggtctctaccgaaaagtgatagatattttgaaggttccaacaatggaaactgagtctgaagatgctgcaccattggtagatagaagtgatatagcagctcttgcaacaggtgcatatgcagaagtacttagtgtccaagaaaagagacaggcagaaggggagaagatgaaggacttggccgagtctctatggaaaccccgttggctatctctagctaatgctattgattcagacaagaatatcattgattctagaatttgcaggatcctgtaaattggtctattttctgggtacccttttgttactataggttctagttggaccgtgatacatgactaagaccatggattaatagtgcagagttactttctacagtattgcttggaatagaaatgtcgtgccgacatatactatgatatccacggtcggccgatgtatatttagaccgaattttaatgaggtctttttaatattcacttaaattatttgtagttgatgttttaaatgttttgattgggaagttatttatactaataaaaaaagagtcttggttccagtccctagtcgtgcttggtgtccgccatttttccgtgtcagtgtccgactcctactcgacacccgtattacgttctatattttggacattacaggtatccacgtgtccgtatctgtgtcgtgtccggtgtccgcgtcggtgttggtgcttcataggtatacagtgctatgtcaatactctcacattctcaggatgaatgaaaatttgtttctttacccagagtcaaaaaaannnnnnnnaaaa

SEQ ID NO: 14834 - DNA, 1814 bp, Glycine max
  Clone ID: PAT_MRT3847_113400C.1
cttcagcattcacactaaggtgttccttgctcgccaaaagatcatggagcctgccaaaaccattcacaacaatgtcaaatactcccccatcttcttagccatctttgttctgatcttagcttcagcattgtcttcagcaaatgccaaaattcacgagcacgagtttgttgttgaagcaactccagtgaagaggctgtgcaaaacccacaacagcatcaccgtgaatggacaatacccgggcccaacgttggaaatcaacaatggagacactttggtcgtcaaagtcactaacaaagctcgttacaatgtgaccattcattggcacggtgttaggcaaatgagaacagggtgggcagatggaccagaatttgtgacttcagtgcccgattcgtccaggaggaagttacacctaccgttttaccgttcaaggacaagaaggcacactttggtggcacgctcatagctcatggttaagggccaccgtttacggtgctttaatcattcgtcctagggaaggagaaccctaccctttccccaagcctaagcgcgagacacccattcttcttggggaatggtgggacgcaaaccctattgatgttgtgaggcaggccacacgaactgggggagccccaaacgtgtctgatgcatacactatcaatggtcaacctggtgatctttacaagtgctccagcaaagacaccaccattgtcccaatacatgccggcgagaccaaccttcttcgtgtcatcaatgctgcactcaatcaacctctcttcttcaccgtcgcaaaccacaaactcacagtggttggtgccgacgcctcctacctcaaacccttcaccaccaaagtcctcatactgggccccgggcaaaccaccgacgtcttaatcaccggcgaccagccaccttcccgctactacatggcggcgcgtgcgtaccaatccgcccaaaacgctgccttcgacaacaccactacaaccgccatactcgaatacaaatcaccgaatcaccacaataagcattctcaccatcgtgccaaaggagtaaagaacaaaaccaaacctataatgcctccactccctgcttacaacgacacaaacgcagtcacttccttcagcaaaagcttcagaagccctagaaaagttgaagtacccactgaaattgaccagagcctcttcttcactgtgggtttaggtatcaagaagtgccccaaaaacttcggaccaaagaggtgtcagggacccattaatgggacgaggttcactgcgagcatgaacaacgtgtctttcgttctcccgaacaacgtgtccatcttgcaggctcaccacctcggaatccctggagtgttcaccactgattttccggggaagccgccggtgaagtttgattacaccggcaatgtgagccgttcgctgtggcaacctgttcccgggacaaaggcacacaagttggagtttgggtcgagggtgcagattgtgttgcaggatactagcattgtcactcctgagaaccaccctatccatcttcatgggtacgatttctacattgttgcagagggtttcgggaacttcgacccaaagaaagatacggcgaaattcaaccttgttgatccacctttgagaaacacagtggctgtgcctgtaaatggatgggcagttattcgatttgtggctgataacccaggtgcatggcttttgcattgtcacttggacgttcacattggatggggtttggctacggtgttgttggtggagaatggagttgggaagttgcaatccatagagcctcctcctgtggatcttcctctttgttag

SEQ ID NO: 14835 - DNA, 1992 bp, Glycine max
  Clone ID: PAT_MRT3847_113401C.1
ttttcagctggccaatacctttatcaagtgcaataggtcttggtgttctaaatttccttgggtctgtttttggtgatctcactgaatcaatgattaaacgagatgcgggagtgaaagactctggcacactaataccaggccatggcggagtactagacagagcagacagttatttgttcacgggtgctctagcatacaactttgtcaaaacctttttaccagtgtatggagtatgacatgaaacagtggtggtatctgcatggcatgttcactgacaacattggcgcatatccgacaactaattgaatttaaatggctcaccctcgactcactaactcgctctgttcttctccccttcgcaatctcaatcccaatcccaaactcattcctctctgcacttgctcatgccgtcccttctcttcgcaatccctaattctccattctcaccctcttttcctcgccaaacccaaacctctcctccggttcgcccgccgaaccggaccgcccctcgtcctcgccgccgtcggccaggccgaacccgaacttcctcaaaccagtgcccccacggtcattcccgaagacgaggaggatttgccctcaaaatctcaacagcagcttaggaaccgggtggtttttggacttggcattgggattagtgtaggaggcattgttttggctggtggatgggtcttcgcggttgccctagctgctgctgtctttactggtgctcgagaatattttgaattggttcggagtcatggaattactgaaggaatgacaccacctccacgttatgtgtcacgagtctgctctgtcatttgtgccttgatgccattgtttgtcatgtatcgtggtcatattgatgtttctgtgacttctgctgcttttgttttggccacagcattactcttacaaagaggaagtcctcgttttgcacagctaagtagtgccatatttgggttattttattgtggatatcttccctctttttggcttaaacttcgatgtggtttagcagctccagccttgaacacaagaataggagcaacatggcctatacttcttggtggccaagctcattggacagttggtcttgtggcaactttgattaccataagcagcgttattgcagcggatacatttgcatttcttggtggcaaggcatttggtagaacaccacttaccagtataagtccaaagaagacatgggagggtactattataggcttttgtgggtgtatagttacttctgctgttctgtcaaaaattttcagctggccaatacctttatcaagtgcaataggtcttggtgttctaagtttctttgggtctgtttttggtgatctcactgaatcaatgattaaacgagatgcaggagttaaagactctggcacactaatacctggtcatggtggagtactagacagagcggacagttatgtgttcacgggtgctctagcatacaactttatcaaaaccgttttaccactgtatggagtatgacatgaaacagtgttaggtggtatctgcatagtatggtcactgacagtttgaaacattactggcgacaaattgaactcaaatattcacggaaactcctggacatttttcctgggatctagtgagaatttacataaatttggataagcttcttggtggaaaagaaattttttctgatgatcatcagaaaaggagcagcaggaattttcttatcatcccaggccaacttgaccacagttcacagctgctgctttttcgaatatgcatgagatcagtaggtcacagatacgaggactaagtaggggtagtatttgttgtattttaacttgtaaatagcacaattggctttgaaagaaaaagaacggttgcagagtcgctccaattacttcgatgtcttgctaacttatagtcttatgttctaaggaaactactgcagaacgatcattgagaaatgtggtgctagtgaaaataaattgtgttataaacttataa

SEQ ID NO: 14836 - DNA, 480 bp, Glycine max
  Clone ID: PAT_MRT3847_113402C.1
cacccaaaaaaaaaatcccgttggtccgagaaaccccctaaaaaacccctggccggggtttttggaaattctgggtggggcccccttttaatggaccctgggtccatcaagaggctaaatgaaaacccccttcaatttgggagacaacctcccttgggggcgaaagatctaaaaaaggcggccccccgggtgtcccccggaaatcccgcccgggccctggaggggaaccaactttcccttatggggggagatataaactttggcgaaaaaaggggaaaaaccctttcccggggaaaaaggtttatccgtcaccattcccaacaaataaccggcccgaaaattaaagggttaacccccgggggcccaaaggggggagccacctcggctcaagggggggggccacacccccctttttatttggggaaaccccccccccccccagggtaaaaaaaaccgccccccccccggggaaggggtttt

SEQ ID NO: 14837 - DNA, 270 bp, Glycine max
  Clone ID: PAT_MRT3847_113403C.1
tagaagataactttcgttgaggatggagaggggaatttttaaaaatcaacggggtttaacccgcgcaacacaaacttggtatctccatcctgagcgacgaaatagcgaacaacctccaacagaagatgcggaccctccaaacccgcaacaaaaggaaccatcactagaatcgaagaaatgctgaatttattggcacaacgcagtgcacgaggaagtagggcaaagagactcactcaacgggctggagagaagacttaaaaaagtgtgcac

SEQ ID NO: 14838 - DNA, 489 bp, Glycine max
  unsure (1)..(489): unsure at all n locations
  Clone ID: PAT_MRT3847_113404C.1
tagctcgagcacgcaagggctcgagctcagaggcatctactaacgaagggctacaatatggacgcaggacgcacgtactccggacgagaatgataggctacattagtgatacatatgcacgtggatagaatacgcgagctgaatgcgcatggagaagctccctcagaagacgacgatgntcgagcataacgggtggagccactagaactacactctaatcgccacggcancagactcccgaatgtctatcgcgctcgacgaataaccggtaggaaagagatacggtatcagctgacagaaatgcatcctacaatgccctgagcgagagcgctgccctggaacctaactgtgaggacataacggccgtgggagacaggatcctgatcatcgactgatatgattacgggctgctaaagaatgagtgcaggctgcaactactgagcaccaagcggacatatctggtgccctaggcctggatctggagacagt

SEQ ID NO: 14839 - DNA, 693 bp, Glycine max
  Clone ID: PAT_MRT3847_113405C.1
aatatgaaggaaaaattatgttattttacatggatatgaatacaacggtgcaaaagttcggtttttctaactatatacccttttgaactccttaaaaaaacactaccgtttcacatttgaaacaattaataagatatcacatgaataatgccccgttgtttaagcatggtaatgctttccaacaatgttacgatgatccgaaaataaaataatgctttgccctagatgaagatcacttagccgcaaaactgaaagaacaaagcacttgttgtgatgcaaaagcattagtccacagagaaagaacagctcatagtttgttactacttgtagctgacttgtgggaatgactagaatgctctgttgtatgattctcagttccagattttggggtccttgggaatgaatttgaggaatgtagtgcttccaattctgctagaacagttaccatagttggtctatatttgggatcagtatttagacattgtagtacaagtgctgctgcagcccgtgctcctttcttggagtattgaccacccaaccttgaatccatgattctcaaaattcttctgctatcactcaagaatggccttgcccaatccaccagtgtttcttctgaaaatccaggtctatcatcttcaactacacgcctttcttgttagtaattttaacaacacaactccaaagctgtataca

SEQ ID NO: 14840 - DNA, 440 bp, Glycine max
  Clone ID: PAT_MRT3847_113406C.1
attattttttttttttaattttttactgccttcttcgtggtgtttcgttttagttactattcgtcgtacagcaagggcttgcagaccttctggaccccaataccctacagcaaagagcattcaatgctctcttccctttcactccctatttcaatttcctcgtaaagaaaggacttggaacccttaatctagaaaaaccagcggttcaccacagagcttcctacaatcgagggaaccctttaaaaatgcctgcaaagacagggaaacgagggtccgagataacctccccaaaaagaagtggccaatgtggcttgggaaccaccgaagcctgacaaaaccaacagcactcccaaactgcggagggagacccctaaggataaaaaaaaaaaaaacccgaacttgtttgcagaggggacgagaaaaaaaaaaaggggaggggg

SEQ ID NO: 14841 - DNA, 801 bp, Glycine max
  Clone ID: PAT_MRT3847_113407C.1
agcatccgtacatcaatggtgtgtgcatgagattcggaggaacccttctttggccttcgtatttgaataatccaaaaactgatagacccgacccgatccaaacttaactctatctggacctcgtcggaggaggggcaagttttgcaggaatatgttgaaatcaggctgattttatcttcggtagttattgtgctggactggacaggatgagaaggataaaagaatccgtgagctgtcacttgagttgtacaatgaaagacaaaagtgtgaacgacgttgtgctgcatatgaagagcagttaaatgtgattttaaatgatttagaaaagcacacagaacatatctctaaaaaggatgcttgctgtagtaagaagcataatatagattgaggaggaaaaatcagattcggatggtgggcaattagagccatcatagcatgcttcctcattggagacatcctggttgagattgttgagaaggctaacattattctgtcggcatcgcttgaagtagtgtagtgtagcggtcaagttaaacttcaggcagcacatagtttaccagaaaaaatcacatttttctggtgtgtaccatgtcctggattaggtaggtgcttaaagtgtaacatccattatttattgttcttgccgaaaagcgtttctcttgtgagtactgtataacgtagccatttcattcttccgttggactcaacattttcgagccagtgatcatgtaccttttccaagtttgtggggtcgtcatggtttacatcaaatattgactctactctcccctgcttgcattc

SEQ ID NO: 14842 - DNA, 157 bp, Glycine max
  unsure (1)..(157): unsure at all n locations
  Clone ID: PAT_MRT3847_113408C.1
ttggcatgaattccaaatgggaagtcttccatataccanctttttgaccaaagatctcttgccatcccttggagccagaatcaaccaagaaacgaggcttanaagatacataatttcccctttcaatccacgttatagggcatgggagatgatatta

SEQ ID NO: 14843 - DNA, 429 bp, Glycine max
  Clone ID: PAT_MRT3847_113409C.1
ggaaaaagttgaaacttgctatttgggacactggtaatgtgcaatttgttaattataatttcttgaaagtcaaatcccttttattctatgttgtttgcttctgttatatattttcagaattacatattagttaaggtgaagaattttttccattgctagaaacttatgctgaagagtgagtgtggagctttggagctctgatgtacttgactctttcgagctttaattgagagttttgccataccagttggaatcttcaaattttattgttgaatatttcactgttggttcattaacatattattaggatgacatgtatagatttggaggttgagattataagtcttaacacctaagtttaacagaatttggaaagttctgcaatattgtttaaaatcagcatactggaatgtaccttatcttttatca

SEQ ID NO: 14844 - DNA, 379 bp, Glycine max
  Clone ID: PAT_MRT3847_11340C.1
ttttgttcttttccaacgcaggacctcaggacaggagatgtgatttatcatgttgctgagggtgaccattaccatgttgagcgagcagttgcagctggtcgcacagtctttgaccgagggccttggacaaagatgactgtctatgaaagacaaaggatatcgctgcgggctgatcatctgtatgaaaagcacagtgacgaccttggtggactcatgacttgggatcatggcaaggcatatgaacagtctgctcaaattcaaatttcaatggtggctgcgcctatttcgagtctatgctggctgagcagatacgatacatggtctgacagctgcagctgatggaccatatcatgtgcatacattgcatgaacccattggt

SEQ ID NO: 14845 - DNA, 771 bp, Glycine max
  Clone ID: PAT_MRT3847_113410C.1
ctcgtaatacgaatattattccaagttctaccatatagtgtaaagcaagaagacacaaacaatggagttgtggaagctcttcgtaactgcattaatgccagttcttaaggtgctcctcattactgctgttggcacatttcttgctctgcaccgctttaatatactgagggagagtgctaggaagcacttgaatacaatagtatactttgtattcactccggctcttgtttgcagcatcctggctaaaactacaacatttaagagcctggttgcggtgtggttcatgccattgaatattcttctcacatttatcattggaacaacactaggatggttgtttatgaaaataactaaagcaccttctgatatgcaaggccttgtgttgggatgttgtgctgcaggaaatctaggcaatttgcctcttatcatagttccagcagtctgtaaagaaagcagtagtccttttggagcagtggatgtttgtaacaagaaagggatggcatatgcctctttgtccttggcaataggaaacatctacctttggacttttgcatacaacattatccgcatttattcatgcaagattttcaacgtgaacaaagttgatgattccacagtaggtccagtgtcagcaatagaaacagatctcgaaagccattcaactgtaccagtggttactgcagaggatctctcagagaccaatgatcatgaaccaaaacaaaagcacgactccatttggaagtgcattggtacaaaagctagggcaatcta

SEQ ID NO: 14846 - DNA, 310 bp, Glycine max
  unsure (1)..(310): unsure at all n locations
  Clone ID: PAT_MRT3847_113411C.1
accaaatcagaaccacattcctgggaattggattttccaataaagggatgggggcctaataaaggttttgaaatggggaggtctgagtgggcaaatcaaacctcattgcatttgaagtttcttaatgccattcccaacagctccattttgatttctttgggaatttcagaattgaatggtgtatctttatccgcttttgtcaagctctgcgacttgaagcgatcttgtgacggatggttcttcctgtcgtgtatcnaagaatagtacttgtagatcttgcatgaattcactttatgcatgggaggggatt

SEQ ID NO: 14847 - DNA, 370 bp, Glycine max
  unsure (1)..(370): unsure at all n locations
  Clone ID: PAT_MRT3847_113412C.1
gacagacaggattaatagaaagcggctcattagacagaagtttcaatccgatgaattattttgtttggaatgaaacatctatatactaaattatagctaattatctagaagtattacaatagccgagttgagtttatcatgtggtgggctttccgatccctttccttttgtgttttacttttgctgggccatttaacatgttatttcttggtaacactaccagccaagtttgaatcttaaggcaaggcaatcctccatcaccgcanaaacaaaatcattttagtttttaaatattacaatttaattagatatttcaagaatatttcttatctctcattttaaattttaatatgttcttgaaattgaacgt

SEQ ID NO: 14848 - DNA, 198 bp, Glycine max
  Clone ID: PAT_MRT3847_113413C.1
cgagggaacagaacgaacgcagcgtctagccgctttcacacgttggtcgatgaccaaaagaatccgctcttgcaaggagaggtcgcgcattgtttcacgggcatagatctaacatagctagacggtctgagaaaaccagtagaggggaatgactagtgagtgttatactgaagtccagtgcacctttgggaaagctct

SEQ ID NO: 14849 - DNA, 177 bp, Glycine max
  Clone ID: PAT_MRT3847_113414C.1
tttttttttacacaagggaaaatggcctttctcggtaatcagcgccaaacaaaaagcacaatgcatattatccagaggaataaggcagaacaagacaactctgttttacagcactgcctaatgcatgggctagttcatcttgtatatacactacagtgtgaccaccccttttgattc

SEQ ID NO: 14850 - DNA, 355 bp, Glycine max
  Clone ID: PAT_MRT3847_113415C.1
aagctgaagaattggaagtgaaacgtcatcggtgtcatgaagagaaaccaagattttctaaggttggtgtccttgaggagacagaagagaaaccgattctttctggaagttgtgtggctgatgactcaatagacgagttgaaggaaatcacaactggctttgaacagtgtcaaacaagtgaagaatgtatggcaacaactttgaaaaatgttaagtctgaagtagcaggagaaagtgaagaaatggagagagaattggacgaagttgtgaaaaactctggcataggttgagaggttaatcactttccgaaggaacctatggatataaccagtaatgcaagaggtaactattggta

SEQ ID NO: 14851 - DNA, 202 bp, Glycine max
  unsure (1)..(202): unsure at all n locations
  Clone ID: PAT_MRT3847_113416C.1
cgtcacgccttgtcncttanccctcctcctcgtcgcctcngnnacnaccgccgctatggcgtggcngctttccgtangcctattnnatnctgatccgnnagntggtggccagangttggntanncgtangagtaggacaangctgcggaacgccgagcaccactggcgacgagcgtcaagtnnaagttcggncaagtaccna

SEQ ID NO: 14852 - DNA, 420 bp, Glycine max
  Clone ID: PAT_MRT3847_113417C.1
gcgtgcgcttgcgttttcgaatatgacggttggataagaagaagaaaaaatatgatgttgacctatgcatcccacctgagatttgggagctcctgaaaggagcaaagaagagcgagtatgagaagatcgccttccagtatggcatcactgacctccggtgcatgctgaatcggctcaagatggtcaaggtcgaggtcaagaagagtgctttttttttgaagaagctggatccagcctaccaggcggacagaggcggcaaaatcaagctggtggtggagatcagtgacccggaccttccccttaagtggtacaagaatggacaggagatcaaaccaagtagcaagtacgtgtttgagaatgttgtgtcgaagcgaattctcaccatctacaatatcacgttggcagatgatgctgcttatg

SEQ ID NO: 14853 - DNA, 447 bp, Glycine max
  Clone ID: PAT_MRT3847_113418C.1
caatgatgttgacttggagtttccaaaatttggatttcttcatgcggatgcctcagtggacaggaaagatgatcaacaatcaaaggactcgtgtcatagtgctgaaccgatgaaaggggattttgtagaagatcatttctggaaagatcatcctttcatgttggccaacttttatcctcttgatcagcaagactgggaagataaaatcctttgggcaattctcctgttccaagttataataatgttgaaagctgtgaaatttctggacccgagttgggagcttctggtggcagtgaaatagaaattgaaagtgggatccataatattcagatggagcctcaaaaggtactggaggataaaaatcataatgtcttaatgcgcagctctcctgtcaaattggagccctttggctcaagggattcttctggagctaagaccaatttaata

SEQ ID NO: 14854 - DNA, 846 bp, Glycine max
  Clone ID: PAT_MRT3847_113419C.1
acccacggatgaagggacgcgtgggcggacgcgtgggcggacgcgtgggcaaggagctggggtttgtcctgcagcttatagattaatagagaagatagttcttctactctactgtggagatattcctgaaagatactcagccatagcatcaaaatcccgtgagtgctttgggttctttcgacgtgggtcaaggttgcttggttggtggtcaatagatgaaggaagtagagaggaagaagctagacttttttgtgctgggagtcctgggtataatactttcacccctgatacggtgaagaaaatgcctagggcagatctggttgaggagatttggagactacaagctgcattgggcgagcagacacaagttacaaaatttagccaggatgagtatgaaagacttcaaaatgagaagatcttatgcagaatttgcttcgaggagcagattaatgtggtcctacttccctgcaggcatcacattctttgcagcacttgctgcgaaaaatgtaaaaggtgccctgtctgtcgtggaccaattgaagaaaggatgccagtatatgatgtgtagactgagttcaatgaagatgtataggtatcttactgatcatacagcttgtgattttagacgaggcaagcactgagaattatcaatttctcttctcatagatatgatgaacatcagaagttgtatagaattttaaacgtgttaccccccctcccttaatttttcttccatagtgcatttttgcaattctgaagggattgccaatagttgcattgtcttgaattttggtaccataaggatttatctacaccaaaaatgaaagatgacatatttgaggtatt

SEQ ID NO: 14855 - DNA, 567 bp, Glycine max
  unsure (1)..(567): unsure at all n locations
  Clone ID: PAT_MRT3847_11341C.1
cctgacaaagggtgtggacaatgtgtaaaattagggtgcatggctttgaaattcttagtcctctaggtaaatcgaaaaaattatacctacataatcatttatttgaattttgttattgtacatgtattttctgttataaaatcattaataattagtttaaaattaagattttaaaaaatcatttttaatataaatctttagtaagattatttaatatacttgtgacctagtggatttcaaataagattctaattaatgattttaaatttgataaacttctttgagtgtatgcaatagtaagttagtaacaagataatatcattttataagttatacgtgcattagaaaagtgttaaaaatcatcatacaatattctaatttattaataataatggtttatatgcacataattttttgatttagaggaaacataatattcattattttgtatagttaagttgattagtctatataaactgacatatgttgtgtaactatgacacataattttaactagncaattattcttctatttgtcctattttaacatggtatcatggagtgatt

SEQ ID NO: 14856 - DNA, 454 bp, Glycine max
  Clone ID: PAT_MRT3847_113420C.1
ctgatggcgcgacgaccgcagcagacactgctgaccttaacattgttcactctgatcaaagccacacgacggcgctggggccggttgcagagttccgacgacgagtcctagccccaagattccgataagctaccgtgtcgctcagctggatactatctgcgatgggcccgactactcaaatgtccagatgccagaaagcttcttcacaaagccattggatagacacatgagcgacccagtcccgtaccaaggctcctacgctgtaacccgttcatgacaacgggtagcccaccgtagtcgagcctctgaacgtgatagcatgctaccatcgtattgacataacccttgacgacaccaaagatgttttggcagaagacttcgtccaccgcgttgacatcaccggacacatgagagtcgtcgtcctcaaggatactatggaacctcatgattccaa

SEQ ID NO: 14857 - DNA, 1427 bp, Glycine max
  Clone ID: PAT_MRT3847_113421C.1
ggctcggaattcggctcgagctcgagccgctcgagccgttttcataggatgtgtagggctttggtgcctggagatgatgaaaatctgaccgacgaagcagtatgggaaactcttgcgcacttctggatttcaatatccatggtcttctttattgctgccactgtgttcacccttctaaagatatgtggtgatgttgcagctctaggatggtgggacttgtttattaacttcggcattgcacagtgctttgcgtttcttgtttgtacaaagtggcacaatccaactattcatggaggctgtcatattacagaaccatgctcatcgtcaaataccataagatacctagacttgaggacaggaggcttagttgtttacacagatgaagatagacagcaaaatgggttctgcaatctacaggatatcggtgggcatattatgaaaattccattcattggtttccaaatacttctttttatgcatttagagggaacaccatccagtgcaaagaatctgccccactgggtcattttttccccactttttttgttgcaaggagctggggttttatttgcagcttatagattaatagagaagatagttcttctactctactttggagatattcctgaaagatactcagccatagcatcaaaatcccgtgagtgctttgggttctttcgacatgggtcaaggttgcttggttggtggtcaatatatgaaggaagtagagaggaagaagctagacttttttgtgctgggagtcctgggtcagtactctacccgcaagaagtaaaatgagtatgaaagacttcaaaatgtagcatccatttactattaaaagtagtatatctacaacattctgttaagtttgtaggttatttttgttcattgtttgtacttgaatgactgtcaagtgtatcaggatctaacactcttcaaattgaatggtaaatgtatcaggagaagatcttatgcagaatttgcttcgaggagcagattaatgtggtcctacttccctgcaggcatcacattctttgcagcacttgctgcgaaaaatgtaaaaggtgccctgtctgtcgtggaccaattgaagaaaggatgccagtatatgatgtgtagactgagttcaatgaagatgtataggtatcttactgaccatacagcttgtgattttagacgaggcaagcactgagaatgatcaaaatctcttctcatagatatgatgaacatcagaagttggatagaattttaaacgtgttaccccccctattttttcttccatagtgcattcttgcaattcagaagggattgccaatagttgcattgtcttgaattttggtaccataaggatttatctacaccaaaaatgaaagatgacatatttgaggtattatctgttttccccccatgcttgagagctttaaaat

SEQ ID NO: 14858 - DNA, 686 bp, Glycine max
  unsure (1)..(686): unsure at all n locations
  Clone ID: PAT_MRT3847_113422C.1
ccggcgtccggtgaggagttagtttccacaattttctgatcatcaaatcaaaccctcttcattttatttttttgcttaatttaccaaaaaaatggttctatgagtctcacgagtacgcatgcgatggatccagaaggtggaacaactcgtcaaaactctgctaagagagagtcgtggagaacggttctgactctggcgtaccagagtttaggagtggtgtacggcgatttgagcatttcgccgttgtacgttttcagaagcacgtttgcggaggacattaagcacacggagagcaacgaggaggttttcggcgttttgtcgctggttttctggaccataacgctggtcccgctgcttaagtacgtctttgtggtattaaaagccgacgacaacggcgaaggaggcacgttcgcgttgtattccctactttgccgccacgcgaaggtgagttctctcccgaattaccaggtggctgacgaggagctgcaggagtacaagaaagattcccgcggcgcggctcctgagaccagctttgcggcgcggctcagcagcacgtttgagaagcacgaggttctgcagagggttcttctggttctggcgctgattgggacctgcatggtcattggagatggcatcttcacaccggctatttctgttttctcanctgtgtctggattggagctttc

SEQ ID NO: 14859 - DNA, 906 bp, Glycine max
  Clone ID: PAT_MRT3847_113423C.1
atacatttaagttcatttcctcctctcctctctcttcattttatttttcttccatctgctaggaaaatgtctgtcagcgttgagggctctgcctttggggcactatttgaagaaaaaaatgtccattctgaagacagcaacgagcttgtgttgcatggtgcatttccattggctaaacatgagagacagaatggatttaatgccacagacatgaatgcatttggaaactccttcaggaactatgatgcagaaagtgaaaggcaaagaatggtggaggaattatataggatgcaacacatcaaccagacatatgactatgggaagagaatgagggaggagtatgggaaattggacaaattagaaatgggtatatgggagtgttgtgagctgctcaatgaagtgacggatgatagcgatcctgatttggatgaaccacaaatacaacatttgttgcagtccgctgaagccattagaaaagactatcctaatgaagattggttacatttaactgctcttattcatgatcttggaaagatccttatgcttccaagctttggtggccttcctcaatggtctgttgttggagatacatttcccctcggatgtgcttttgatgagtcaaatgttcaccacaagcatttcaaggacaatccggataacacaaatcctacttataacacgaaaaatggaatctacaaagaaggaattggactagacaatgttgtgatgtcatggggacatgatgagtatatgtatttggttgcaaaggaaaacggcaccactttgcctccagtagcattgttcattatcaaataccattctttttacgctttacatagggcaggagcatatacacatttgatgaatgaagaagcgattctgcaggttgtacaggaaaacggcacc

SEQ ID NO: 14860 - DNA, 255 bp, Glycine max
  Clone ID: PAT_MRT3847_113424C.1
ggagcttctttttcccaccttgaattttataaagagggtcatttactatgtatgttgcagctgaggatattgaagctggacctaggacgaagtttcaaacggaaccaactctaccaatatatctaaagttcacggatgtgacctacaagatagtgatcaaggggatgacaacaactgaggagaaggatatcttgaacgggatcactggttctctacatccacggcttgttgtggttgaggaagagaagagtcgct

SEQ ID NO: 14861 - DNA, 1142 bp, Glycine max
  Clone ID: PAT_MRT3847_113425C.1
ggaaaaactgttttctgaaggtgaagttagaaattggtgttttcaagttttccaaggccttgggtacatgcaccagcgtggatacttccatcgcgacctgaagcctgaaaacttgctggttaccaaggattttatcaaaatcgctgattttggcctagcccgagagatcagttcacaaccaccctacactgagtatcgtgctcctgaggtgctgcttcagtcttatctgtatacctctaaagtgacatgtgggcaatgggtgctataatggctgagcttttctctcttcggggtccgcccacgcgtccgcgcgtccgatttgctgtctaagacacagacggagagagagagagagggaaactctggattccacctcttcccgtccttcgtgacggtcctcttccttcgacctcttcagggtgatcaggctttgaatcttaaggttcttgttatattttttgagacatggaaagaatttgtttcttgtcaagttgcttccagaattggttgctttcattccaagaagtgcttgaccgcagattcttcatctttggagattatcttctggtttcctttgctaattgcacctagttttctgttctactttaatgatcagcacattgtacttaatgcttgtttcttctgagactagtgctgcatctttagggaatatatacaatgcattcctgactcaacatcaagttgaaacatttgaaagatccgcttctgggggatgaagtatataaattgatgtgtgaattttggatgctgcctgcttctcaagtattagataagcgattgcattgaaacagtgcagacagtacttattgaccatcattgtgttgttgcttctaatggatattggtggtgacaaaatattatttaccagaaaattctgaaaaatctatgtagcttagatgaagtggatattattgaagtcctcaagtcttgggtcatgatgaatttagctgaagattaatgttgctttgatcaatcattttttgttggacctgggaattgttagtatgttctccaggacttggttgattctaccacatgcatcctgctaccactacgaagctgtggatctattaaataataaggctatgctgcccttacatcagaaagttaatgattcttat

SEQ ID NO: 14862 - DNA, 476 bp, Glycine max
  Clone ID: PAT_MRT3847_113426C.1
tctaggaaggtttcccgtcatcactgtatgacgtcctccttctttgggggggggggggggacccctgcttctttgtttttggattatgtggggttatttgtgggttatggtatattaacttatctcggactgcccgttttgcgagttatcggacattaacccgtcaatatgtagtcgggatcaagccatgattcccgagtgaagttcggtgcgtgtagacgtccgcccatttacaacctgcttggtctggggcctcggttggtcgacagtgctccagggtattttgatatatcaaaggttatgtgttgtgcggtgtatgtacgcaaggccgggtacagtaggttattcggggccacatgggatgggaatttcaggatcttgatgctttgggattttagaggtcaaaatatgcttttttcgggattcctgcgcatcaggcttcctggggtgccgttcgacagccttgcacaacatgg

SEQ ID NO: 14863 - DNA, 562 bp, Glycine max
  Clone ID: PAT_MRT3847_113427C.1
aacttcaatattagtaaacaatcatcttagtttgagccaaaaacttcttaatacatcaacgtcaatgtattgttgagaacagtatcttccattctgtaagataacagaaaaagaaaagaaaaaaattgccaaccaaggattaggactttaaggacactggtttattatacggtcaaagatctcttgtgtttgtatgatgccattggcattcaatagattacatgtatagattgtctatttgctccctgtattgagccacaactctatctcttcgaattttcatggtgggtgtcattagaccattatcaatcgtgaagggttcatttacaagaaggattggtccaatttgaaatggagattctgatgtccaggtctttaattctttatatatcaggctcgtcactttttcctcactgacatctgaactgttggaatctataattgacaacttccttgctaccttcaaaacttcttctttgctcgtaacgattacagctcctagacggcgcttatcctggccaacaacaacaattttggtgaattatgctactcctcattgcag

SEQ ID NO: 14864 - DNA, 793 bp, Glycine max
  Clone ID: PAT_MRT3847_113428C.1
aagatcaaagcctaaaagataaagatgatgctatcccacgcgtccgaaagaaggtagatacattgaccaaagccatggaagttgaggcaaagaagatgagaagggaagtagctgctatggagaaggaggtagctgctatgcgtgtggagaaagaacacgagaacagagcaaagcggttcagcaatataaagggccctgtaaacattgctcagcaacagctaatttctggaagaaacgtgacacggggtggattaacacgcagcacccaatgacagttagtctatgacagtggcgcttgggagtagtaatctttcataggcatcattcttttgcccttctctgttttttcccttgtgtttttgtccaattgagttactgctgatattagccatggattggggataagaaaacaattgcaggattcggtatgcatcttctgacctagtgttacgttctctgcttagagagagagagagagagagatcggctatgaaggcagccaatggaagacaatttaacttggactaacctttgactctttcagcatttctgagtggtgtggttgtataggtagctttatcccctcctttactccttataatttgtaatacgcaaatagtgtgattgtgatggttcaggcttgttcatatgtactagcggttgatccgtgactgtcatgcacggagtatatgtttggttgtgaaatgatatcaattcacaatgtttctaattgttagagaaaacaccttgaaaataattcttttaaatagttattgattataatttgtgggtt

SEQ ID NO: 14865 - DNA, 840 bp, Glycine max
  Clone ID: PAT_MRT3847_113429C.1
aaggcgatgctattgagatgttagcaaagaaggtagatacattgaccaaagccatggaagttgaggcaaagaagatgagaagggaagtagctgctatggagaaggaggtagctgctatgcgtgtggagaaagaccaagagaccagagcaaagcggttcagcaatgtaaagggccctgtaaacagtgctcagcaacagctaatttttggaagaaaacgtgacacggggtggattaacacgcagcacccaatgacagttagtctattacggtggtgcttgggagtaatctttcataggcatcattcttctaccctctgttttttcccttgtgtttttgtccaattgattgtaaggttatgtaactggcatgccgaggaccagtgttactactgatattagccatggattgggataagaaaaacaattgcaggattcggtatgcatatcttctgacctagtgttatgttctctggttagagagagagagagagagagaccggctaagaaggcaggcaatggaagacaattaacttggactaacctttcactctttcggcatttctgagtggtgtggttgtataggtagctttattcccccctttactccttttttttgcagtttatatttgtaatatgcagatagtgtgattgtgatggttcagggtttgtcaatataatactagcggttggtccgtgtcatgcacggagtatttgcttggttgtgaaatgatatcgactcacaattattcctaaaaaaaaaaaaaaaaaaaaaaaaaaaaggaggaaaaaaaaaaaaagaaatagagaacccaaaaatataataacaaaccaataccggggg

SEQ ID NO: 14866 - DNA, 121 bp, Glycine max
  Clone ID: PAT_MRT3847_11342C.1
acagactacagtttttgatttcttatcagcaatgctctcaatattgtgaaattgacggacatactctgatgccatattttctgttaaccacgctttgccatatcatcaaaatgcctaatct

SEQ ID NO: 14867 - DNA, 330 bp, Glycine max
  Clone ID: PAT_MRT3847_113430C.1
cttgaagttattcttttgctgtacgtcatttccgcttccaggtacgtgttattatatctccttgatcgaagtcctctacatggaccattggctaaatcgtacactgcagaaatcgacgcattacagatcttcaaacgtaatcgatggccgagtgattaatacagcaaggcttgttcacgtgacttccgaatgagaattttgactaaatgaaacgctttgagagaattgcttgggccatgaactagaatgagtgacggtataaccctccgaaaagaaccattggtggacttacttatagttagcgcgtaactgtttagtgaccatattata

SEQ ID NO: 14868 - DNA, 710 bp, Glycine max
  unsure (1)..(710): unsure at all n locations
  Clone ID: PAT_MRT3847_113431C.1
caacaacgtgccaccactccgaaaacaacaaaacaaaaaccataaagagatgagttacttgctccgcctttggatgccgacaaccgtggccgcggcggagggccactccccaaacagccggcgacgggtgttctccgccggagacttgtcggagcttagacccgccgcgaagagtgacgtggtggtggaggataagcatggccacaccgacgagtctcttcggaaagttatgtacttcagttgctgggtccagggctagctagtatcctctgcttcgcgtcctaccacactcaatttgcaacccttttttattttcagctttcttcttgtaaattgtaagttttttttttatttttgcggattaacttgtaaattttaagatgtatagaacttattggacttcgatttcccaattacggagtaagagtaatttctaagcaaagttcgtaaaaaaaaaaaaaaaaaaaaaaaaaaaaaaaaaaaaaaaaaaaaaaaaaaaaaacctgggggggggcccgggccccaatttccccttatagggggtgttttacccccccctcatgggccgggttttaacaacgnggggatgggaaaaccccgggggttccccaattaattcccttggaagcaaatccccttttccccggtgggggaaaaaggaaaaaggcccgcccggatcgcctttccaccattggcccaccctgaagggg

SEQ ID NO: 14869 - DNA, 407 bp, Glycine max
  Clone ID: PAT_MRT3847_113432C.1
gcacgagttgccttctaaagttaaaatgaatagaaacaaattcaaattggcagtgctctaatagcggttgcttaaaaaaaaaaaaaaaaaaaaaaaaaaaaaaaaaaaaaaaaaaaaaaaaaagaaaaaaaaaaaaaaaaaaaaaaaaaaaaaaaaaaaaaaaaaaaaaaaaaaacccgggggggggcccgggccccaattgccccttttgggggtttttttccccccccccccggggcggtttttaaaaactttgggatggggaaaacccgggggttacccaatttaattccctttgcccaaatcccctttttccccggtggggtaatagaaaaaaggccccccccggtcccccttcccaacaggggggccccttaaaggggaaatggaacccccccttttccggc

SEQ ID NO: 14870 - DNA, 394 bp, Glycine max
  Clone ID: PAT_MRT3847_113433C.1
gcagatcttcctgaaaaccctaacaggttaaacgatcacgtcggaggtggaatcttcggacaccattgacatcgtgaaggcgaggatccacgacaaggaacgcatacctactgaccagccgcgactcatcttcttcgggaagccgctgtaggacaggcggaccctcgccgactacaacttccataaggagtccacgcttgacctcgtgctccgccttcttggctgcgccaataatcgcaggatgaatacctacaccatgcccaagatgatcaagctcaagcacaagaaggtcaagcttggcattcttcaattctacaaggtcgactattctggataagtccagaggctcctcaaggagtgccccaactccgagtgcggagccggtaccttgatg

SEQ ID NO: 14871 - DNA, 368 bp, Glycine max
  Clone ID: PAT_MRT3847_113434C.1
tggacgcgatacaacacgctttctctcacgtgtctcgtcatgagaccagtacacgcgttcacgacatatgataaactgcaatgtttttgcccaaatactggctatggatagggggagaaactaaacataggatggctactctgaatactatgcatctcgacgagattcagtctaagatccttttgcacaatcaaatactgatgagaaacaagggtatcctaccgattatcattctatttaaaacactgacaattacttattcttaggaactcaatttctagaatatggggtttcacatacataaactgcaacttatggatattattcacattctggatatggtatccatctatatccaaaagaaactg

SEQ ID NO: 14872 - DNA, 218 bp, Glycine max
  Clone ID: PAT_MRT3847_113435C.1
acagatgacagaagacgacagacgggagcaccatctactacactcactttggactctgacgactgcgcaacccgccgcgaggtgagcaacaattcttccttcacaatggcaaccagaggcctactacatttaccttctgtcatgacacgaccgttgaagcttatgaggataccggagatcttgaacttgttgacgatcatggaagagaacgaaggggt

SEQ ID NO: 14873 - DNA, 710 bp, Glycine max
  Clone ID: PAT_MRT3847_113436C.1
tcttgctgcctgcggtctaatgctgtggaaagcagaccctactgggatctactctactaagtcagcatataggctcttgctacctaacacagacctggtcagcacagcaggaacttcaagattctatggaagcttaaaattcccccaagggctgagttgttctcatggaggttgtttagagataggctccctaccagggctaatttgcttaggagacatgtggctctacaggatattatgtgtcctctatgtggaaatcaccaggaggaggctgggcaccttttcttccattgcagaatgactgtagggttgtggtgggaatccatgaactggacccggactttgggacctttcttagatgatcctgctgctcattttatccaattcagtgatgggtttggggcacagaggaatcacaataggcgctgtatttggtggattgctttaactagtactatttggcagcataggaattccctattgtttaagggcaccccatttcaacctcccaaagtgatggataatgcgttatttcatgcgtggacttggcttaaagctacggagaaaggctttaatattccttttaaccagtggtctaccaatcttctggagtccttcggttaatttgaaatctatctctaatagtggggctttttgttgggtttgtttttgggaggtggcacattgagtggcttgtatctgtttcactc

SEQ ID NO: 14874 - DNA, 485 bp, Glycine max
  unsure (1)..(485): unsure at all n locations
  Clone ID: PAT_MRT3847_113437C.1
ggggggggggtgtnagaagaaactgtgtggggtctctgccgggagagttgatggaacgcttgccgccaggctagttggtaagctgagctggtgtgcttggagactgcgagacagtaggaaaaatgtttcttttctgatacaatctttttggggggggggggaaactattattcnaggaacagtacttaccaattattacccctggatgaccagggcctaatctgagcaatgtgaacttctatgatctctgtagccagttatgaataagtgaatgtcatcggagaacggtacgagttattgccactgaatctttaaactgtataatgatacaagctaactcacacctaagagaatcaactgattgtggcgctgaagttactgcgagccctgttctatatgctagattgaatattggggagcttgttgttggactaggggctaattatgctgctggatatatgacattgtgggaaactcggctagcc

SEQ ID NO: 14875 - DNA, 1330 bp, Glycine max
  Clone ID: PAT_MRT3847_113438C.1
gcacgaggtttaactaccgtcttctccctcccttccacgactcgctgaggcgcctcttcccgcttccattcccccgtgactccttctgtctcctgtttaactaccgtcttctgcctcggattcacgactcgctgagtctccgcaactcggaacgattccaccgaacgccgattctcaccgcaattcggtttgttcggatccgatgggtagcatcgtggaagacgccgacacagacacggtgtatgtggcggtcggaaagaacgccgagaagacgcagcaactgttgcattggacggttaagaatttctccggcaaagaaatctgccttcttcatattcaccaacctcactctctcaattcattctctgacagaaatctctctgggtatgaaccaaaagaccatgcgatcaaagcattccaggagcatggaaatcaaaaagtgcatgaacttctagaccaatacattctcactctggtcccagcaggggtacgagcctacaaattgttgattgagatggatgatattgagaaaggaatcacaaaagctattgctcaacacaatattagatggcttgtaatgggagcagcagcagcagacggatataacttgggcaaactggctaagcaagagtcggagaaagctatttttgtacgtgaacaagcattgctatcctgtaatacgtggttcatttgcaagggtaacgtcatatgtaataggtaaaaatgtaaacgaaaatgacatttgcagtgcaatgacatcattgtgatgtcttatgtagggtgattgttctccttcatccttggtgtaaaagtatctgtttcatactttatattttctggtgtgccactactcttttatggtaggactggaggagaatttttctttatgtgtctacacttgaaaattatgattacttgtgaataagataagagagtgtatcagagggattttgaatattattctcagtctataaaaatctattcatttcagtccatagtctgatatcttctttctgttttaaactaatttgtgaggttagcattattcatgatttttttgctgtaggaaaatgaagggaacaagcaagcaaaataaattttagactggaaaaaagcatcatagatgccaagagcgcgaaaacaaaaggatatgaagtggcattaaagaaatggaaagtagaaaatagtaatacggaagttgatgacacaaatattttctctactaatataaaaaaaaactagtatatttttttcttctaatggtgtctcaagtttggtttcttaaattttgttccttggtttctatttggggtataagtataatatttga

SEQ ID NO: 14876 - DNA, 420 bp, Glycine max
  Clone ID: PAT_MRT3847_113439C.1
gggggtatccattaaccaagcaatgtttatgttcattttttttacaatgttataaatgcgaagtatttattgactttgtgaatcaatgactatctaaaatttattatattacctttaagggaatctttctttacaattacgtttttttcttatctacaaaacttgaatgtgagattttatcggagtccaattccacttacactaaggtaatgttgctaaggaatgctttatgttctaaatactaattattcactctctcccttgtacaatacttaaccaactaacaccactacagcaccaaacgactcctttgttgctctggcctttcccttaaagaaacagaaagccaatgcaataatgtcaggtaaaagagcacactaaattggtgctgaggactggcttataaaggttatatccctc

SEQ ID NO: 14877 - DNA, 479 bp, Glycine max
  Clone ID: PAT_MRT3847_11343C.1
caaagcttcaaagacgcaaagatcaaattcatctttggtaatacatgcttgcttctggtgatattcgggatcgtgcttctaatcgtcatcattgttcttgctgcttagtcatagactctggattctattacaaatcaaatgctcttacatactgagttgcagatacgatctcccttgctgatgactacactgaatggtgatttaccagatctcacgaatgaccggaatttgtctcatcaggtttcagtacatgatgtgggaatattcacaacattagtgtatcgttattttggtgggtatatgttctggtttctttgttggtgtttggggctttaaggatgtgtcacaacctgcctgctgtgtatgttatctttttggtttcttaataaacgatatattaattcgttctttacctgtatacgcaacttgaaaattagcatgactgactcttctttagtaataccttgatccattcaccc

SEQ ID NO: 14878 - DNA, 496 bp, Glycine max
  Clone ID: PAT_MRT3847_113440C.1
atcagttgtcaggaggtataaaaggagtccccatcccaatagtagctgtgtgttgtgctcaccaatacagtactatgatttcaagtggactgaaaccgaagcacttcaacaacgttcattcgctcttcaatctttccaaatcccaacaacccccaaatccaattatagtcccatgctgccgaaccaacaccaacaataacatctcttctccattctccattcgtttcaattcgcctttcccataccggagccccaagattcccctaaaatgtgcaccgctgcactcttcagattccctgccacccgatccttcctctgcctcgacccagatggagcaaaattcaatgtcaattctggagattcttaagcaatcaaattcatatctgcctcatgcactcattgcaagtatactgctagctctaatctacccacgttctttaacgtggtttaccagcagattctatgcacctgcactaggttttttgatgtttgctgt

SEQ ID NO: 14879 - DNA, 699 bp, Glycine max
  Clone ID: PAT_MRT3847_113441C.1
ttttcaatctttttttctcttgctaattttgcttcatcattttttgtttcttctccaccaaagggtgtggttcttgattactgaaccttctttacttctgttttctgatttcaagaactgcaatgggtcattgtcacactcaaaactgctacccccttcaaatcagttcccccttctatgcttctatcaaagctgggtagttccacctttcttgcccaagaactagcctttgcttcactgaattctgacccacttccctccatgctatttttgtcttgttgggaggcatgggaatcaacttcttcattcaatatcttgcacaacatgtgtttccgctctgaaatgttgatcctcccttccaagaactctgtggaagtctcccattttttgatatgggtttttgtctcagttggcttttcttgcttcaagatactcaatctttcaaagatgtggttaccatggtgatctctgaatcttttgatcaaagctgtggaaaatgactcccaatttgaatctgggttgttttggctccaaatgtagaaccaatgtgtcgcagcaccctccatgctcatgaatgcatattgcagcttatggaatgaaggaatttcttgtacctcagaattttccagccctagcaatccaaccaattgggtttgtccccatgaatgctggcagtttcaccttcttagtccaaatttg

SEQ ID NO: 14880 - DNA, 754 bp, Glycine max
  Clone ID: PAT_MRT3847_113442C.1
atcaaagaaaggggcatgaacaacaggcttgcagatcgtattaagaatttcttaaatcgattggttgaagaacatggaagcattgaccttgaatggcttagagacgttccacctgacaaagcaaaagaatacttgctcagcataagaggattgggactaaaaagtgtggaatgtgtgcggcttttaacactgcaccatcttgccttcccggtagacacaaatgtcggacgtatagcagtacgactgggatgggtccctctacagccactgcctgagtcactgcagttgcatctcctagaattgtacccagtgttggagtcaatacaaaaatatctctggcctcgactatgcaagctagatcaggaaacactatatgagctacattaccagatgattacatttggaaaggtcttctgtacaaaaagcaaaccaaattgtaatgcatgcccaatgagagcagaatgtagacacttcgctagtgcatttgcaagtgcaaggtttgcactgcctggaccagagcagaagagtatagttagcacaactggaaatagtgtgattaaccagaacccatctgaaatcatcagtcagttgcacttgcctccacctgagaacacagcccaagcagatgatattcaactaacagaagtgagcagacaattggaatcaaatctgaaataaatatttgccaacctacagacgatgcttgcagaatcacaaactgatatagaggatgctgtctatgaggattcaagtg

SEQ ID NO: 14881 - DNA, 241 bp, Glycine max
  Clone ID: PAT_MRT3847_113443C.1
gtgggaaaccatttttttcccccttttttttttaaaccccccaattattccttaaaacccttttattaattctactaaaacaattttgggtcaaaaatccatttggaaaaaaccccaaagggtagaccaaaaagtgttttaccccttttgggaaattcttccccaaaaaatataaaaaaaaaccggccactccgtgatttgtttttttttattacccccccttgaaaaacaatatatattt

SEQ ID NO: 14882 - DNA, 257 bp, Glycine max
  Clone ID: PAT_MRT3847_113444C.1
aatacgacttgccaggcacctggtgtcaatgggtcatcaagctggtgtggcactatagctatggaactacccagagaggctgatagaactaggtccacaggatatatatagcgcaggtaggcctggtcatgtggatctagctgctatagacagtatagtaaactgtaatgtatcataatcttaaccactgtgaattagactatgtgcacaagggaccaagaagtcaggactaacagaatcatgtgatgtgggcggtt

SEQ ID NO: 14883 - DNA, 797 bp, Glycine max
  Clone ID: PAT_MRT3847_113445C.1
cacgcgtccgcggctcgagcttctctttctacctttgccatgcgcatcacaatgcaggaataatctcttccttctcagattcttcgctttttttccccagtagtcataggtttaaactatccgtgaaccgctgcaccctctgacaacatggctcaagccaaatatactagaatagacaataacaagcgaccgtcaagttactgttcaacagtgactattgtcgtgtttgtagctctttgcttgtttgggatttggatgatgacatcgtcatctgttacacccgtgcaaaatgtagatgtgtctcaggagaataatagtgaggtgaaggaacaggcaactgacccctctaataacaattctcagcagtttgaagataatcggggtgatctgtccgaggatgcaaccaaaggggatggtagtgtcacccctgataaaaactctgacgtgaaagaaaaacaggaggagaaatcggacgaaaagtctcaagaaaaaccttctgaagatacaaaaacagaaaatcaagatacaagtgtgagcgagaagagatctgattctgatgagagccagcagaaatctgattctgatgagagccagcagaaatctgattctgatgagagcgagaagaaatctgattctgctgagagtgagaagaaatctgattctgatgagagtgagaagaaatctgattctgatgagactgaaaagagttctgaatcaaatgataacaaagcatttgactcagatgaaagggagaaataatctgattcagatgaaaatgaaaagaagtctggtgatgc

SEQ ID NO: 14884 - DNA, 407 bp, Glycine max
  Clone ID: PAT_MRT3847_113446C.1
tttcgtccgattatactcactggtggtcaccattttcaattgattactgcgttcgactccacgaggctcgctatggagtgacatattgaggcccgtcaggagctcataaatgtaggaggggcatagccaagacaacacactctcatttataaaagagggtctcagataaccagacctctgggaatggactgtctctgcctagagattactgagcacccgaccaagagttttgtgcgaagagctagaacttgttccgctggcttgacaacgaagctatgtattgagcacagccggcagaaatgatcaacagtctttgaggtggtgatgaaaaaatgaagcctgaactgacacaccggctgttggctttgacgctcaaggatggcagattggaagacaaagatctcttg

SEQ ID NO: 14885 - DNA, 192 bp, Glycine max
  Clone ID: PAT_MRT3847_113447C.1
ttctcgtgaacggtacctcactgggatcgccgtcgctgctgatagcggtggtgacggatcctccgacgtgtagttcgcggaatatgcacttctctgtgcgtccctcgcattttggatctgcacattgatagtcacttcggtatttcccttctcgctccatctcggtggtcttaccggggtctttggattatt

SEQ ID NO: 14886 - DNA, 782 bp, Glycine max
  unsure (1)..(782): unsure at all n locations
  Clone ID: PAT_MRT3847_113448C.1
cttcggactgataagcatggaagcacttttcaaatgatcaaatcaaattctctgttcacgttcacatcttttataacccgttccatcttttgctttctcctgggactgcacccttcactcacaagtcaccagtctctctcttaggttgtgacttgtgaggatgtcaactcctgcaaggaagagactcatgagagatttcaaaagattgcaactagatcctcctgctggcatcagtggtgctcctcaagacaataatattatgctttggaatgcagttatcttcggaccggatgacaccccctgggatggaggcacatttaagttaacacttcagttcaccgaggattatcctaataaaccacctacagtgcgctttgtttctcaaatgtttcatcccaacatttatgcagatggaagcatatgtttggacattttacaaaatcaatggagcccgatttatgatgttgcggcgatacttacctcaattcagagcttgctttgtgatccaaacccaaactctccagcgaattcagaagctgctcggatgtttagtgaaaacaaacgtgaatacaacagaagagtacgagatattgttgagcagagttggactgctgattaattatcttggagcctctattgctgttanaaggttgtcaaaggatctgattgaataaccatataagtacttaaaagaacaattgtgttttgtaacccttgaaccatgtgtttgttcagacttatatgaatggatgctccaccttatgatctcgaaaaaanaaaaa

SEQ ID NO: 14887 - DNA, 248 bp, Glycine max
  Clone ID: PAT_MRT3847_113449C.1
gacaatagaaagacacagggtgggcaacaaacgattttttgcagatttggcatcaaaggaccaaattcagcaccagctgggaagctatttacagaagccaatcaaaagggctaacaagcttaagataggactaacggtctagaactaacccactaaatattgattgtgtccatgaaggaaaagcttcaattcttgacttaccggggggagaccatgctccatttaatccattgatacgttgtttccca

SEQ ID NO: 14888 - DNA, 420 bp, Glycine max
  Clone ID: PAT_MRT3847_11344C.1
gattcctaaagctctgctgcctcttgagatatctggggaaacttttggagaagtgaaaacagttgcaaatatgcatgaaaggaaatcagtaatggctaaacatgctgatgcgttcatagcccttcctggaggctatggaaccatggaagagttgctggaggtgatagcatggtcccaactaggaatacatgataaaccagtgggtttgttgaatgtagatgggtatttccacagcttgctgtccttatttgacaagggagtggaagagggttttatagacaactctgcaaggcatattgtagtcatagcagacacagcagaagaactcataaagagaatggaggaatatgtccccaaccatcacaaggttgcaacaagacaaagttgggcaagggaccaattattatttgagcctactga

SEQ ID NO: 14889 - DNA, 281 bp, Glycine max
  Clone ID: PAT_MRT3847_113450C.1
gcgcgccctgcggcccggcctctagtcatcgccctcgcagcggcggccaacatcaccgccactgccacccctcccagactgtggacgggaggatggagtcgatggccgtcgctaccgacggcggggagaggccgggggtcccagcgggctcaggtctgtacggcttcccagcgtcgggcggagctgcgtcggagaaagctgctcatgaactcggaacagcgcatcaaccggatcatgggctttcacaggcccgggagcggcgcggagtgaaaagaagataa

SEQ ID NO: 14890 - DNA, 352 bp, Glycine max
  Clone ID: PAT_MRT3847_113451C.1
tgcgaggggccaaggtataaatgtgagaataaagattgccaaaacaaaagccctggggctacgtattaatggaccatttgggaaacccggcaatgaatccataattccgatcaaggacccctccaacttttatgacagagcttatcactatgttgtttgggacggagaaaatagaaacttctgtctgttatggaatgaaactcatgccgagtccatatatcatctcactatttgggaatgatacctcgggtaaagctttggctttctgtgtcttccccaagaagaacacacgaatacctcggcctttgtcattggcggactccccattttaatgggggctacctcaaacaag

SEQ ID NO: 14891 - DNA, 362 bp, Glycine max
  Clone ID: PAT_MRT3847_113452C.1
gtcaaacctggagatgggaccacacttatacaaaaatctccaatgagtaactcgctgagagcagctgcttggaagaacggctggttaatggttaagactgtgatgtctagcaatgcaggaggcaagaggagcgattgggcctcataggtacaagtgttgttaacaaacagcaacagcacagaacattgtgatgcatgtaagtggacaaaatcggaaccacattcctgggaattgacctaaccaatagaggtgaggggccctaacaatgggtacgaaatgtgaagccctgagagagcaaaccaaacttcatggaactggagcttccttatcgacaatgccaaacagtctacagttgttgacat

SEQ ID NO: 14892 - DNA, 2497 bp, Glycine max
  Clone ID: PAT_MRT3847_113453C.1
cgaccttcactaccaatgcaggcaacagacattattctgctgggcctgggcttgctcttcgtccgctggtggtggcggcgctggtccaccaccggcggcggcccgaagaacctccctccaggccctcccgggtggcccatcgttggtaacctcttccaagtgatcctgcagcgccgtcacttcatttacgtgatccgcgatttacgtaaaaaatacggcccaatcttcagcatgcagatgggccagcgcacgctgatcatcgtgagcagcgcggagctaatccacgaggcactgatccagcgaggcccattgttcgcgagcaggcccagagactcccccatccggctgatcttcagcatggggaagtgcgccatcaactccgccgagtacggccctctctggcgcaccctgaggaagaacttcgtgaccgagatgatcacccccctgaggataaaacagtgcagctggatacgaaaatgggccatggaggcccacatgaaaaggatccaacaagaggcccgcgagcaagggttcgtccaagtgatgagcaactgcaggctcaccatatgcagcatcctcatctgcatctgcttcggcgccaagatcgaggagaaaagaatcaaaagcatagagagcattctgaaggatgtcatgctcatcacgcttcccaagcttcccgattttttaccggttttcactccgttgttccggcgtcaggtgaaggaagctaaggagttaaggaggaggcaggtggagctgctggcgccgttgataaggagcagaaaggctttcgtggaggggaatttgttggagctgggaaatcattatgacatggcgagtcccgttggtgctgcttacgtggactccctgttttgggggggcgtgggggagcggggatggggttcacgtgaacgccactacggctgcgaggagacgacagaaggggttcggtgttgggaggaggatttgcccagcgtggacaatggggattttgcatataaatatgctgctggctaagatggtgcatgctttccactggctgcccaatcccaactctccacccgacccgacccaaaggaaggatttcactaccgagatgatcacccctctgaggataaaacttgggccacggaccattaaatgggccatgatagcccacatgagaaggatccaacaagaggcccgcgagcaagggttaacacaagttatgagcaactgttggctcaccatctgcagcatcctcatctgcatctgcttcggaaccaagatttatgagaaaagaatcacacgtctggagagcattctgaaggatgtcatgctcatcacgcttcccaagcttcccgattttttaccggttttcactccgttgttccggcgtcaggtgaaggaagctaaggagttaaggaggaggcaggtggagctgctggcgccgttgataaggagcagaaaggctttcgtggaggggaatttgttggagctgggaaatcattatgacatggcgagtcccgttggtgctgcttacgtggactccctgtttaatttggaggtgcctggacgaggacgcttgggggaggaggagctcgtgacgctcgtgtcggagattatcagcgccggcaccgacaccagcgccaccgcggtagagtgggcgctgcttcatttggtgatggatcaagacattcaagagaggttgtataaggagatagtggagtgtgtggggaaggatggtgtggttacggagagtcacgtggagaagatgccttatttgagcgccgtcgtgaaggagactttccggcgacacccaccgagccactttgtgttgtcgcatgccgccacggaggagacggagctgggtgggtatacggttccgaaggaggcgagcgtggagttttacacggcgtggttgacggagaatccggatatgtgggaggatccgaatgagttcagaccagagaggtttatgagtggggatggggttgaggttgacgtgacggggaccaaaggggtgaggatgatgccatttggtgtagggaggaggatttgtccagcgtggactctggggattttgcatataaatttgttgctggccaagatggtgcaggctttccactggttgcccaatcccaacgctccacccgacccgactgagaccttcgctttcactgttgtcatgaaaaaccctctcaagccacttattgtgcctcgatccatttaacacttagttatgtgtgaaaaataacatttgagcagaagggatatatgaggtagatttatttttacagggtattttaatttggatgatatgtcattggtctgctagctcattgcagttagttgccatggaattccaaccttctatgtatctatcattattatttacttacatataggctttatcgcataaaatattgcacaattttattgtagaggagcggaattcgttccaatttgcgtccctactatataatataagtgaaggtgctaatgtgctgtgctatct

SEQ ID NO: 14893 - DNA, 143 bp, Glycine max
  Clone ID: PAT_MRT3847_113454C.1
cgcgtcgagaatttaattagcatctggtcctttctcaccatgtgtaagctatatctctaatcacatgttgggacaccaaagtaccttctaccaatgaccttaaacttacaccgccgctttgctgttacatactactatttgct

SEQ ID NO: 14894 - DNA, 238 bp, Glycine max
  Clone ID: PAT_MRT3847_113455C.1
ccgcgagaagacgacagaggggggggggcaggttcaaaagaatccccggacaccccccgcaaaaggagaagagaggggagcgcccgaggccgacgaagaaaggcgcgcaaaacggaaccgcaagagcgcagcgagcaccgcgcaaacgatccacgggccagacagggaccacgcgcggaggcacaggaaaacacgcgaacaaggcacacccacgacgagcgaagcacccacccaaacg

SEQ ID NO: 14895 - DNA, 845 bp, Glycine max
  unsure (1)..(845): unsure at all n locations
  Clone ID: PAT_MRT3847_113456C.1
tgcatgcctgcagaaaagatctctagttgcttaacagtatatatatctcctttttctcatctcccccttaataccctgttatatggtacatataactattgccctgtctatgtcttgtatatgttccaaaaagtattaaatactccctccgcccctaaatataagactcttttaactaatttacaccctttaaaaaagttggtgttaatatagttagtagcaataaatttctttaacaatttgtattattttgccaaaattacccttgagtttattgggactcataatctctctctttccacttaattgctttcacacctaattaattaatgtgtgctagtcttcttatccaattcttataagagagataatgaatttatctattaaatatatagtatttattataaagtaataaagggtatatgggtcaaaaataattaatgcaaaagacaacttgaaagtagtcttataaaaagggacaaataaaactgaaaaaagattcttatattcagggagggagggagtataacttcacgactgataaagacatcatatatagtgcaaaaattagaaaccgaataaatttattttaaataataaaactctatgtaatctctcctctctccttattttataataatacattgtctccactaggaccattatgtcttgtaaaagctagtaaatcactaccctttatttaataaagttcagaccagcgtctaagcaggattcaaactccattctccacctttggatatatntctttctgttaataattaccatcaagttcaaatgancatnagggtcagaatcaagacctgatctaatgagttgcgagcaac

SEQ ID NO: 14896 - DNA, 294 bp, Glycine max
  Clone ID: PAT_MRT3847_113457C.1
ccggtattgtaagaacaagccgtacccaaagtctcgcttctgccgaggtgtccctgatgccaagattcgcatttttgacctggggcggaaaaaggcaaaagtggatgagtttccgctttgtggccacatggtgtcagatgaatatgagcagctgtcctctgaagccctggaggctgcccgaatttgtgccaataagtacatggtaaaaagttgtggcaaagatggcttccatatccgggtgcggctccaccccttccacgtcatccgcatcaacaagatgttgtcctgtgctgg

SEQ ID NO: 14897 - DNA, 137 bp, Glycine max
  Clone ID: PAT_MRT3847_113458C.1
taccaacttcctctctaaaaacttacccactctaaaatctaattaacatcattatttatcatcaatgatatatattaccagtacactattcgaacaataatctactccaaatcctattaattataaacaaccttaac

SEQ ID NO: 14898 - DNA, 901 bp, Glycine max
  unsure (1)..(901): unsure at all n locations
  Clone ID: PAT_MRT3847_113459C.1
acgagccccgttgtgaacgacattaatagttgtaaagagcagatgctaatttttaaccgaaactacggaattacatttttttatcagttaatattaactgttaattttttattaaaatgttaatgaaaattcaaattcaacttttaaactctcttcttaaccactaagtcaacattataacttttcaattataaagttaggcacatatgatgaaccatcaattgtacctcaagtgtgaatcgagattgagtgaattaaaggctaattaaatatggataagccatggaacagtgaagaagttgaaaggggtattagaataatgacgtaaaatcaaatgtaacacttgtgtccagtccacaagggcatcgtggacctggtttctaagcagagaagtggaccatttagatattaaccatgcattgctgccttttctgcgaccacatgccttgctacttatgtatgtcatattgaagaagacagcctaccatctatatatatatatatatatatatatatatatatatatatatatatataatttgtacgtacatgtaaaactatatattatattatgagctgtgctatagtatttatatatatattgcaatttcctaattaatcagacaagctatagctagcgacccaatccaacaacagcatcatcaatctgattaagagccactagtcaatgcgtgtctggtcccactccgcggattcaagagttatgacatgatcacaaccgtaactcgacatatgtatatnnntctatgtataatatttcaaatatgtgtggaaaggacttgccacaagtaatttgttcaagataagttgttggaaatgtttttataaaaaaagtatcatgtttttttattttaaaaaatttatacaactgttgatgtca

SEQ ID NO: 14899 - DNA, 199 bp, Glycine max
  Clone ID: PAT_MRT3847_11345C.1
aacgaccgactcgacacacccactgctttcatacgatttcaaaaatacttttaaagttattgtgaaattaatggacagagataaaagaaaaacatttattgacaatctacgctttccctaccaattttcccttccttgtctcctctgtttattaaccctaattctcctttacatctcagcaccctttacccttttttta

SEQ ID NO: 14900 - DNA, 270 bp, Glycine max
  Clone ID: PAT_MRT3847_113460C.1
agcttacctgtccgccgcgaaagtgagcattggactgcgcagggtgcagaaaagagggaagaggagagtgaaaccgcgaaatgacgagcatttcgtatctaaccaacactctgctgccactgcacatccgaaggtttcggccttctctatccactctctcttgctctctggcctcagatgtggaccccactcccaattcctacttccccaagcgcggccaaaccctcgaactggtgtgcgagtcccttgccttcaaagggaagggcctct

SEQ ID NO: 14901 - DNA, 275 bp, Glycine max
  unsure (1)..(275): unsure at all n locations
  Clone ID: PAT_MRT3847_113461C.1
gctgggctggctactatgattgctgctatgcgacctgatattgataacattgntgantatcttaggaacactantgctagggccttagtgttgttgcttctgcacttggtattcctgcactgttgccattcttgaaggctgtggtcagagtaagaaatcatggcaagctaggcacacagggattaagatcgtgcagcagatcgccattttaattggttgtgcggtgttgccacatctgagatctcttgtggaaattatagagcatggtctgaatg

SEQ ID NO: 14902 - DNA, 626 bp, Glycine max
  Clone ID: PAT_MRT3847_113462C.1
caggcactcctcgagttcttccctcgtccttacaaatcccttcattatgggcataaactccaatatatcagttctatatagcagttgttactcaaaatgaaggacctgttcatttgcatattttgctcattcaaaatcattaaaacgatttaggtttcatagtgaatgataagttagcggaattcaacgactttggattgttaacatccatacatctttctcctaggaagcaaacacaacactccactgatcgtgccctgggttcttaccataattttctttcctttctaatttctatattttttattttattattaattggatattattttcctcagctgattagtatacatggtagccaattttttgtgaattacatattgttttcctaatgtggactaaggtctgaaaccgctgacaaagatttgtgtccaagtcaagcaaattagtcagagaatttttgtggggagggtgggaggggtaggctggtgggggcccggctgcccccttggtgcgagccgccgatctgctcgccttgcgagctctgaaaattagcctcggtgggccttaaaaaatgttaagtaccccccgaactttcggctagaacgaacttgggagcgcaaaac

SEQ ID NO: 14903 - DNA, 303 bp, Glycine max
  unsure (1)..(303): unsure at all n locations
  Clone ID: PAT_MRT3847_113463C.1
aagtangnaattngnaagnaanctctannnngcatcncannnncactctncaaatcnatntcttctgcagcgattcatgattnnaattnnaganattcatgntnnttancaaacatntcangatncggaagaggcaaatgtggagatttgaatgnnanncntnanatnntnctganttgctngncnaatnntcattcntannagagttaagnnnaccannttntaaaatattgntactannctnntaananatgctcntactnggnnttnacaaggntagaattaatggnnaaaangntgttn

SEQ ID NO: 14904 - DNA, 668 bp, Glycine max
  Clone ID: PAT_MRT3847_113464C.1
gacttggtggccattgataagggtttcaactttgagcttgatgagttgttgagggcttctgcttatgtgttggggaagagtgggttggggattgtgtataaggtggtgctggggaatggggtgcctgtggctcgggggagattgggggaaggtggagaacagaggtataaggagtttgctgctgaggttcaagccattggcaaagtgaagcatcccaactctagccgattcggctcgagttattgggctcctgatgagaagcttttgatcagtgatttcatctccaatggcaatttggccactgcccttagagggagaaatggtcaaccatccccgaatctttcatggtcaaccaggctgaaaatcatcaaaggagcagccaggggtttggcctatctccatgaatgcagtccaagaaaatttgttcatggtgacattaaaccctccaacctccttctcgacactgacttccaaccccatatttctgattttggcctaaacagactgatcagtataacaggcaacaacccctcctctggtggctttatgggaggatctcttccttacttgaagccatcacaaacagagcgaactaacaactacaaagcccctgaggcgcgagttccaggttgcagacccactcagaagtgggatgtgtattcatttgg

SEQ ID NO: 14905 - DNA, 685 bp, Glycine max
  unsure (1)..(685): unsure at all n locations
  Clone ID: PAT_MRT3847_113465C.1
gaagaaatggttattcagaaaggatccctcaaaggcacagagacagcacagcaccagtccggttactccttgcccttgttgcgctgctcacgctcctctagaatgctgagctgaatacctctacgcttgggcagtgacactgcggcgtccttgccattgccgaggacaaagacgttctcaattcttgtggcgaagttgttgcccttcttatcacggaggtgaacaatttcgttgctaccagggtgcttctcctggctgacgatctcaccaacacgaccgatgttagcaccacgggtgatcattgtcacctgtccagactggaaggggtagtgtccagtgaccttgttggtggtgaggtcgaaacggacggtatcgttgaccttccaggcagggtcagcgaagcggatggttcggccatcatgagtcacaacatagggaatggcaccggcttgaccagactgggtggggttacgaccaatcgaggccttcttgccgactgccttacgaacgatgcggagcagcttgtagttggcctcctcggctgtgatacggtggagagtgaagcggcccttgacatcatacaagaggcggaaccgctcgtttgacttggcgatctcgacaacatcctggaaaccagcggngttagttgatgttggtgcggacctttttgtagacctcaacgtgc

SEQ ID NO: 14906 - DNA, 381 bp, Glycine max
  Clone ID: PAT_MRT3847_113466C.1
gaagactgctatggtctatgagctagggggttggtttctaattgcccagattatataccattatactgggtaataagtaaaggttaagatacagctacaaattcagcgagaagcaagtaacaggaaaaacatgtcattaggtaggggtgatagaactagctgcaacattatatgaaaatgcttaagctctatttactgaacagcaactggatgttcagatcggggctgaccctcacaaatataatggtcctgagtaagtatgggagcaccgttcatgtactgataccttgcccccaccgagagttatgtagaagtacctttcacgactcacaaacaggaagaaatactagaaccatctagttccatcttctctggaagttc

SEQ ID NO: 14907 - DNA, 309 bp, Glycine max
  Clone ID: PAT_MRT3847_113467C.1
agaaaagatcatcttttttcaaataaatgagaagggatttatttgtttatatttaaagtttaacatttgaggcccgaaattttaacccaaaccataaataactcaccagggtcataaaaaaaactttggaaaaatacttggtttttgggttatgagaaccatttcctgtgttaatggactatcttttttgggggattttgtgttttcatggaggggccctaatgggggtatcactcctgacccgttttcagtttttatttttccaagaacttgcataaaccgcctattaaggggcctgtattatgtggc

SEQ ID NO: 14908 - DNA, 589 bp, Glycine max
  Clone ID: PAT_MRT3847_113468C.1
aagacagatacatgcccctattcattgcattcacagacttccatgaattgacaaaatcttccgcttcctctatatctctgttattagtgacccaactgaatatgctggaaatgacatcaacttttggtctccaccgtttattctgtgcatgcacagccacagcttccttcatgcactgaaatgccttctccatgttctccttggccacatacccagatgcaacgatgctccaactgttgggaattggcgtcttcccttccgcaaccatttttcggagaagtgcttctgccttctcaaccaatcccctttggcaatacccaatcagaaggatgttaggcactctgaaatcacaagtgttaccagataactcccactcaccgagtactttttcagctttatcaagctcccccagcttcaccaagcaacccaacattgttatatactccctattaagctgcttcttgcagttggccttctggagcttccaagctctcatcatgccccccttgctcctaagagctgcattgtgtgaaatcagatggttgtaggcaactgtattgcccctgtgtgtctttttctccacttcatt

SEQ ID NO: 14909 - DNA, 385 bp, Glycine max
  Clone ID: PAT_MRT3847_113469C.1
cttcttttttttttttttttccttttttctccccctcttcttttcttttctttctctttttttttttttttttccctgcgcgcagaaaaaaaaatacttattccggcaacgaacccaatccctcattccggcccggtttctcatttttccccatcaggggccaagaacgggcccaaacaaatcatcgggtgcccccgcagcatcgtctaacggcaccccgtttaaatcaaacggccacggttctcccgggaaccaccaccccccgttgtccccttcccccgcgtcaacgacggaggaccacaaatcgcagcccctgcggccgcccccggggataacggggggcccccggggatacccccggccgggggcccccggcgctgccgcc

SEQ ID NO: 14910 - DNA, 3735 bp, Glycine max
  Clone ID: PAT_MRT3847_11346C.1
tgattaccctcccactccacactcaacgctgtctctccctcacaattccgatgagctccaacaactccacgcagtccgcggagccgcctccgtaccaacctccgcaggcgagcaagccctaataaataagtaagaagagatcatggacccagacgtgtgcataagcgaacccctcgtatccgaggacgaagaatccgtcattagccgtgacagtgagcaacgccaggccgtcgacaactgcctctccaagtggacacgtcctcctctctccgccggctacgtcgcccaatctcgtagcatcatgtagtggaagcaaatgtaggcatacattgattgagagaacaagacggagtggctgcggcaaatgtacgaacagttcatggctatgaaaacaattgcatatattatagaaggagacacagattcagtcaaggtacaattttgtgaatcttctgtatacatatctattaattagggaatagagacagctgaaattattagtggaaatttcacacaagtaagacttaattgagactaaaattattttattaattcgaagaaagttttacgccgtagtaaaatagcgcgtgaaaggagtattacgtactatcagcaatccaattcccaaccctttctcaaaattgtagttgcactcccaacaatggttgccagctgccgtggtattcttgataggggtattcaacttgatggtctgggaatgaagagcttcttgacttatgaaagcaatgtactttttgcccttcgcttcatgattgattgtaacatagttggtggaaattggattgggattcctgccggaaaatataagaaaacagcgaaaagcttgtcttactgccagttagagtttgattgcttgtattctgaattgattagtcatgctccagaaggggaatattcaaagatggctccgtttcgcattttgagttttgacatcgagtgtgctggtcgtaaaggtcattttcctgagcctacccatgatcctgttatccagattgctaatttggttactttacaaggagaagaccagccatttattcgtaatgtgatgacccttaaatcatgttctcctatcgttggtgttgatgtgatgccatttgaaacagaaagagaagtcctgctggcttggagggattttattcgtgaagtggaccctgatattattattggatacaacatttgcaaatttgacttgccatatcttattgagagagctttgaacctgaagatagcagaatttccaattctgggtcgtatcaggaacagtagagttcgagtaaaggatacaactttctcatcaaggcagtacggaaccagggaaagtaaagaagttgcagtagaagggagagttacgtttgatttactccaggttatgcaaagagactacaaattaagttcttattcactgaattctgtgtcatcacacttcctttctgagcagaaagaggatgttcatcattcaattatatccgatcttcagaatggaaatgcagaaactaggaggcgccttgctgtgtattgtttgaaggatgcatatctccctcagcggcttttggataaattgatgttcatttacaattatgtggagatggctcgagtaacaggtgtcccaatttcttttctactttccagaggccaaagcattaaggtactttctcaacttcttaggagggcaaggcagaagaatctggtcattcctaatgccaaacaggctgggtctgaacaaggaacatttgaaggtgccactgtattggaggcaagggctggattttatgaaaaaccaattgctactttagattttgcatccttgtatccatctattatgatggcctataacttatgttattgcactctggtgatccctgaagatgctcgcaagctcaacatacctccagagtctgtgaacagaactccatctggtgaaacatttgttaaatcaaatttgcagaagggaatacttcctgaaatacttgaagagctattaacagcccgtaaaagggcaaaagcagacttaaaggaggccaaggatcccctggagaaggcagtgctagatggtagacagctagccctgaagattagtgccaattctgtgtatgggtttacaggggctaccattggtcagttaccatgtttagagatatcatcgagtgtaacaagctatggtcgacaaatgatcgagcacacgaaaaaacttgtggaagataaatttacgacacttaatggctatgaacacaatgccgaggtaatatatggagacacagattcagtcatggtacaatttggtgtttctgctgtagaagaagctatgaacttggggagagaagctgctgaatatattagtggaactttcacaaaacccatcaaactagaatttgagaaggtttactatccatatctcttgattagcaagaagagatatgctggattgttttggacaaaaccagacaactttgacaaaatggacactaaaggtattgaaacagttcgaagagacaattgtttattggtaaaaaacctggtgaacgattgccttcacaaaatattgattgacagggacattcctggggcagtccagtatgtcaagaatgcaatttcagatcttctcatgaatcgtatggacttatcacttctagttattacaaagggtttaacgaagacaggagatgattacgaagtaaaggcagctcatgttgaacttgctgaaaggatgcgcaagcgagatgctgccactgctccaaatgttggagacagagtaccatatgttattattaaagctgcaaaaggtgcaaaggcatacgagaaatcagaggatcctatctatgttctagagaacaacataccaatagatcctcattactatcttgagaatcaaattagcaagccaattatgagaatttttgagccaattctgaagaatgctagcaaagagcttctccatggaagtcatacaagatctatttctatttctactccggcaaacagtggcatattgaaatttgctaagaaacagcttacctgcattggttgtaaagctttacttggcaatggtcatcacactctctgttcacattgcaaaggaagggaggctgagctttactgtaaaacagtatctcaagtgtctgagctggagatgctttttgggaggttgtggacacagtgtcaggagtgccaaggttcacttcatcaggatgttctctgcaccagtcgggattgtccaattttttatcgacgaaaaaaggcacagaaagatatgggtgaagcaaagttgcaattggacagatggaacttctaagttttgccaagaatttgaccttgcggatctcttcgaaccaatggacacaaatacaatctggtgtttgccacaatcctgacatttgtaatgtgagtaaaagcccacaatttgtttactgtagcgaagagcctaatttcttgcacggtttagttcaacatatgattttgcgaaatttggttaatgtgcagaatttgaccttgcggatctcttcgaaaccaatggacacaaatacaatctggtgtttgccacaatcctgacatttgtaatgtgagtaaaagcccacaatttgtttactgaaagatttgtgtggaatcctcaaatgatagtttttaagttatcggatgacatcaacctggttccaagcagtaactgctgaattattttgatatttaaaaaattatcattcgaggatttagtcagttgat

SEQ ID NO: 14911 - DNA, 413 bp, Glycine max
  Clone ID: PAT_MRT3847_113470C.1
gtacaagcctccagtgtacaagcctccagtgtacaagccaccagtgtacaaaccaccgcttcataagcccaagccaccgctttacaagccgaagccaccgttttacaagccaccatataagaagccaccatacgggaagccaccttatggaaaggaccctacagatgaggacagcacgcatgcctgacgcttgccttgtggactattatctagttcagatatgagaggaactgctttgtgatttatagcatcgtgatttagaacttcctagcactgcgtatgcacgactatcgcatgcactttaaacgatcggagcattaatgatgtagcctagtcatcatgagcatgatactgattaccatgtgaatgtgaatcaaaatgatgctatagaaactggtgcttctgtacttcag

SEQ ID NO: 14912 - DNA, 2417 bp, Glycine max
  Clone ID: PAT_MRT3847_113471C.1
gttcttcttctccttgtggccttcttccctctaacattccctgtggtttctctgaacatatttatataaaggttgtgctatagccttagaggctcatttggtttaatttgcctatgtcatatcatatgtactccttttttcatttcctctctcatttttggagtatttgattttatatgcatatatatacacacacattacaggtatatatatatatatataatcataaaatatataccaagttatgttttttgtttatttgtttatttatatatttctctctttcatttttgtacttcttctttcatcttttcatctttcttgtcttagagttgtgttgattgattggtgtgacccaaaaaaatggctcaattgccaccaaaaattctcaaacatgacacccaattggccagacttctcttctcctcaccaaaagaatcctttcctcaaaaaccacgtcatcaaaccaaaaccctcaatgggtgaaggagtttcttgagtcctcactgggaggccgcggggccccccggcggccggtgagcgactccgtcactttcctggaggcaccattgttggaccaccttcttggaaaaggtggcggtgtggtgggtggtggcggcggcaacaaagagtgcgagagagtttatgatgtacaattcttatccatgtttattgatgaagctctcagggaacaataacaataataataccatgatggcacacacgttgtcctcctcctacccttctacaccccctgatcacaacagcatcaatgatgagaaggaaatggaaaataaggaagaggaagagaaaaagcaagtacaacatgaaacagatgatgaagataaaagcgaatgcaaacacgaaatcacacaacttcccaacactaatgacactaataatactactaccaagagggtcaaaagaatcttggcaaatagtaatgcaaatgcaacatgttctagtgagaaaatcacagaccccaagagggtcaaaagaatcttggcaaatagacaatctgcgcaaagatcaagagtgaggaaactgcaatacatatctgagcttgagcgaagtgtgacttcattacaggccgaagtttcagtgttgtctccacgggttgcatttttggatcatcaacgtttgcttctgaatgttgacaatagtgctttgaagcaaagaatcgcagcgctggcccaagacaagattttcaaagatgcacatcaagaagcactgaagagggagatagagagacttaggcaagtttatcaccaacaaaacataaagaagatggacaatgctgcagggtcaccaccatcccaatccccaccatctccatcaccaaaaccacgatgtgaaactcacactgaaaaggaacagcttatcaatgtttgaagtttgaatttgaaccctccatttgaagactcactcactcaccctttatagactatgatcaaattaacatatcaaccacctagcttgttcaaaaaaatatcaaccacctagtgtatgctagtttagatgatctgtgattcctttcaatattaaaaaagaaattgcagaattttgaaaataggagaaaaggagaaaaaaaatatgtacaaaacttgaatgcatttataggtgattttggtattattatttttttatcagaatctgagttttatctcgataatctgtgtaattcatcaaatgccaacacaaatgccaacacagattaagtaaaaccctaattttgattagaaaataacaccaaaatacctattaaagtgcaattaagttttgtgattagaagaaaaaaaaaatgttgtgtgactgcttgtagttgtaatgtaatgaatgtcatcacgtactgttgggtagagagagggtgagaatttttattaggcaatcgatgatttgatgaagggaaatgttgttaaatgagaagagggtcatcacattacattataatgtggtgtggtgaggccacattggtggtggtaggcttttgctatcaaactgagacagtcacgtgatgtgtttactttaaagaaaagggggaccactcaagttgcatgattgagaatgcagggaaacacatgtgcaccagtgacatcaaagagagggtggaagaaaaaaacagttgtgtctgctttaactagattctttcagttattttttattatttcttattattatttgttttcttcttgattattttcttttaatttaatttttattttttcttgggttttttttcttccaatattcaagttggaaaacaaagactagtgggcgtgtgtgttgggatggatgaaaggaaggtatgtcattatcagtgaaagtctcatggctcttctctgagttttgttgcactttgtgttactgcttttaaggcatgtgattatctttatttgacgagttaatttgagagggaa

SEQ ID NO: 14913 - DNA, 325 bp, Glycine max
  Clone ID: PAT_MRT3847_113472C.1
aattcccgaccgacgcgtccgcttctcgtagctcatcgaaaatgcaagcttttctacgaagaatctcaacagccacaatctcgacatctaatcaattcgacgctcttccatccattattgccgatcaatttccgactactagactgccattctcgagccttaagtcccggatctgcgaaaacgaatatctcaagccccattaccctgtattactttcggatgtcctgacattgataacactgacatgaagccctttaagatcttcttattttattaccctctctaatatcttgcctattaattatttttcctctccatcttttaa

SEQ ID NO: 14914 - DNA, 462 bp, Glycine max
  Clone ID: PAT_MRT3847_113473C.1
cctctctctctctctcattatctataatagaggatggatcaacttacaccagtataagttacacccactctaacactcttcaatagctttttactagataattttatctcaaaactcatcgttagattaaatcaaaattacttgataccttgttcgtgtacatcaaaattaatgtaatatatacatttaaaaaatataagaataagaaccatttagttatcttcttattactattcaatttttataagatttaacatgaataatcttggtaatatgtactacctctggtcctatatgtataggatccttttaactgcttcacaagaattaaaatatttagttaatggtattaaatttgtcaacaatttgtataattttttccataattacccttaaaaccatagggattccattttcttaatctattctacctatttaattaatgcatgtcaacttgagaga

SEQ ID NO: 14915 - DNA, 418 bp, Glycine max
  Clone ID: PAT_MRT3847_113474C.1
ccacgaggcaggagatgtgtttatgatttgcaccacagtattctaggtttgctatttgttgttctgataactagggccttcaccgatgcaataagaaatgcagttggctggcctcgaccagacttcttttggcattgcatgaggatactgcctcatgatcaaaacactggagccttcttcattgttgtagtacaaaaagtttctcctctgtcagatagtttttcttatgactaaatttatttctctctctctctgattttgttaacagataattaggaaattttggagaacatgggaaaataatccgtgtatgactattttgcataccaaatttcttatggaatattctaggatattgcaagtgacatgcattctgctagttattgccacaatctacaccacttagtaatatttattg

SEQ ID NO: 14916 - DNA, 1369 bp, Glycine max
  Clone ID: PAT_MRT3847_113475C.1
aattcggcaccagatttctgaatactcaatttactctaaattgatatactcttttgcgagtttgggcgaggttgatgtggctgaggaacttgtaagagaagctaaaggaaaaacgacgataaaggaccctgaggtctatttaaagcttgtgcatatgtatattgaagagggtttgttggagaagactttagaagttgtcaaggaaatggaggatgcagatgtcaaggtttctgattgtatactatgtactgttgtcaatggcttcagcaagaaaagagggttttcagccgcagttaaggtttttgaggagctgatttccaagggcaatgaaccgggtcaagtcacctatgcttcagttataaatgcatattggcgtcttgggcaatatagcaaagcagaagaggtgtttttagagatggagcaaaaggggtttgataaatgtgtttatgcttattcaaccatgattgtgatgtatggaagaacggagagggtgagaagcgcgatgaagttggtggccaagatgaaagaaagagggtgcaaaccaaatgtgtggatctataactccttgatagacatgcatgggagggacaagaatttgaagcagcttgagaagctgtggaaagaaatgaagagaagaagggtagcaccggataaggtgagttatactagcatcattggtgcttatagtaaagcaggtgagtttgaaacctgtgtgaagcttttcaatgagtataggatgaatggggggcttattgatagggccctggcaggcataatggttggtgtgttctctaaagtcggtcaggttgatgaattggtgaaactcttacaggacatgaaagcagaaggaacaagactagatcagaggctgtaccaatctgcttggaatgctttcaaagatgctgggttgcaacttcaggcaaggtggatgaaagagagcttccttgtgacatagtgttctttcaattttacaaattgtggcaaaatctgaagctgaaatattcgaaaccggtgagtaatttgatgcttgttgctttttcaggcacttgaggtgtacaaaaagatctatcataatatatatcatgtataggtttttgaaatgaaaggctctggcttgtacattttagctttatgccgtttctattgtatgcttccaaaaccaaattgtactcaagaaacgtctttcaattatgacttccataatcaaagtaaaaggccattagtagcagcacaagatggaactgcgtagagtgtaaagtctttctgaaacaaacatgtacataacatttagtcaaagaatttcatattcagtgtagcatactagcatagcatccatcaatgcaggggttctgttttctgttggactgcc

SEQ ID NO: 14917 - DNA, 377 bp, Glycine max
  Clone ID: PAT_MRT3847_113476C.1
gttgatgagtgtccttttgcattcgtgaactagtatgtagcattctattcaccttaaataaagcgcataactatgtgcaatgagtgtgtgtaactataagcgagcagaaaacctactacctaacgagcccgaccgctgcgcacgacagagcttcaccgcgagcggacccgctgctcacgaaaagaagaaacggagcacgttgcgggggcgagaggaagaagaaaggcctcgaggcccgagaagaatatggcgaccaggagcgtgggggacctcaacgctgcctacctgaaggggaataaagacttcgtcaggaacaacgctaaagccgcctcgaggacaaacagaacatcaccgacaacaccaaaaatacgtccgcc

SEQ ID NO: 14918 - DNA, 876 bp, Glycine max
  Clone ID: PAT_MRT3847_113477C.1
cacatttgtaggatcaagagccttgcttcaattccaagatcctcctcctccctcaaccgcacctttttcttctcatgttcctttagcgccggcgctgttcgtcatcggagattcctccgttgattgcggaaccaacaattttctgggcaccttcgcgcgcgccccgatcaccttccttacggaaaagatttcgacacccaccaacccgccggaagattctccaacggaaggatccccgtcgattatcttgctcagcgtcttgggcttccttttgtgccaagttatcttgtgcagacaggggttgtggaggatatgattaaaggggtaaactacgcttctgctggtgctggcattattctctctagtggctcttaattgggacagcatatctccctcagcaaattcagcaatttacagacacacttcagcagtttatattcaaaatgggcgaggatgctgcaaccaatctcatatccaattttgtcttctatatttctattggaatcaacgtctacattatttactatttgctacctaccctggaatttcaaccactttttaccatcttcactcaagcgagagataaagctaaatgctctttagatttattttctcatccattatactttctttttaaaaaaaaaatcttgctattcatcattaatccattttataattaaagctcaaatgcattattttggtgtcatgttcgcgtgtcaaaagacactctttcttgagacatgtttgacgcataaacataagtccatacttatccatggtcacaatgggagttagtccatttaaattttaaaaaataaaaataataaacacttagatatttaaactttttatgtaaaatgtaatgtctagtaatga

SEQ ID NO: 14919 - DNA, 399 bp, Glycine max
  Clone ID: PAT_MRT3847_113478C.1
tcacagttatttgcaatagcatttttaatgggatgctcattagatatagctattaaaaaatactgggcccggcttaagcttcaagtatggttttacaatccttcaaaaattttggttctttggggggggatggggaagaaaacctaattaggggtcatggatatgtgaaggcctaccttaatgggtcttaaatggaaaggcttcttacttggcataccatacccttactgattgtttggacaaactagtgccacttttcaattttaaaagttagccgaatgtgattttctcaggagaaactttaaagcagatgtctaatgtttttgtgggtgggctcctgaggacaagggcgagtttatggtcacaacttcattatgtttcgggtaataatctggaaat

SEQ ID NO: 14920 - DNA, 621 bp, Glycine max
  Clone ID: PAT_MRT3847_113479C.1
ccacgcgtccggtttaataatacccattttcttcttcttcgaattaaaacttttactttcataataataatgtcaatggcaggggaagagttgcaccacctctgactctgaccccattgccatttttcctgtatagatcacgatcggagacggttgattttgcggagaagtggaaattctataataattcgaataggttaggggagggtttgtgaattcataggaaaaatgggggttatgtccaggcgggttgtccccgtctgtggtaacctctgtgtgttttgtccttctcttcgtgcaagatcaaggcaaccggtgaaacgatacaagaagttcattgctgatatattcccgcgtaatcaggttgctgagcctaatgataggaaaattggaaagctatgtgagtatgcttctaagaatccattgagaattccaaagattactgacaacttggagcaaagatgttacaaggatttgcggaatgaaaactttggttcagtgaaagtggttttgtgcatatacaggaaattgttatcgacatgtaaggagcagatgccactgtttgccaatagtttattagggatcattcggactcttctagagcaaactcgggcagatgaa

SEQ ID NO: 14921 - DNA, 132 bp, Glycine max
  Clone ID: PAT_MRT3847_11347C.1
acattatattttttatattttaattgtcaggaacagaggaaaacataacattcgaagggataagcaagccactaaggacaggaacgaaaactgcgctttaactgtggaagtcagaggtacggcagatgtact

SEQ ID NO: 14922 - DNA, 294 bp, Glycine max
  Clone ID: PAT_MRT3847_113480C.1
cgggactgcaactatgctccccgtgaggcttcaattaccaattacggtttcgcttatactaaccaattaccattgcagtccatccccttgtcgattgcaaatccagcaccgaatggagctccaagcaacattccggcaacaccaacgtctacgccgactcgaactacgatctccaaaggaagctcgtgcaatccgctctcgacgttgatacctccggtcgagtccagtcctccttctctcccgtgtctcctacgtccactgtgttcaaggtgattctatgtagtactgtattca

SEQ ID NO: 14923 - DNA, 451 bp, Glycine max
  Clone ID: PAT_MRT3847_113481C.1
gttagtgttcccaaaaacaaacatcccaggttcgttacacaacaacaaaaaaacatttcccgttggttttctttcattagttttcgcgatggagcgggtggagtgggctcaactgggggagaggctgaagatgggtggggcccagatggggcgaatggtgagcggaaaagtgaaggagatgcttcaggcgccgacgccggagtcgaagatggtggacgaggccacgctggagacaatggaagaacctaattggggcatgaatctcagaatctgcagcttgatcaacatcgaccaattcaacggctccgaggtcgtgaaggccatcaagagaaagatcaaccacaagagctccgtggttcaggctctcagcctcgacctcctcgaagcctgtgccatgaattgcgacagggtcttcttctaattcgtttccgagaaggttctcgatgagatg

SEQ ID NO: 14924 - DNA, 253 bp, Glycine max
  unsure (1)..(253): unsure at all n locations
  Clone ID: PAT_MRT3847_113482C.1
gaggacaagatctccatatctgttcccataaagcttgtntataagcctccncttccggtgnaccagaaatnccctcttcacaacaacaaanaacagnntgggnaggngcatgctatgacncncntacccnaattcactagccctgnntacaanccctcaaataaacttcaagggaannttgnattcagtcnctggggntnatnctggnantngacnnncggnnnntnacttnntcgncttagncnntgccang

SEQ ID NO: 14925 - DNA, 251 bp, Glycine max
  Clone ID: PAT_MRT3847_113483C.1
gttggtctcaaaccaggaaaatcatgttcaagtttgaaaatgccttctccttcaataaatggatccccaccacgagtgtgtaaattaatttacagaactaaaaatgcattataattaattactgcatgttatagataccacatgcagaaaaaagtatgtatggaggtttttagaaattattgttatttgatatcttaaaatcaaattctgcaataggaaaaaaaatcagacaacattgagtttatccagct

SEQ ID NO: 14926 - DNA, 292 bp, Glycine max
  Clone ID: PAT_MRT3847_113484C.1
attaacagaaaggattcacttccgtacgttaataaactgcccaagccttacagtgagcagttccaaacataattcacctcacacaagggttttacccacatgcatattcaacatgattttcaatacaacggaaggatctacataactaatgcattcttggcgtcaaacttcggaccgaggttattatacatataatgacttatgcaaaggacaagcccataattgttcagtgcataatttttcaagctggctacgctttagagaggacgaccatcaatatatttactgcatt

SEQ ID NO: 14927 - DNA, 1170 bp, Glycine max
  Clone ID: PAT_MRT3847_113485C.1
tgcctgcagattagggggagagccagacaactagcttgatgccaagtctaaggataaagtcattcttaaaaaggtatttattgttctttgatttggtggatggatgtttttttgttatctctgggaatgaaagtcagtgtcaaccaactgagctagaccccttagatacaagaatgtttgatcattaggattcctcatccattctgtatttttttgttcttcttttctaaattcttgttttcatgatcaagagaagaaagatgtgtaaatgaacaaatattttaaattgaagtaggtccgtaaattgcatagtacctgagttgctgaattaccattttctgtttttggattaaaaagcatgcattttgcgtaatctgactaatggaatatgcaggttaaggttggaatccaaggggctgaggagtttggtgattatgaggagtggttcaattacaggctatctagggcagcacccgaaacatgtgctgacttccttggaacttttgtagctgatcaaactaattcacagtttacaaaaggtggaaaatggcttgtttggaagtttgaggtgctctagcttgtatttctgttgcataatggataaatatgcactatttaactgtcaggagttttataaatattttgttcaggtggtgctaaatgccatcttgaaaatataaattgaatttgtcatcttagtctagctcattccttcacttacttaaatagtccgagggttgcccctgaatacgtcttcatcataaactgatgctgatttctgaagagcacgccattggccatcattgaaggcccaagtcctacaaactgacatacccacagaggatgcatgtttgaacacctcagtgaccttccctcttgtggactcatccgcagcaaataccatcaaccagtatgtgttgaatccattaacatagaaaggttggtcgttcaccacaaattggtttcctttcgtttgcaccatctgccattcattttcttccatgtctcccaattcacttccataacttaagatagaatctgctatatcaatgctcttccaatcttcatattcactgtttgtgtgtgttgtgtccatgtagttctcttcttttctaaaaccttggtggaggagtttgatacctagttggggagaaaaatagcaaaagaaaa

SEQ ID NO: 14928 - DNA, 369 bp, Glycine max
  Clone ID: PAT_MRT3847_113486C.1
ccataaaaaaggggggccaacttccaaaaaaaattttattttacttcaggcgtggggcaaacaaactttcaagttcaacccaaggaacattagaaaatcaaggggggggaaaagaaattgggaaacacattggttaataaaaaaccccaggggtaacttgctttagggagggggaaaattttcataacgggttttagagcgtaggcggaaggcccattattggtccccctcaaatgggcttaagggggcaaaaagaattaataattgggggcacccgcggggtaatttggggggcgggtggatcacccggtgggggagccaaaatttccaccaaaggtttctttgattggggaattactagcattccca

SEQ ID NO: 14929 - DNA, 2799 bp, Glycine max
  Clone ID: PAT_MRT3847_113487C.1
aaaccaagtgttctcttttccaatattttgcaatgcccccaattttctcccctttgctttccaagcagtttcccccaaattctgaaatcaaagggtttctgaatttctgataatcacactctcatacatatataatagcagacccatcttactcatctctcaccaatcacacaaccaaagacccttttctctcagttcccctgtgactcactctcttccttcactgctaaactcttccaatggcaacaaaaaaagtcaaagccataggcattgacttgggcacgacctacagctgcgttgcagtgtggcaacacaaccgcgtcgaggtcatttccaacgaccaaggcaatcgcaccaccccttcctacgttgccttctccgacacccaaaggttgttgggtgactccgccatgaaccagcgatccatgaatccgaaaaacaccgtctttgacgccaaacgtttgattggtcgccgattctccgaccaaaccgttcagcaagacatgaagatgtggccttttaaggttgtccctggaaacaaagacaagcccatgatcgcggtcacttacaaaggcgaagagaaactccttgccccagaagagatatcttccatggttttgtttaagatgaaggaagttgccgaagggtacttgggtcatttcataaaagatgcggttatcactgtccccgcttacttcagcaacgcgcagagacaggccacgaaggatgcggggaaaatcgcgggtatgaacgtgttgaggatcatcaacgagccaaccgctgctgctattgcttatgggttggacaagaaaggattgagagttggtgagcagaacgtgcttgtgtttgatctcggtgggggtacttttgatgtttccttggttactatttatgaaggcatgtttaaggttaaggccagtgttggagacactcatttgggtggtgtggattttgataacagattggtgaaccatcttgtgaatgtgtttagagagaagcacaagaaggatattagtgggaatgcgaaagctttggcgaggttaaggtcggagtgcgagaaagcaaagaggattctgtcttcgacttctcagacaacgattgagcttgattgtttatacgaagggcttgatctgtatgcccctgttacaagggccttgttcaacgaactgaacaaggacttgttcatgaagtgtatggatacagtggaaaagtgtctccttgaggcaaggattgataagatccaagttcatgagattattcttgttggtgggtccactagaattccaaaggtacaacaacttctgaaggacatgttcagtgtcaatggtaacaccaaagagctttgcaaaggcatcaaccctgatgaagctgtggcgtacggtgctgcagttcaagcagcgattttgagcggtgaaggagataaaaaagtggaggaattgttgttgctggatgtgatgccacttagtcttggatttgagggtgctggtggtgttatgtcagtgttgatccccaagaacaccatgatccccaccaagaaggagaggatttgttctaccttctatgacaatcagaaatcttttaatgtcaaagtgttcgagggagaacgagttaagacaaaggataacttctttctcggcaagtttgtcctcaaagggttcgatccattaccaaagggagtgccacaaatcaacgttatctttgatgtggatgctgatggcattgtggaggtcaccgcagaagataaagccacaggaatagaaaagaagatcacaatcaacaacaagcacggaaggctgaacccggaagagataagaagaatggtgagagactcaaagaagtacaaggcagaggatgagttggcaaagaagaaggtgaaggcgaagaacgcactagagaattacgcttatgagatgagggagagagcaaagaagattgaagaggcagtggaggaaaccatagagtggctagagtgtaaccaattggcagagataggggagtttgattacaagaagcaggagctaggaaggtacctaagagatgatccaaattatagtaacacctcaaattctggtgttaaggttcctatatggtgtacatggaggtgtccacctaatgggtgggtttgtctcaacacagatggttcggtgtttgagaaccatagaaacgggtgtagtgggagtgcttgtgggggtctagttcgtgattcctcgggatgttacctaggtggtttcacagttaacttaggcaacacatcggttactttagcggagctatggggtgttgttcacggtctgaagttggcgtgggatcttggttgcaagaaggtgaaggtggacattgattctggtaatgctcttggtcttgttaggcatggccctgtggctaacgaccctgctttcgcgttggtttcggagatcaacgagcttgttcggaaagagtggttggtagagttctcgcacgtgtttagagaatctaaccgtgcggctgataagttggctcacttgggacactcgcactctctggaatcgggtgcgaagcgattctcggacccaccctctgcccttgttgctattcttcaagatgacttggcagggcttgccaagcaacgtggtgttaattaagtgtaagagactgttgaccaagcaatgtaaattagttagagcttgcattctcgatcatcaaagtattttgactttgactgagtgtgtacataaagtttatctgatctagattatgatttataatccaatgctttctttttaatcatcccaagattatgagcttctcaattacgttttc

SEQ ID NO: 14930 - DNA, 394 bp, Glycine max
  unsure (1)..(394): unsure at all n locations
  Clone ID: PAT_MRT3847_113488C.1
caggaaccggaccggaataattgggttgaccaacgcggtccactcaacttggggnggacccnncagaagggcaggtgtatgtgaggagaaccccggtggaggagacnccagcaggagaaaccaaagctgcccctcggttaatcgacacattccagatcaaggaccaattgctatcggatttcaagattcaaggccatttccctaaccaactaaatgaaaatgaaatttctagatttaagagcctactctcttatatggtgatagttccttttactgccatgtttatttattttacattatcttctgtcatttggttcaaactgtatgcaggtctataatgtgcatatcatactcttgcaacccgcttcaaaattcaagtgatgccttgnacang

SEQ ID NO: 14931 - DNA, 565 bp, Glycine max
  Clone ID: PAT_MRT3847_113489C.1
ggatttggctgtgctagaatttgatttgctttatgtttagactccaaaaaccttgtgttggtatttgattgcattgtttcttctagttgatatgattgagtggattaccctgatgcattgtagtatacatagatccttggtattgtgctttaaaaggtcatgaatatttttgagcttactttctaatgaatgcatgaaaagaaggatcaggtgttaaattttttaatgttatttaaattattaaattaatatgattactgagtatacaaccaactatccaacccataaacgtgtgttttgccactgacaaaaacacacatggagagattacaaaattgtgactatcaaagtaagtcctgtacttctgtttgaatttagatataacagaacatagatgaatggttgaattttctgttctgtacttcagtttatgtgattaatcctttagatggtgcttttgtctttgttgaccttagatattactgcactgatattctgattatttgaccaaatcatctagttctccgtgtagttcttgagtggacattattaatggttttcttgt

SEQ ID NO: 14932 - DNA, 365 bp, Glycine max
  Clone ID: PAT_MRT3847_11348C.1
gggtgggggttcttctttgtgtgggcttcagttcatatccattcatttatacttgggggaccctataaaaaagaaaaaggcgggcaggacctataacaactgggagagggggggttgaccacacaaggggtccgcgggtcagaagataaccttgtgcgagaaagaaccaaaaacggcgcaggggggtgccccaatttgctcaggggaacgaaaaaacctcaccttccacgcgttccttgccgaaaccaagggtgcacgaaggaggacccccccaaaaaagggcccggactgttggggaaaaacatttaacgagggagtggcccatgaaaagcgtgggaacacccgaccaaaggaaacacccgcgg

SEQ ID NO: 14933 - DNA, 218 bp, Glycine max
  Clone ID: PAT_MRT3847_113490C.1
cacgcttatttacacacgtctgtttactcttactttcagcttgatctaactcgcgtgttcgccatttcaaatggagagcgtgcacattgcacattaaacacctacaacagttacagacaatgaaacaaccgtattaatcaagaccctctaaacaacccttaaacctgtaccaaccactgatgctccttcaacagaacacgcattctctttacgttact

SEQ ID NO: 14934 - DNA, 277 bp, Glycine max
  Clone ID: PAT_MRT3847_113491C.1
agctaccatactcaacattagggataaatttggggcttcacacatagacttaaagaccccggcaaaagacagggatacaacctacggtgcgtctggtgcttggtctctttcacacacatccacaccttcttcatcctcattcaacaatcctttgaacaaaccctatcatgctcccatcatcggctttactttttcaccgccacttatttaactttaaatggagttcatttcttgaaactgtcactagcacacacccaacacttgatcttaccgaacc

SEQ ID NO: 14935 - DNA, 282 bp, Glycine max
  Clone ID: PAT_MRT3847_113492C.1
ttgtagacaaaggcgtcaatcattgcattataagagagcctgacatgatactgactagaaaggggctgagaaaatgaaaccagagactccaattatgataaccccaccgcacaaaatttctcttgacctcatactagtgaagctattacgaaaatctttggtgctgtgtctataagcggatcttacatgagatctgtggaactacagcgcaccttactacttacttcaccaccttacatggacactttgctctcaacgtcttcatatatgcctgacactgat

SEQ ID NO: 14936 - DNA, 164 bp, Glycine max
  unsure (1)..(164): unsure at all n locations
  Clone ID: PAT_MRT3847_113493C.1
cacgtagcangcagnaagcncgagantcggccaacgcgcggggagaggcggtttgcgtatngggcgctctaccgcntcctcgcacactgacacgaangcgcncggtcgtncggcngcggcgagcggtagcaatcacnncaangagcngnaatacggtnatccac

SEQ ID NO: 14937 - DNA, 121 bp, Glycine max
  Clone ID: PAT_MRT3847_113494C.1
cctgtatagcgggcgcgactccacgcgtccggccacttcgacctcaatcaccctcgcgcttcccttcctggtggcgaacatgtcgactcctgctaggaagaggctgatgagagacttcaag

SEQ ID NO: 14938 - DNA, 290 bp, Glycine max
  Clone ID: PAT_MRT3847_113495C.1
gctgtatttttattttatcaattaggatagttgttagttatgatcctattaattaaggatatctttgtaggaaagacctgattagaatattaatgaaaatattttttctgaaagcttgtatgtgttagtttaggaggggctctgtcaaggaagagtctatttcttgctttcaccataggtggcaagaagggttattatgtgtctaggcctgtgactcaatcctacatgaaggttcataacaatgacctattatcattttgtttggtgctggtgtagactagtctccaaaa

SEQ ID NO: 14939 - DNA, 277 bp, Glycine max
  unsure (1)..(277): unsure at all n locations
  Clone ID: PAT_MRT3847_113496C.1
cccccacaggaccaaggaacaaaacccaggagcccaacccacagaaaacaaggagcaacccagaggcccgaccggagagcccaaccaaagcacaagggaacaggcagcccaaaaggcccagaccccnngnggccccccaggaggacaccccaaagggccccaacggcncccaaagannccggaacccccccaccccagcgncccccccccaaccgaaacggaagcaaacgaaaacccacccaaagacccaaaaggaaccccgagaaaaaaccccccc

SEQ ID NO: 14940 - DNA, 233 bp, Glycine max
  unsure (1)..(233): unsure at all n locations
  Clone ID: PAT_MRT3847_113497C.1
cttgggaccaactccaagtggaatactttagatgcctgnaanntatttgagacttcaactttccagcccctctngcatcgggtatntaatgtntattgcatttttaatcntatcgaanntatnaaaaatgcataaacattaantaccgatgccagagggctggnaagtttatagcatnttaancttaccgnaattattaaactttttaccgttgttagtcctgtttctaggtg

SEQ ID NO: 14941 - DNA, 298 bp, Glycine max
  unsure (1)..(298): unsure at all n locations
  Clone ID: PAT_MRT3847_113498C.1
aattcggcaccagtcaagctagatctagaatttgtgtctccatgtgaactgcaatggagcttaagttccaagtatgtgaaactttacacgtttttttttgttggagcggggaactatttatttgatttttagatggttagtctgtcacttcgaacaatgattagtcaaatatcataagtttcaaacaataattgtgaatttgcattggttgttaacttgttattgtcaatttacaaattgatcatgttattgcatacaaggttatgctttcttctangacatggttcaaaaaaaaaaa

SEQ ID NO: 14942 - DNA, 503 bp, Glycine max
  Clone ID: PAT_MRT3847_113499C.1
gtttttccataatttttcttccttccataatttttcaatagagtgcagcgcacagaattttcttaatttcttttatcttcaataaattataaagttttatttaatagatgagatctaaataaaaagaaataagatcaattatattaattaaatctttatcttgcagttaaaaaaaataaataattattatcttgttaaagaaattatcctcttgcatgttaggtggttattcttattctcgcattgtccaaccactacatcttttcggctataaacacagataaaattatacttcacaataagattaaagatgagtttttaaatgattatctcttaatatacattgaaaaacaaattattaaaaaatttagagtagatttaattaaatatgattttcttgacgtataaaaaaattatatttttatgaatgattcatgtaattaatgttttaaaatatcatattattaatattttgtataaaaatttatgtgtatatatatttt

SEQ ID NO: 14943 - DNA, 317 bp, Glycine max
  Clone ID: PAT_MRT3847_11349C.1
gacagcacaatagaacgcgcacgctctcatttgcgcgccgtcttttgttctcgcatcgcatagacactatcgttcgtctcgtattcgccgattctcgccaggctgaaagcgagatccgacggtaaagacgcagatagcacgttgaaacagaaaggcgctggagctgggatgaaacaatcgaggaaagctgcgaaagaccctaagcaaccgaaaatgattacaagcgcattgttctgatttatgtctgagttaagagagcaattcaggaaggagcatcataacaacggatccgtcgatgttgtcggcaaagctggtgg

SEQ ID NO: 14944 - DNA, 1559 bp, Glycine max
  Clone ID: PAT_MRT3847_1134C.1
ggcgaatgctgaatctcattctctggatgactctttttggtttatttttgttttagtctgcaaaggctatcactaaatctcattcttcatctctgtcttgtccgttttctaaatctcattcttcacctgcaactatttggattgctgatttttgttaataccatatttactgatattggcgcatttctttgagaaagttactaattcctagatagaggcaaaaatgttgggaattttcaaggagaagttggttaaagcacccaaagagctgaacagtccagcttcgttgaattcatgcactaagcctaagctaagtcacgaaatccttcaggatttcatgtcctgcaattcctccaatgctttctcaatgtgctttgggaatgaagctttgctagcctattccccttcaaacaagccctccattcatcaaaggttgtttagtggtttggataacatatactgtgtcttcctgggtggcctgcacaaccttagcatgctcaacaagcagtatgggctatcaaagggaacaaatgaggccatgtttatcactgaagcatatcgaactcttcgtgacaggggtccataccccgctgatcaagtcctcaaagaacttgaaggcagttttggatttgtgatctatgacaacaaggatggaacagtttttgttgcatctggttctaatggccagattgggctctactggggtgttgcagctgatggttccatagttatttctgaaaatctggagcttataaaagcaagctgtgctaaatcatttgcaccatttccgaatgggtgtatgtttcatagtgagcatggtctcatgagcattgaacatccaacaaagaagatgaaagcaatgcctaggattgacagcgagggatttatgtgtggggctaacttcaatgttgactctcagacaaagatccaagtgatgcctcgtgttggaagtgaagctaattgggccacatggagctaacaaacttgactgatttaatcatagcccaacttttttttaaaacccttttctaagtggttaagagtacacaacttaatatgatggtgctgactctgcttttaggcttcagctcttttgggttatgtagtttttctcgtttggttccattgttctgtacatattcatgcttcaatgttgaacatgactatggtaatttctaatatcaataataagaagtttcagttttttgcttttaaaaaaatgtgtgtgtatttgcttttgttatcgataattatataaaaattgattagtcgtcgtcaaatgtgactgaacaggttttcaatttttgcgtcccggcggcagtgccgtcttcaccccccccctgcccgccctccccgtcatcggggcggtccaggttataatcttgggcgttgatgatgacatcaaactttggatgtgcgtttccctcaaagtcgatcagaagaacaaccaccgcgctcacagctgaatccaacaccagagggaacatggtggtcgtggctagagcaggagaggcaaaagcaaaagctttcttgttcagcagcaccacaaatccctccta

SEQ ID NO: 14945 - DNA, 398 bp, Glycine max
  Clone ID: PAT_MRT3847_113500C.1
ccagccgcagcctgggcagtgccctgggctggggcgtggccggggccctggtggccgggccggtggggttgctggccgggctgtggctgggtggcaaagaagaggaagccaccttcctggccactttcaaggacgggcgcaagctcatggccattaccgatggcaagacctggtcgaagatcgacgacaactggaagcagcacaggcggccggccaagcaaaggctgacgggatatcgcagggcccggatcgttttatgttgaaggcggctgtaagatgccgccttttttcatggcctgtactggcctcttcgcgggtaaacccgctcctacaggaactgcgccactctcaagggcagcgctgttcatgtgggagcgggtacacccgcgaagaggccg

SEQ ID NO: 14946 - DNA, 269 bp, Glycine max
  Clone ID: PAT_MRT3847_113501C.1
tccgagcgaatcggctcgagatcgttatccttaacgggactaccattctggccttggagaacaacgacgacagagacacctagagacttgaatctggtgatgccctgagagtgacgtcaggaaccgcatagtatgtggtcaacgctgacaacaacgagaatctcaggttaataacactcggcatacccgttaacaagcctggtagatttgagagtttcttcctatctagcactgaagctcaacaatcctacttgcaaggattcagcagg

SEQ ID NO: 14947 - DNA, 125 bp, Glycine max
  Clone ID: PAT_MRT3847_113502C.1
gaagttgctactgagaagaacgctttcactttttggcattggatttccattatcagggtgggcttcataccctatgcaagtcacctttaacattctctcttctgatcatctaaatccgtaacctc

SEQ ID NO: 14948 - DNA, 258 bp, Glycine max
  Clone ID: PAT_MRT3847_113503C.1
ctttggagatgaaatgagacttgatttgaggaagttgtggtagttgaaaaattatagaaaatattccagtgctttcttgatactttgagaggttctctgtaaattcttagtcctaatgagttttcggtttttgagatttttctcacccaactgccttttattggtctaaattgttttcaagctaatgtatggttcttaattgtagcttttggttttagaaaattttatacttagttccttcaatacttcctatctaca

SEQ ID NO: 14949 - DNA, 340 bp, Glycine max
  Clone ID: PAT_MRT3847_113504C.1
tattaaaagatcgtacacagtaatttaatttggtacacacatcttcacgaaaaagtttggggagcctgctgaatataaataaacttttttggcaccccagacgtgggggagattaaaaatggtttcgcacaaaccacaagcagcatttttggcactgggtttatgaaacctcccgtcgaaaactgaaatttcaaacggacacttttacttccccgctctttaaatagagggaaaaaggctcccaccctattttccttggcctacatggaacaaaatctgccgggtttaaagcctggtcaaccaaggggaatcttttgatattcaatcgctatggggaaaa

SEQ ID NO: 14950 - DNA, 706 bp, Glycine max
  Clone ID: PAT_MRT3847_113505C.1
gaccctcgggcctggccgaggcaagagagtgcccttatacatgcgcactggctcttgtcaggagggagcatacgtgcaggttgaaccatcctgatcctacagttgttgcaggaggaggaggtaatcctcctctatggcacagcacagacgggcctatagcattacagaggaagagtcacgaaacagcctgaacgacgtcgctggtctctcaccaataaacagtaaaggactcactgccttttgtgcacgacgatgctcctacctactcaaggagattatacccaaagtcatgactggaatggagatgaggcagtgtgtctactcacctgtcaggtgccttcatcacatcctcacattgcgtcatgaacaacccagcagtgggcacaaacggttacctgcaccatcaaaagcagatgcctcgcagatgagagttgcatacaggactagagaaactgaatgcaaatgcctcttaaaaaccggggaccgcaagaagaaatctaagtggaaatttcaccatacgatgactcggcctacaagagcacctacatgcaacctcagagacaaggggctacctttgcgacctggacaaagagtatgctcacattacacccgctatggaatcttcaaacgctgaccagcttggaagctggaccaccccgtatacttgcacgccgtgatgacttctggacttgagcaacaatcctac

SEQ ID NO: 14951 - DNA, 265 bp, Glycine max
  Clone ID: PAT_MRT3847_113506C.1
tctttttgcaacttttttctacaagctagtgcagccagttgagtttctggattaacaaggatggccactaccacaacaggaagctgatcctgtgggtggaaatcacgtgcagcctatgaaaaacttgttgtctgctgggtttgtttaaaaggctcttatgagcacatagaggttaacataatcaacgacatggatttgtacaacgctcgaaccttgggaccttccaggaatggttttgtacggagagaaagagtggttttttttt

SEQ ID NO: 14952 - DNA, 397 bp, Glycine max
  Clone ID: PAT_MRT3847_113507C.1
gcgaagcggtaataaatttgaaagcattgcattgggacgattccggactgttttggactgtaaaacaatccatataaataaatcctgggatcaggaccaaactaaaaatttttttttacccaaacccaatggggaaaccgaaaagaaaaactcttgatgaccatacgctatgtcgccaattgactataggggtagaattcttccttcaataatgccattcatgtggatttttaatggaacgggttcgattaggaatctaaatttaaaaatctacctaaaatcaatcaccctgaaaacatgggtattactaaactcactgacgacaaagcaacatatatgcctaccaaacagaacccccaaactttaggaactctgaatttgctccaggggatcacca

SEQ ID NO: 14953 - DNA, 828 bp, Glycine max
  Clone ID: PAT_MRT3847_113508C.1
tccgagaggatccagcacacagacagaggcagtgaaagagagagagagagagagagagagcaaatggcattctggtaaatatggccccagtcccatcccagaaaacaactttcgtttgtgtgtatccgttgaaaccccactttccactcttctcaacgccaacgctggcctctgttccccttcttttcaatgcctataataataacttgtcctattttttcaaccatgtcatcccagtaagcaatcgctgttagtaacatagcctctaacagaaaaacaagtagtcatcacatgcccacagcaatgacagagtcagggccaagtgtgagtttgaagcttcttgctttagtagctattctagtcgtcttctcgctggtgattctgcttctgatcttcttcctctgcttccgaggtagccgtagctgcaagaagcggaacctggccaccaagcacagctcaggtagcatccctctggtttcgaaggagatcaccatggtcagggcctcggatctcacccctgccaccacggccattgccgttgacgtggacggtgatgatccgaagaagaaggagtcggagatcaaggttgaaattggtggtgggggccaccagcgcagcaaccaagtgtcggtggaggatcctgatatagggtggggccgctggtacagtattagggaagtggagctcgccacgcgcgggttctcggaagggaatgttattggggaaggaggctatggcgttgtctacagaggtgttctgcacgatgcttccgtcgtggctgtcaagaatcttctcaacaacaagggtcaagctgagaaggagtttaaa

SEQ ID NO: 14954 - DNA, 176 bp, Glycine max
  Clone ID: PAT_MRT3847_113509C.1
atttttttgtttgtttgacctttacagtacctttcggtactttctcagctgcttactaaacagacccaaactacacctctgagtggttctgcttggagttgcactaaaggaagatccttcactaggtgattggaaaaacgacagctttcacagtttactaggggaaaattagccac

SEQ ID NO: 14955 - DNA, 159 bp, Glycine max
  unsure (1)..(159): unsure at all n locations
  Clone ID: PAT_MRT3847_11350C.1
ccactctccacttggttcttcgtctaccgtggtgggatgcaaatgtttgttaagaccttgacgggaaattcatcacacttgaggtcgagagctccgacaccattgacaactttaangctaagattcaggacaaagagggtatccctccagatcaacaga

SEQ ID NO: 14956 - DNA, 668 bp, Glycine max
  Clone ID: PAT_MRT3847_113510C.1
tccggctctcccttcgtcccactcgcaacacaacaatgctgttactccacgcgccaccactaccttttctgagaacattgcttcatttccctcttaatagtattcatcattcttctcgcgctttctcctcactatctcacttcacaaaacccttttctgtttccaatcgtttctcctcacattctcgccggagctcactccaaatgaacggagaaggcctcgccgccgccgacgactcctcgccggatcacgtcaccaaagactggtactccgtgccggagctccggttgcgcgatcatcgcttcaaggttcctctcgatcactctctgggaccccattcttctcccaagatcactgttttcgctcgtgaagtcgttgcagttgggaacttgactgtgtcattgctgtcacaattatatttgcatgatgaattagctgactagttaaaatatttccgtgctgataatagatggaacgatgcagagtttattcgagttcgtctcgttcctgatgctgggccttggacaatattgggtcagagctatggtggatcatgtgcatgcacgtatttgactgctgatgcataagctgagaacctagtcctttccgagggaggatatagtaaacgatgaagagttattcgagtacgccttgttccagatgctggt

SEQ ID NO: 14957 - DNA, 380 bp, Glycine max
  unsure (1)..(380): unsure at all n locations
  Clone ID: PAT_MRT3847_113511C.1
ccacataatggtttgatatgagtcagagtaaattgtaaccaaatgacatcaaatctttcatttagtcaattcgatttcaataattcatccatgaaacaacaccacaaaggaaaaaaggtgacacatnataagaatcaaaggaaatttcccaaaattatagtcattttccttgtggcttcagaccagtttcaaaattttgacttctgtntganacacatagtgagggcaaacaggtaattacacactaactgtctcctcgtagtattttgtgtcngatacnatctggtatattctttcagttggttcaatagtcacacnatttatatgtaacaaaaagtctccatttgttacactaacactaccaattcccntcttcccac

SEQ ID NO: 14958 - DNA, 1124 bp, Glycine max
  Clone ID: PAT_MRT3847_113512C.1
cggccgctcgagcgcccttcctccatctttactctctctttcccctaattccgaccatggaagccacggcctccgcaatgagcttcgcccttccctcaacaaaagcccaagcccaagcccaactcctgacccggcccaccaatccattcaccattccctcccgcagcccagcccaccgccccccgccgcgcctccccaccatccgcgccgcaattccccgcacaaagaaagaggcaacggtggagactgtgcgggagcagctcgagaactgttacctcctcgccggcatcaactacaagggcttcacggtgaagcagttccaggagcttcgaaagacgctcccagaaacaacgaaactgatcgtggcgaagaacacgctcgtttacaaggccgtggaaggcacgccctgggagacgctgaagccctgcatgaagggcatgaacgtgtggctcttcgtccacaccgaggagatcccttccgccatcaagccctacaggaacttccagaaggagaagaagctcgaggacaacgacttcaccggcgccgttttcgaaggcaagttttacggccccgatgaggttaagaacctcgaatccttgcccacgcgcgctgagatttacgccacccttttgggggctttgaagagccctgcttccgctcttgttggcactcttcagtctcctgctagggaacttgttacggttctcaaggcgcatattaagaaccttgaagaacaacaaggtgttgcgcaatagataccaataggtgtgtagccttgtttatgtgttttctttattgcatttcagttgttctttgtttccttatttgtctatggatgtgtagattattattattatcatgtgttttcttgtgaagaaaaaaaaatgtagaatggtgcctaggaattgggaatgctggaaaatctgttccctttgaatcatgctatttcactatttattggttattatgcgcacacactatggtgattggagtgctgggaatcattctggacattgaagttcattttgagtgtgttctcgttgaatgagtttatttataccaattgtagttgcatgtaaagaggttagatattgggaattgaatatggggatcattctggacat

SEQ ID NO: 14959 - DNA, 444 bp, Glycine max
  Clone ID: PAT_MRT3847_113513C.1
catattctttttctctcaggttctcgtcttttgggcaccattcctcagtctatttcacagcccactgtccggaatcaaatggcaacagtgagcacaccatctgcattttgctccctagccagcccagctttcgccaatcttctatcgaccttctcggtggaggaattttagtggccacaactggagattggatcacacttatacaaaattctccaattagtaacttgttgagagttgctgcttggaagaaaggctgcctaatggctaagattgcgatgcctgggacttgcagcaccccaaaggagtgattgggcctctttggcacaagtgtttttaacacacagcaacagtacagagcattttgatgcatgcaagtggcacaacatctgaaccacatttctgggaattgacctttccaatagaggtatgtggtcctaacaatgg

SEQ ID NO: 14960 - DNA, 437 bp, Glycine max
  Clone ID: PAT_MRT3847_113514C.1
aattcggctcgaggtccaaagcttctctctcttccatttcccacctataaaactagatggaaaaaatacacactgtgcttctcatgatgatagtgtagctgaagctccttctgcagcagcatttatgatttggacacaaaaaagttccaaacttttcagttctctgagtttctgtctttgtagctgaggtatggaaataatttcatctggcttcataaacacagcatctttcaaggacagtatggtacttatcaattttgaaggagttcaatactttgccctattagttggttctgtgaaatttgtattggcattgctacatcagaaattcttccgaacaatcccataatcaaccatgtcattattggctaaactacgttgtgtcactatagatgtcacttgtaccctaatggcttacaaaggggagctcggtgact

SEQ ID NO: 14961 - DNA, 348 bp, Glycine max
  Clone ID: PAT_MRT3847_113515C.1
ggaaccgaaaaaggggaaacattccatttataagtttagaataactccgaatattcaaagatcaaaatgggtccttgggggttaccgagctaccaaaatgaagtaaaacctcacatttcatcttgaagatgctcccatataaaagatagaaaaagggcaagctaagtagtgcaaaaacaagagaaaggtagctcattctgtgcgctgctttcttggcaaggagcttctgcttggccctggccttgggttgaaattagggacccatgattccaccaccccaattttttctgtgatcatcatacttggcgttgaagttgaccttaataggttctaggattctactgaact

SEQ ID NO: 14962 - DNA, 280 bp, Glycine max
  Clone ID: PAT_MRT3847_113516C.1
atgagttctatcacgtacacttgaatccccaaaaaaaagaaggggattttcccaccaaacgaacatctggggtcctaataaaccaaaggtaaaagctaaagcggggtctctgctgaatgactattgtgaacagatgcctcggaaacctttatgggacaaattctgttaccaacccctctgttaacctttaacccattccaggcttttttttaaccccccaaaacccgggggggtgtccaatatctttttggcttggccctttggcaatatcttccctttc

SEQ ID NO: 14963 - DNA, 1920 bp, Glycine max
  unsure (1)..(1920): unsure at all n locations
  Clone ID: PAT_MRT3847_113517C.1
ctgcgcgtccgtacggctgcgagaagacgacagaaggggagagagaaagaagagaagatgaaacatagtgcttcctccactgatattctctgcttctccattccctgaaccaaaattttcaatttttaatacatataaacttctggggttgtttgttgttgtaaaagttgaaggcttttggggggtgtctgatccattaggatcatcatcattcatcagcacatggcaaagccaggggtgttggagtctgatccaggggtgatggtgaagaaggccaaagagttgaagagggagcttcagaggttggtgaagtctattgtgcatgatgaggattgcagcactgagaccattgatcaggccaaagagactctctgtgttctcaaggagttgaagctcagaaacaggtcttcactgtctctgaagcttcacaacaagagtgtcgcttcttcttgccctgatgaattcaagtgccctctttccaaggaattgatgagagatcctgtcattgtggcttctggtcagacatatgacagacctttcattcaaaaatggctaaatgctggaaataggacttgccctcgtacacatcaagtcctttcacacactgtgcttacaccaaatcatctaataagggaaatgattgagcaatggtctaaaaaccaggggattgaattgtcgaatactgttcaatatattgatgaggaaggtttaaacgaagccgaccgtgagcattttctttgtttgcttaagaaaatgtcatcaacactttctgatcagaagacggctgcaaaagaactgcgcttgctgacaaaaaagtatccttgtttccgggtactcttctgtgattctgcagatgccattccccaattgcttaagccaatttgtggcagtgattcttttggtagtgttcaccctgatctccaagaagatgtaatcacaacactcctcaacatctctattcatgataacaacaaaaagctagtggctgaaactcctatggtaattcctctccttatgagagcattgagatccggaacaattgaaacgaggagcaatgccgcagctgcgcttttcactttatcagctctcgactcaaacaaggaactcatagggaaatctggagttttgaagccgttaattgacctcttggaagaagggcatcccttagccatgaaggatgttgcttcagcaatttttaacatatgtgtaatgcatgagaacaaggcaagagccgagaaggacggcgcagtgagggtgattttggcaaagataaataagcagattcatgttgctgagttactagctattcttgcactgctttcaagtcaccagagggctgttcatgacatgggagatcttggagctgttcctagcttgctgaggatcatcagagagagctcatgcgaacgcaacaaggagaattgtgtagcaatccttcaaaccatttgtctgtatgatagatcaaagttgaaggaaataagggaagaggagaacagccacaaaacaatctctgagctagcaaagcatggaacatcaagggctcagaggaaagctagtggaattcttgagagattgaatagggctgttaatatcacacacactgcataatgtctcttgagccctctctcaaggtacattacatcgtatattctgcatttgtctccagaaactctaagttgtttaaagttaaaatcagtcagaaattctgtctcttcaccaatttttgtacattcttttttcttaacgaagtcattctcatgttcatcagttagtgaccaaataaagtcatgtgctctgtctctaaattattcaaaatcttctacaggactctccaaggatgtttgggcttaaaacttttggttatgtttataatatattatctctatttttactttgcttaanaaaaaaaaaaaaaaaacc

SEQ ID NO: 14964 - DNA, 343 bp, Glycine max
  Clone ID: PAT_MRT3847_113518C.1
gcgagctagagaagttattatggtttttgactgcggcggtccaaacactcttctctgcagcgtttgcctaaatctcgcttcaacatggctgaacacatcgggaaagcttttctgaagcaaccacaagtgtttctcagcactccgaatactgggaatggacagagatctggaaaaggtgggaaccgcttttgaaattccaatgggcatggatttatcactcccattgaagtcatctatcgaatctatattgacaagagttgccccttcactggcaatgtatccatccgtggccgtaacttggctggaacatgtcacactgctaagatgaaccggactattattg

SEQ ID NO: 14965 - DNA, 618 bp, Glycine max
  unsure (1)..(618): unsure at all n locations
  Clone ID: PAT_MRT3847_113519C.1
gatcagccaaaataatatatatatatatatatatatatattaacaagtaccagaggtactaaaatacaagctacattctggtctagtcaacaccataacagattggttgatgaaccagaatatacatatagtaagactattacaattaataagcctaaattcgaatcctcatctacgaagaaattcttcacttaggtttgatgaccactgattatagtgggtggtgaagtccttctctaagtttttgagccaagtccatagcagaaacactgcatcatctaccaatttgtttgcattaaaggcagaattggagaaaactatactatttctatgcttccaaatagaccatgtcagtgctaaccaccaccctttccatctgtccagctgtatcccttcatatgctccatatatatgctgcagaaaatgctgttatgggtgatgtggaaagacacccaccagatttacccaagacagcattttgcaccatagaggaaacactttgctgcaatgaaaaaacaagtgacttgcgctctcctccatggttctgcaaaagggcctgtaaaatctcgtattcaacatgctttctcctcaagttgtctttgtntgtaacctatcttt

SEQ ID NO: 14966 - DNA, 259 bp, Glycine max
  unsure (1)..(259): unsure at all n locations
  Clone ID: PAT_MRT3847_11351C.1
cttgatttttttgcnatnncccagtcgtggtctcactcgggattggttgttcttgttctnaagngatgntccnaatcctaacccaaangagcaacacggtgaaaggtgaatacgtagagncaacagcaacanncgtcctangagtgaaacaccacctagtntgatctcatagcttcgcctcngcnccatccttncccgcnccaccctttccnnctctccgagaggntgccaccaccgncaccccgtgcnccgntcgnng

SEQ ID NO: 14967 - DNA, 1299 bp, Glycine max
  Clone ID: PAT_MRT3847_113520C.1
gggtcgagcttgttcttcttccttctcttcatctgtctctacccttctacgcaactttccttcttttctattgagcttccaaatattctcacggcttgctatagtagttgcaccctccaaacacaaactgattcccttgtcttttcatctaattgcttggtctttaatggacgcgctttaactttacgcacggaaactgataaggttcaggtacttgcagtaagagaacatattgtaaaactaaaagggaaaaatggccttagatcactttgaggagactgtgcaccaaaaaggaaattggaaatcttccagtgaaatcattgcagattctgatagaaatgcctctggtgactttgactgcaacatctgcctggagtgtgtgcaagatccagtggtgacactttgtggtcatctttattgctggccctgcatatacaaatggcttcattttcaaagcacctctttggatgatgaagaacaacagaggccacaatgtcctgtatgcaaatcagaagtttctcaatcctcccttgttccattatacggccgtggccaaaccacattaccttctaaagggaagccacgtcaagtaggcactgtcataccacaaagacctcatggtccaagaacacttaacactagaagtgtttcacaacctatttctcaaagttaccatccctatagtaatccttatcatcctcaacaacacttcaactcgattccaagcggttacacctcacctatgattagaacaactggttcaatagacaacacatttggaatctttggtgagatgatatatgcaagggtctttggtaaccacgtgtcaaacattcatacatacgccaattcgtacaatctttcggggaccagtaacccaaggatgagaagacatttaatgcaagttgataaatcactcagcagaataagttgtttcctcctttgctgcctagttttgtgtctgctcttattctgattgctacttcattttcatcattagttatagtgcatccttacatagaatacattcactcattgatccagatgtattctatgttagagaagctgcaaattgatgctgagttatgtgtaaattaccaatctctctacgagctatatgaagtgaataatgatattctcataccatttttagaacattttctttttctgtccctctatatcacattgttcatcttatcccatttctttgctaattgtaaaagttttgggggagtagagttatacatttgagagaatagattgaagtcctatgggtaaacaaataaaaaaataatgtca

SEQ ID NO: 14968 - DNA, 421 bp, Glycine max
  Clone ID: PAT_MRT3847_113521C.1
gttgttttttacatagttaaccaggttggttggaccagtccaaccgggacccggtggcataaccgggccagtttgatttattggaccggcatgcatttggcccggttagatccggcctttttggggtaaacatggcgacccaagcctgattttaaaacccatttcgcgtaaaaaaaaaatgctccaaaaatagcctggtacttgtgtaattgtgttattgaattattatttgtggacttgtgttattaactttaatactttaattgttattttggattttggagtatgaatgaacttttcttaatcaaataatgttagttatatacttatatataatagatacatatataattttaaattttttaatatataccatgaattattgacccaccggttggactattgatccactaccttaagc

SEQ ID NO: 14969 - DNA, 476 bp, Glycine max
  unsure (1)..(476): unsure at all n locations
  Clone ID: PAT_MRT3847_113522C.1
ggggcagggagatcagatacgaacancaatnnnngagcacgcgtgcgcacgctcgtaatttgggtataggcctttcaatccaaacccatgctttgttccacatgaatacccttctgagtattactaaggaagcaatgatgggcactgagactggaatgctatttatataattatgaaccttgctggcaggacagcgtccagtgttgatagggataactgctttaacatagacgatcaggggtacggctatgcaccatatggtacatatgcttctaccgaattcttttatgccatgattcaacaggatggtcagcagtacaggctgcaacagtgccgagatgcattgctttattacaaatgttcaggttatggtgatgggtactaccctacccacagaatctgaactgcatagggagaaatctcaactcctgatgatgttgctgagtgcgaactataacacatgctatgaattaagg

SEQ ID NO: 14970 - DNA, 314 bp, Glycine max
  Clone ID: PAT_MRT3847_113523C.1
aacatgcaaccaaagacatatgatgcaatcctctgtaagtgtgaggccatagtcatacatcaagtgcgatgcacacaacacaaacccataaaaggggtaaggggggcacaactcaaaacacaaatatgtggtgcccacatgcggcctacactacactggtggaactatcccggaggaaacttgtgaacgagggggcccgtaccaaccggaccaaggttccttgatctctcacagccagagaaaaaaatgtcttgattttctctctaacacgactaggatacaaaaagaggaagcaagtgtgggccccatattag

SEQ ID NO: 14971 - DNA, 793 bp, Glycine max
  unsure (1)..(793): unsure at all n locations
  Clone ID: PAT_MRT3847_113524C.1
ccacgcgtccggaaatctacggtgaagctggaatttggggtttctggaaaggtgtattaccaacattaatcatggtaagcaatccttccatacagttcatgctgtatgaagccatgttggcaaagttaagaaaaagacgtgcttggagtaagaagggtagcaacggggtaactgctttagaggtattatgccaattcgctaatctacataaaatctcttttgactgatgccctatttatatgttttctctgatattgcctttaattgtttactacattttcctattaatatttccttacgatactagatatttcttattggagctttagctaagcttggagctactgttgtaacttatccgatcctagttgtgaaggtatatcatactagtttaatctcctggttctgaagatatatgatatagtagtgtgtttggttataagttgaaaacttggaatgaactaaacttatgtttaacatgacgtagatatttgcttctccatttcatactctggaaattgtgaactttagtttgcattgttggacacatatccaagcatgcttatattagctttcttaagatgttggttntattggctaaatgggtaccagctaataagaaaaataataatatactgcagagctgaagataacagtaaaaactaccattaaaaatgtgcatttcttgttaggtgacgatgccaagggacggaaccaagaaaatttattaagaggggtngaaaatttaatacatttataatcatgaacttaaagtagaaatgtttttattgag

SEQ ID NO: 14972 - DNA, 560 bp, Glycine max
  Clone ID: PAT_MRT3847_113525C.1
attcttttttctttattgttttttaccccctttttctggtcaccatcactttttcagttccatctcctgccaagttgtttgtcctgcactctctccttccttggctcccaaacaaaggctacccaaaaacacaccctctgacaaaaaaaaagggcccaaaaaaaaaagacctttcagaagaaaaaaaccccctcaaaatacccaaaaaaaaaactaaccttgcttgttaaaaacataaacgacctatgtaaaaagcctcgcagaacccccccccaaaaaaagttattttaaatagggagccaaaccaaaaataacattattttgaaaaaaaaatcatgggagaaaaaaaaaatactgaatttgaattaaaaacaaacagcgcttggatccttgggagaacagaccccaaaaatttttattaaaaggacagaaattttgcccgccacttattataccaaaagagaaaaatggataaaagctgcggcctttcacccaaaaaaagaaaaaaggggggcccccccccttttcgaaagcatttgttttaaaaaaaatctttaccc

SEQ ID NO: 14973 - DNA, 431 bp, Glycine max
  Clone ID: PAT_MRT3847_113526C.1
cgaattacctgacggacaagtcatcaccatcggtaacgaacgattcagatgccctgaagctctcttccaaccatcattcttaggtatggaatctgctggtattcacgaaaccacctacaactccatcatgaaatgcgatgttgatatcagaaaagacttatacggaaacgtcgtcttatctgtaggaaccaccatgttccccggaattgctgatcgagtccaaaaagaattgaccgctctcgccccatccaccatgaaaatcaaaatcattgctccccctgaacgaaaatactccgtctggattggtggatccattctcgcttctctctccactttccaacaaatgtggatctccaaagaagaatatgacgaatctggaccctcaattgtccacagaaaatgcttctaaattaattctgttattctagata

SEQ ID NO: 14974 - DNA, 1078 bp, Glycine max
  Clone ID: PAT_MRT3847_113527C.1
cggtccggattcccgcttcgacccacgcgtccggggcgcgggatgttggggaagaccgagttctgaccgattccttttgagtggcgttgtcatttgtcagcattaatggtcccatccatcctcacccttggatctcatctttcccattccattctcaccgtccgatcttcctctttctcttccatttcaatttcaattcgcgagtgcgcgagtgggtttgaacgaagaaccctaaccatctccgcagcgcaagctgctcattgcaaccctccaaactatcaactgggatcgtaaccgctctctcgccctcgccagatttgattggatcggcttcctgcattcttggactcgggaatttggaccaaaaacagttccccaaatcttgctttttgtcttgttcttgtttctaagtcgttaatgtcagtgcagcgaagtaatctctggcaagttgattgtggcaggggagaggagggttcaaaattgggcagcatataaacttggattacccattttggtggttttccctttgtcattggaaccatggaaattgttgatttgagtgtctaaggtaagtccgaggtatgagtgcagcctatgctgtatctgctttgtaactcaagatttacggaccatggaagccaatggaatcgctcatgatagtagtagcctaggagcggggagaagggataagagagaggtgggagacaaaatggtggaagatttaagtaaatatgcacacagccctgctcacttggcagttgccaggcgcgaccatgcttccctaaggcgcattgtttccgccctacctaggcttgctaaggctggtgaagtccacacagaagcagaatctattgctgctgaacttcaagctgatgaggtatctacttttattgatcggcgtgacgttcctggcagggagactcctcttcaccttgctgtgcgtctccgggatccagtctctgctgagattttgatggctgctggtgcggattggagtctgcagaatgaacatggttggagtgctctccaagaagcagtgtgcaccagagaggaagcgattgccatgattattgcacgg

SEQ ID NO: 14975 - DNA, 535 bp, Glycine max
  Clone ID: PAT_MRT3847_113528C.1
tgagtttattgcataatggcatccttgagatacactctgcaggcttgaatatcttgtcttttttgtattgtttttggtcctataagagcttgaaaggcaggtgaaatttggggcctcaaaatcgtggtcgatgtagaaatctcatcttcaatctcgtgtaagccatttttaacagctggacatacaatctgttgatactgtttgaaatatgaaagatattggatcccgagtacactattgatacagtgttggtgaccggtgaggaataaaaaaattatgctcatttgaattttgctttggggaagcttcctttgaaacgtgaaaaagcatacattacccctgatatgaaaaaacaatgggtttatttttatttgggaaacaagtgttgccttctagccttatacaaattccattattttttttctgattgtcctatggaagttaaacaaggtgtaccattgtaaatacaacagattttcgatgaataaatgctgcagtggaccaaaagtacctgcagaaataagttgaagtatta

SEQ ID NO: 14976 - DNA, 261 bp, Glycine max
  Clone ID: PAT_MRT3847_113529C.1
ctcataacaaggcttccggctcagatcaagctaacagcgatcgcttgttgaccgcacaggagcagttgcaaggaactgtacggaagaagctttccgtcgctttcgataaactcgaccacccggacatactcatgatcatgcgcctcttcacaccggtgggtgtgaacgacgaggatttgcatgtatatgtccgctacttgtagaacgtgaacgagatgatgtttaagatggagaataagcacgttgttcacaccatggatc

SEQ ID NO: 14977 - DNA, 480 bp, Glycine max
  unsure (1)..(480): unsure at all n locations
  Clone ID: PAT_MRT3847_11352C.1
gttgctgtcggaaagtatangactccatatgcccaggatcccatgaggtctttgcccaggagctgtctccantgcaaacttcaaccttacttctgaaacatctattaggtcaaaacgtatctctggatcaacttctgtgacagttgaacttttaggtaagcgatctagctgcagattgttgtacaagtccatgatagcccaaataataggttcatgaatctcaagcctccaagcatttgtccgttactcgtatataaacatatgggtaaacttgaatccatctttattctcattctgcatggtgattgtcacttgaaaactgggttgtttgcncatcngaagtcngcnctggcgccaaagaaccacaggnatccaatgttaagaaggaanctggtttgtcccatttgccaataacccaattattaacntgaaccttgcttgttntttcccnccaatncnnttaccnntttnaaaantttt

SEQ ID NO: 14978 - DNA, 298 bp, Glycine max
  Clone ID: PAT_MRT3847_113530C.1
ggctcgagagcaagagctcttctcaaaaaagcaaaaacataaagaaaagagctagtcactttctctctcctagcccgccctagcccgagctagccaacttccacacttagcagcctagcccggccggcccagtgttgaaaaactctctctttcacatgcagacttccactgcctctctcttccaccacctacagcccctttggactgattttcataactgggttagagttagagttagatttactctaactgaattatctatgtacttgagtagatcctttaggagagattcaaaaca

SEQ ID NO: 14979 - DNA, 425 bp, Glycine max
  Clone ID: PAT_MRT3847_113531C.1
atgaaaatgctttggagctagactttggggctattgatttctccacccctcgcatggttctttcttcttctattgggaatggactaaactttacaaccaagatcttgacctcaaggttgagtgagagctcccaaaacataaatcctttgctggattacttattgagccttaactatcaaggagagaatcttatgatcaaagacaccttgaacaccatgccaaagcttcagcaagcactgaaagtggctgaagcatatgtatctgcactccacaaagacacaccataccagaaatttgaggacaggttcaaggaatggggatttgataaaggttggggcaacactgcaggaagagttaaagagacaatgaaattgctctccgaggtactagaatctgcagatccagtgaaattggaatcacttttc

SEQ ID NO: 14980 - DNA, 171 bp, Glycine max
  Clone ID: PAT_MRT3847_113532C.1
atggcgtcggcgtgggagaagtcgaggaggtcgtcaatggcgaaaggctcgccggttttctggtcggagtggcgcttctccggagggcagaactgttcggctcctccgggagcgaagcgcaccgttttgatggaaggaatgaggattcctttgctttggtttgctgtgtga

SEQ ID NO: 14981 - DNA, 390 bp, Glycine max
  Clone ID: PAT_MRT3847_113533C.1
ggtttggctccattttttctcctccatcgtctaaggtgtgtgtgtttaatttcaacaccttgttctgttttgattcttttgcttttttttgttgctcaaaatcaatccctttgtttttgttttttctgcatttcatggtgaagtttacgattggtttctgttatgtgtttggttttgttgtgttaaaagtctgagctttcttttaggccatgtttttcaccaaaaaaaaaatatttcattctttccaattagtttctacttgaaggtcaaatctgacaatcaatgagcatttacacctgaacgattgaattttgctatctgttgaagtattttctggatcattagttttttggttgaatttgaattatataccatgtggtccatgtccat

SEQ ID NO: 14982 - DNA, 255 bp, Glycine max
  unsure (1)..(255): unsure at all n locations
  Clone ID: PAT_MRT3847_113534C.1
agaacagctccctcgcccgggaagaaacaagggcttccgaagaaccctacaacaagccccccagcgagcagcccacnaccgaacacancacgagcgcgaagccggaggcggaggcggcgcagccggcaccgaagagcgacagcgacaaagaggacaaggccaagggggcngacgccgccggcgaaccacncgacgcggcggggaagcacggaaaacncgacgacaaacaaggcagagggcaacacgacgacaagg

SEQ ID NO: 14983 - DNA, 223 bp, Glycine max
  Clone ID: PAT_MRT3847_113535C.1
caaaaggggaagggaaaaccccctttataaaagagaacccgggggcccccaaatcctacaggggcaaaatgaggggcaattatcccataaacattgcaaaaaagctcggccccaaactcggggttatggccccgggcagggaaagagaaaaccttcttaagagggcccccaaaatcaatgacccgggcgggtgtttaaataatgggagcggggaaaacccggg

SEQ ID NO: 14984 - DNA, 709 bp, Glycine max
  Clone ID: PAT_MRT3847_113536C.1
aataagatctgaaataaataaataaataaccaatttcaatgaaaacttatatcaagttccactttcataataatagccaccaaaattataaccagcaagatactatccaacgactagagcagataatcagaacaaaataccccttcacaaaactgatatgttcaaaattaagcaacaaatttgttcttaggatttggtcagagcataacatcaaggctttttcttaggatttgcttttaggttcgaacaggtgctcctgtgccagcaggacgaggagcttgaccaggctgaccaggcctttgtgcatcatccctgcgcctgatgaatcgctgtggaggctcacgcttcctcctatcagtgcgggatcgaaccctcacaacatgagaatggatagcacaggaaacacagtactgcatcttcacatatagtttcggaagcgtgtattgttcatagacacaggcttcctgcacatctctgactgcagcctgttcaacaatgttcctcacaagaaacctcttgatggccttgtccttggggcagcatttgccgcagttggagcatcggatgaatttgacatggccacggccgtgtttgttgcgacctccgttcctgcgcttgaatgtcatggccggcggccggtgccttcacgctcttcgctctaggtttttgagtgctgtaactgctgttgctgagtgaaacagatctgagc

SEQ ID NO: 14985 - DNA, 710 bp, Glycine max
  Clone ID: PAT_MRT3847_113537C.1
agtctcgagttttttttttttttttttgagtatggcacaactgaggtacttcaaaacgctaaaatatatcaataatatatcaggtttcattctcctcaaaaccatcaaataataatagaaaattttctccgaggactaaagcaaacaactagaagaaaatataatatccctacacaaaactgaaatttaaaaaataaacagcaaatggagtataagtttgtaacataaaactgaaccaacaagccccaaaaaactttggaatttgttttttaagttcgggcaggagctcctactccagcaggacgtggggcttgaccaggctgaccaggccttggtgcatcatccctgcgtctgataaatcgctgtggaggctcacgctttctcctatcagtgcgggatcgaaccctcacaacatgagagtggatagcacaggaaacacaatactgcatcttcacataaagcttcggaagcgtgtattgttcatagacacaagcctcctgaacatctctgactgcagcctgttcaacaatgttcctcaccagaaacctcttgatagccttgtccttaggacagcatttgccgcagttggagcatcgaatgaacttgacgtggccacggccgtgtttgttgcgacctccattcctgcgcttaaaagtcatggtgacgaacgaaactctctatctccccttctgtcgtcttctcgcagccgt

SEQ ID NO: 14986 - DNA, 159 bp, Glycine max
  Clone ID: PAT_MRT3847_113538C.1
ctcgaccaatcggctcgatggcaaaattcttccctgggctatctcaaacgctcctcccgcgatgatgattccaattccgatgcggatttcggaccctaccaatactaaacctgcggcgaaaagaatgggatgcttgttcgagatcctaccagaggaaac

SEQ ID NO: 14987 - DNA, 822 bp, Glycine max
  Clone ID: PAT_MRT3847_113539C.1
tcgagttttttttttttttttttacagttaaaaaccaatttaattccattttaacagaacagaatttatatttggaaatcaaaaatcaaaacttgctaccaccacagacaaactgaggtacttcaaaacgctaaaatatatcatatatcaggttacattctcctcaaaaccatcaaatgataacaatagaaaattttctccgaccactgaagcaaacaactagaagagaatataatatccctacacaaaactgaaatttcaaaaataaacagcaaatggaatttaagtttgcaacataaaactgaacaaacaagccccaaaaacttggaattttcttttaagctcgggcaggagctcctactccagcaggacgtggggcttgaccaggctgaccaggccttggtgcatcatccctgcgcctgatgaatcgctgtggaggctcacgctttctcctatcagtgcgggatcgaaccctcacaacatgagagtggatagcacaggaaacacaatactgcatcttcacatacagcttcggaagcgtgtattgttcgtagacacaagcctcctgcacatctctgactgcagcctgttcaacaatgttcctcaccagaaacctcttgatagccttgtccttagggcagcatttgccgcagttggagcatcgaatgaacttgacgtggccgcggccgtgtttgttgcgacctccattcctgcgcttgaaagtcatggtgacgaacgaaactctctatttagggtccccttctgtcgtcttctcgcagccgtacccttctgtcgtcttctcgcagccgtcggacgcgtggg

SEQ ID NO: 14988 - DNA, 1356 bp, Glycine max
  Clone ID: PAT_MRT3847_11353C.1
cccacgcgtccgcttttttgtccaactaatttagtgcaggcttagtagagtcaggggtgaacatttggcgattcattgtcacaggaaagacattctgcatactcatgagcacaaacctcaaaatataattgagtgctatggggattcccatacgaagtggaaatataaaaagacaaaatgaagcaatgaggctcaccctagcaacctttgttggagttgtttttggcttctctctaggagtatcatttccaacactggcattgactaggatgaaccttccatccagccttttaccatctattgatctaacttatgttgatgacaattactcgaaaatttcaaccaagtctttgtgggatgcttgggcttcatttaggagggatagaagcatgtacaagaaggttcacaaattaactgacgtccggatttgggttcctacaaatcctcgaggggctgaaaggcttcccccaaaaattgtcaaatctgaatcagatttctatcttcatcggttatggggcatgccctatcaggacctaagtatcaaaccgaagtatcttgtaacatttactgttgggtcagatcaaaaagacaacattgatgctgcagtaaaaaagttctctgaaaacttcaccatagtgttgtttcactatgatggacgggctagtgattgggaaaagtttgagtggtcaaagcgagcaattcatatcagtgctaggaagcaaactaaatggtggtatgctaaacgctttctgcatcctgacattgtggctccttatgactacatctttatttgggatgaggatcttggtgtggagcattttgatgcagaagagtacttaaaaatggtaaggaaacatggtttggagatctcacagcctggtatagacccaagtagtagttttacatggcagatgacaaggaaaagggatagtggtgaagtccataagaaagctgaggaaagaagtggttggtgttctgatccacatttgccaccatgtgctgcatttgttgagatcatggctcctgtattttccagagatgcatggcgttgtgtgtggcacatgatacagaacgacctagttcatggatggggccttgatttcgttctcagaaaatgtgtggagcctcctcacgagaaaataggagtggttgacactcaatgggttgtccaccaaagtgttccatcacttgggaaccagggccaagcagagaggggaagggcaccgtgggaaggggtgagagagaggtgtaataaagaatggacaatattccaagagcgtatggctgaagctgagagggactattttcaaacaagggaagctattccccttaactccacagggcagtgattatgcg

SEQ ID NO: 14989 - DNA, 1588 bp, Glycine max
  Clone ID: PAT_MRT3847_113540C.1
ggcatgttcgtaaattgtcattagaaaccatagaagaattttgacataggtttatggcactaaacccacaaaattacaattaatcttcataaaaaccgccaaattataactagaaagatgttatccaacgtgtagcaaaaatttaaaacaaaatacccctccacgaaaccacattaagggaaatttagattgatctgacgtcaaagatgattcctggcaacaacatttcattctttttaatcattttctttcctcccaaaaccaaaatgtaccgttgaccacaagatcaagattgaccatcattgaacaaacccaacaacgggggggatctgtgtggcacaccgaagaggaaggaggagatcgcagcagattggggggatcagatctagggagggaaggaggggaagaagagaaagaaggaaaaggggagaaaatgaagcgctgctgcccgaaatcgcctccggctgaggctgacagagcatatccgggaaggagcttgaatctggtgggagaggtttaagataagagaaatgaaattagatgaatcttatggtaaataagagtgatccattgtacaccacttgtttgggtggttcaccctagaattggcctcaaaattaggcaacaaaaaaagttttagcttatggttcaagcttaaaatgaaggctttttcttaggatttgcttttaggttcggacaggtgctccaatgccagcaggacgaggtgcttgaccactaaccaggctgaccgggcctttgtgcatcatctccaatatcaatggtcaactggggaggtaagactcaactccatcaggaaacaaaacaaggtccgctagtgttttaatatagaaaaatgttccttgcagatcaatgtgattgtgcaatgggaactcattgaaaattcaatctgtaccacaacaatttacttttaaattcttttaacagcagagtatatcaaattcagtttctgcatttcttccattactaagcttttgagtaactaaatgtcactctctatatcgtctccatttgttttagaggatccattgccgtgcatcagtacaattacacaagttttatccaaactatcctcaattcagccaaaaaaaaaaacagagatggctataaaaagtgttaccctgcgcctgatgaatcgctgtggagggtcacgcttcctcctgtcagtgcgggatcgaaccctcacaacatgagagtggatagcacaggaaacacagtactgcatcttcacatagagtttcggaagcgtgtactgttcatagacacaggcttcctgcacatctctgactgcagcctgttcaacaatgttcctcacaagaaacctcttgatggccttgtccttggggcagcatttgccacagttggagcatcggatgaatttgacgtggccacggccgtgtttgttgcgacctccattcctgcgcttgaatgtcatggccggtggccggtgctttcacgctctgctcactagggttttgtctgcagcagctgcgggcggatgcggagtgaaacagattgctgcaagcaaaatgtgttttatatccccttctgtcgtcttctcgcagccgta

SEQ ID NO: 14990 - DNA, 510 bp, Glycine max
  Clone ID: PAT_MRT3847_113541C.1
ggctcgagctcttattttattcttcatccaatgactatacattcattatctttttgtgtaaatagatgaacaactctgtggaaacccggcgtgttaattgtctcttgatggatgagaagcttaaatacaagcgccaatctagtaaatccatgggtggtctcggtcctattgacaataccagtctcaggggagaccctaatattttacccgatattgaaaaaaaccttcacaggcatttgccttatctcaaaatggggggtttttttttatagcgagccgaaaactgtttctaggactgatcctgctcattccatgtgtgaaactcagtttagatttaacaagaacattgctattatcattgacatgaccattgagagtttcaattcaggtgatatcgtcaactacaccgatatttatttttatagtatcgtacctttgaagggcagacattgccgtgaaagcgataactctagtactagtataataacttgtacgaatgatacctatgat

SEQ ID NO: 14991 - DNA, 258 bp, Glycine max
  Clone ID: PAT_MRT3847_113542C.1
cccacacatcccctcactctctcactctcttttatacaaactctaaacctctactccgtaggccatctactaaacattctattacatatattcaaaactttcattccctaaactaatcaatcccaatatacaaactctactaacctaacacaatacacttttaattcctctaaaaaaaaaatccctctctctcttttattatcccaacctttcaactcactcccttcaactttaaaccttttttacaacataacctaa

SEQ ID NO: 14992 - DNA, 765 bp, Glycine max
  Clone ID: PAT_MRT3847_113543C.1
ctgattaaaacttactcgggagatgtcattccgaaatcgccgagataacatatcaagtttcattttcataaaaagccaatattatccaacgactaaagcttataattagaacaaaaagcccctccacaaaactgatatgttcaaaaattaagcaacaaagaaaagtttatattataaaaatagtccagcataacataaaggctttttttaaggatttgcttttaggttcggacaggtgctgctgtgccagcaggacgaggtccttggccgccgggctgaccaggcctaggtgcatcatccctgcgcctgatgaatctctgtggaggctcacgtttcctcctgtcagtgcgggatcgaaccctcacaacatgagagtggatagcacaagaaacacagtactgcatcttcacatagagtttcggaagagtatattgttcatagacacaagcttcctgcacatctctgactgcagcctgttcaacaatgttcctcaccagaaacctcttgatggccttgtcctgttttttaataatatttttttattcacaaagcgtaaaaaggtcaattgaaacgccttaaaccaaaaaaaaaaaaaattgaaggtttaagagaaagtgaaataaaaaccttgggacagcatttgccacagttggagcaccggatgaatttgacgtggccgcggccgtgtttgttgcgacctccattcctgcgcttgaatgtcatggtcggtggtggccggaacttgcacgctctctcttccctcgt

SEQ ID NO: 14993 - DNA, 413 bp, Glycine max
  Clone ID: PAT_MRT3847_113544C.1
cttggttttgttttgtacgctttttttttcattgagtgttctttcttcgtttcaacacctgaatttgcacacgctgcttcttcagcttgagaaatggcacatgaaacctttctattcacatctgaatctgtaaacgagggccaccccgacaagctgtgcgaccagatctctgatgctgaggggaatgcctgccaagaacaacgaccctgacagcaaggttgcctgtgcgacatgcaccaagaccaacatggtcatggtcttcggagaggtctacgaccacgccaccgaagagtatgagaggagtgttcgtgacacatgccgcgacatcggaaccatccctgatgatgttgctcctgatgctgacaaatgcaaggtgttggtcaacattgagcagcagagccctgatatcgccc

SEQ ID NO: 14994 - DNA, 2078 bp, Glycine max
  Clone ID: PAT_MRT3847_113545C.1
caaataatatagaggtgataaaaaaaacagtaagcacaatacaatagaatttaaaaagaacagacataaaaaaaaccaattccgatgaaaacataatcgggagatgtcatttcgaaattgctgaaagttatcacataccaagttccattttcataaaagccgccaaattataaccaaaaagatatcatccaagactaaagctgatgattggaagaaaaaaataaccctccacaaaactgatatgttcaaaattaagcaacaaataaaagtttatattataaatttggtccagcataaaatcaaggcttattccttaggacttgcttttaggttcggacaggtgctgctgctgtgccagcaggacgaggtccttgaccgggctgaccaggtcttggtgcatcatccctgcgcctgatgaatctctgtggaggctcacgcttcctcctgtcggtgcgggatcgaaccctcacaacatgagagtggatagcacaggaaacacagtactgcatcttcacatagagttttggaagtgtatattgttcatagacacaagcttcctgcacatctctgactgcagcctgttcaacaatgttcctaaccaaaaacctcttgatggccttgtccttggggcagcattttccgcagttggagcatcggatgaatttgacatggccgcggccgtgtttgttgcgacctccattcctgcgcttgaatgtcatggtctgtggcagccacacgtcttggcagttctcttctctgattacgaagaaattttttcagcaaaagcaggcaatggacttcttttttaagggaatgaacagggatggatctgagtgtccctttgatgtgaaagacatccaacggtgtccgtttttaagaaacatcaatgaacctacaaacttctctttctcctcaactaaaatctccattcctgttcatggatccaagggtcctatatttgaagatggtcctagttttggcatggcatttaagctatttcatgggaaggatggagtcattcccctatctgagaaatctgactttcacaatggcagcacagaagcagattctctgcctgttttcaaccctttggcaggaagagctgcctccataagtctgtctggaccaggtggcccatttagtttttggaatttttctgagaaatggaagaagcagaagaattccgaatcatcaaataaaaaggaatactcacctcagaatggagatgtatcaaagcatgaggcacttggaaatgaatggttggccaaaggaacttgcccaattgccaagtcttatagagctgtaagcaatgttctaccccttgttgcaacagcttttcggccaccgagtggagtgaagcttagatgtccacatgcaattgttgctgcaagggctgcccttgcccgtacaacctttgtgaaaaacatgcgccctcagcctcttcctgcaaaaatgcttgttattgcagcgttaggcatggcggttaatgtgccctttggcatgtggaaggagcataccaagaaattttcattatcttggtttgtagccgtgcatgctgctgttccctttatagccatgcttcggaagtcagtggtgatgcctaaatcagcaatggcactgaccattgcagcttctatacttggacaagttattggctcaagagctgagcgaatccggctgaaaacaatagctgttgagatgggaaaagtgaaaacagagacagtatgcagcatggaaagctataatagtcccatgcaacttggtgatattagggccaatcactgtggtgctgaaggaatggtcctcaagtcgtcacttcctgtgaaggatactggttcaacttcaactgctggcgtgtgttattgatctataaagattggaaagaaatccattcaggttctatttgaacatattgatgaactggaattgtaataaaattgattaatataaataagatccttatgagctatgtataacttgaacagaaattaagacatgctgttactatgcatgcagaaatgtatatggagaattgatcgcttaattctgataaaagttgagttcgtcttaaattattc

SEQ ID NO: 14995 - DNA, 1349 bp, Glycine max
  unsure (1)..(1349): unsure at all n locations
  Clone ID: PAT_MRT3847_113546C.1
gaccggcgcgagcaaactataggagggttaaggagcaggcggcggttgattatttagagttaaggtccgtggctcagggtgtctctagacaaagagaatttgacctttgtggcaaggaaagagagaattttgtgccttgttacaatgtttcagccagtttgttagcagggtttaaagacggagaggagtttgaccggcattgtgaactgttagttgaagcagagaggtgtttggttcgccctcctaaggaatataaaattcccttgcaatggccaactgccagggatgtcatatggagtggaaatgtgaagataaccaaaaaccaatttctttcatctggaagtatgaccaaaaggttaatgcttctagaagagaatcaaattgctttccactcagaggatggactgatctatgatggtatgaaagattactctcgccaacttgcagagatgatagggttgggaagtgactatgagcttcctcaagctggtgttcacactatactggacattaattgtggatttggtagctttgcagctcatttggcacctttgaaaataatgacagtttgcattgctccatatgaggcaacaggtagccaggttcagttggcccttgagagaggccttcctgctgtgattggcaacttcgttgcaagacagctttcatatccttcattatcatatgacatggttcattgtgctcaatgtggcatcatttgggatggaaaagatggaaggttccttatagaagttgaccgtgttcttaaacctggaggatactttgtattaacctcacccacaagcaggtcacagggaagttcatcacaaatgaaaaggaggaacatgttgatgccaatggaacagctgacccagaaactctgttggactcctctagctcagcaagatgagacattcatctggcagaagactgctgatgttaattgctatgaatctcgaaagaagcatgctataccattatgcaaagaagatgatgatgctcagtcgtattatcggcctcttcaaccatgtataagtgggacctctagcaagcgctggattgcaatacagaatagatcctctggatacgaattgagttcagctgagcttaaaatgaatggtgttcagcctgaagatttttttgaagacttgcaattctggagatcagctctcaagaactattggtctttgcttacaccactaattttctctgatcatccaaagagaccaggagatgaagatccattacctccatttaacatgatgcgtaatgtgatggacatgagtactaaatacggngggttgaacactgcccttctagaagagaataaatcagtttgggtcatgaat

SEQ ID NO: 14996 - DNA, 501 bp, Glycine max
  Clone ID: PAT_MRT3847_113547C.1
tggttctcatccttcagagactacgagtataataggagcatccgtcaacaaaaggatcaccctaagatgatcatctcgtggctattgagaacgaatcaaatcagatggttctatttcttattcttaatgttttcgatctcggttccgtaggaacaagtcatagagattgagaaaaatagatcattcacaaccactgatgaaggattcctcgaaaagttaaggattagtaatccttttgaaaattaaaaatagaaaggattcggtcttatacatacgcgaggaaagtaatcaaaaaagaaagaagaactcatcctctttcttttatcacttaggagccgtgcgagatgaaagtctcatgcacggttttgaatgagagaaagaagtgaggaatcctcttttcgactctgactctccccactcagtcgtagcttttcttctgtactcctcgaaagtagctgcttcagctttagcccctcgaattttcgatatccctttttattt

SEQ ID NO: 14997 - DNA, 161 bp, Glycine max
  Clone ID: PAT_MRT3847_113548C.1
gatttttaaaacagtatgtatccatcatccagaaacatattcaacaacgcaactcattcaacgggcgacattggatgcattagctccatcgcatgttctcatccattgcgcgttcaagcaatcaactcaatccctagcctcattattcattaccactatca

SEQ ID NO: 14998 - DNA, 524 bp, Glycine max
  Clone ID: PAT_MRT3847_113549C.1
gattttaggaggatcagaatcaaacaacacccttattaccaaacttcgcttagccaaagacacttacttctcttcatgggttctattggaattgagagctcgggacctgaggttgtcaccgttgatgtacatgcaaccaaggatctgatccagaccagtcatgtttatctggatgtcaggacggtggaagagtttcagaaagggcatgtggatgcagagaagatcattaacgttgcatacatgtttaatacaccagaaggcagagtgaagaatccagaatttcttaaggaggtttcatatgcttgcaagaaagaagatcatatcatcgtgggttgtcaaagtggagtgagatctctgtatgcaactgctgatcttctaacggaaggatttaaggatgtgagcaacatgggaggaggttatctggactgggttaaaaatgaattgccagtgaaagcacctttggactcggttaaaatcgaattgcaagtgaagaaagaacctttggacttggttaaaaatgaatt

SEQ ID NO: 14999 - DNA, 521 bp, Glycine max
  Clone ID: PAT_MRT3847_11354C.1
ggccccgtcgtcctccgccgccgccgccgcaagacccttcgcatgttcctccacgacccgccggaaaccgccgacaaagacattagagtccgctcaaagttcaaggatttgctcctctcctcgccgccaccgccgccgatgatcaagaaacgccaagagcgggaggggctgctccccggtggcggcggcggcggcttcgggttccgattacgaagcggttccggtttccggcgcggcggcgccgcctcactcaggcttagactgctgagaagagcttggcgacctgtgctccaatccatccctgagtagtcagtcactcactgttattatttactgttgtgaaattattattagttcttatgaacttattacggttttgtttattaataattcttagggtgaaattaatatattatcacatttattttaatttctacttttgtgtaattatttttaattaatgttgccatagctacactgtcggttgtcgttgtaataatactgtgaaaattgagtgaaaa

SEQ ID NO: 15000 - DNA, 375 bp, Glycine max
  Clone ID: PAT_MRT3847_113550C.1
cgacgcgtctagttttgatttcttaatcaaaaccaattcttttcttacaccaaaattctatatatagagctagatttttttaatatacattccaataccacacatatctactttcacaaccaacaccaaaaactctaaccttaaactaggaaaaggtaaatgcttaatctgctagttctactttatggatgttttaagaactttatcactttacatactcatactggttctgtgctttacttttacttttgatagacaaaatgtctctgtattcattttcattgttaccaagttcaaattgactgcgactgccttataaaaaaattaaaaaaaatttacttaaaattataaaaaaaaaaaattgggcgacccctt

SEQ ID NO: 15001 - DNA, 533 bp, Glycine max
  unsure (1)..(533): unsure at all n locations
  Clone ID: PAT_MRT3847_113551C.1
ggttccaggcgtttgaaacttaaaaaggtgatccagaacttatttcaaattacttctgccgcattcaattgatgaatcctaactttttctatgtgatggatctgaatgatgatggacaactgaggaatgtattttggattgattctagatctagggctgcttatagttattttggtgatgtggttgcatttgactcaacatgtttgtcaaacaattatgagattccacttgttgcatttgttggtgttaatcaccacgggaaatctgttttgctaggatgcggtctgcttgcagatgagacatttgaaacatatatttggttatttagggcatggcttacatgtatgactggtcgccctccacaaactattatcacaaaccantgtaaggccatgcaaagtgcaattgcagaggttttcccgagagctcaccatagaatttgtctatcacaaatcatgcagagcattcttgggtgtnttgtgcagtttcaggagtatgaagcatttcagatggcactgactaaagtgatatat

SEQ ID NO: 15002 - DNA, 274 bp, Glycine max
  Clone ID: PAT_MRT3847_113552C.1
tgggacgaacgagcaaaacgatgctctgggattccttcatttcccgtgtgattcaccaccgatctgatagtcgtagtgcgttgtgtgtttgggaagtgggatggagtgtgtgtgaagagtctcatgagattttcgtcagcgaggaacacgagcagcagaggtttctgtctcgtgagctcgcggatcgggagccacactgcgaactggatgcaagatacaggcaggagatctccgatcgagctgattaatgaagttcctccaattgacgttgaaa

SEQ ID NO: 15003 - DNA, 730 bp, Glycine max
  Clone ID: PAT_MRT3847_113553C.1
cccacgcgtccgcccacgcggaatatttgcgtatctgcattagcgcctgggggcatggccgccattcaaatctgaattgaaagaaagagcaaaaaacaagtgaaaatgtgtggaatatttgcgtatctgaattacaacctcaacagagagagacaatacatcttgcaggttctcttcaatggcttgaggagattggagtaccgcggatacgattccgcaggcatcgcaatcgacgattcctcttcttctcaattctctctttcgcctcctcctctggttttccgtcaggaaggaaacatcgaatcgctcgtcaaatccgtctatcaagaagtgggagaaactgaactgaacttgggggaatgcttcggcacgcacgcgggaatcgcgcacactcgctgggcgactcacggagagcctgcgccgcggaacagtcaccctcagagctctggtcatgggaacgagttcttggttgttcacaatggagtcatcactaattacgaggttttgaaggagacgctgcttagacatggcttcacctttgaatctgaaactgacaccgaggtcatccccaagcttgccaagtttgtccacgacaaggcgaatgaagcgtccggaggtcaggttgttaccttcagtcaagttggtcttgaaggtatgaggcatcttgaaggagcttatgcccttattttcaaaggtccacattatcctaatgaattgattgcctgcaagc

SEQ ID NO: 15004 - DNA, 370 bp, Glycine max
  Clone ID: PAT_MRT3847_113554C.1
agggaacgttcaagagttagtcgtgagcaatcaggcagtgtatcgtgaggagaatatcaagttgttcgtacgcatcattcctcgcgtagttccaggtagcagagacgctcctatgaacagctgcaacagtgctccactgagtcagcaccagctacggtgagcgtgaagcagccgcatcgttagcatcctgcaagcgttacgcttcgtgagattaggccctaccatacaagtaccgaacttatgatccggaagctccccttccagacgctggttcctgatattactcaggatttcaagactgatctgcatttccagatccacaccgtgcttgcattgcacgaacctgctgacgcataacttgtttggctcc

SEQ ID NO: 15005 - DNA, 360 bp, Glycine max
  Clone ID: PAT_MRT3847_113555C.1
gttcgacgccctaactactcggtggtcggccttcgccctttttttttaaataactatgaaattcattaaacacggataatacagatacactcgtacacaacacatgaaatgggccattagcaactcatgagccaaagattacgtcggcccatggcgagacacatgtacctactcgagaatccatattatcagcacagcatccctactacagtatatttgaggatggaaccagagtcaatgccagcatctgaatctattaaacataagtatgctatgaggcgtaccatgaacttgcgcttctccggtgtggtctgtacgcgaccgtgccaccacgaaccggaggaatggatcacctggact

SEQ ID NO: 15006 - DNA, 536 bp, Glycine max
  Clone ID: PAT_MRT3847_113556C.1
gggggaaacaggcaaaaaaaaaactgggctaaggatcctccacattatataaaggggaccccatgatgttaaatcctgggaagaaaaaggaatttaaaaccaagggggttccaaatcccccctggacataaaggcttttttatttacaaattcaggaccccacggttttgggtttttcccccaaccccacgggtaagcaaaaaacccaaaggagggggccctgtaaacagacttgaactgaaccactgtttttgtttggggggacccaggcccaaatcttcttattttaggtgggggagaaactggattttttttttttttaattaagcgtggctccggagggatccaagacctttgtttgcaaaacctttaaaaaggtttggggggtaaatggcaccccccgcatttccaacaaagggcccaacccagaaaatccatgggtcgccccaggctttgtcgttgttgaaaatcacaggtggtccgaaactctttgcagggttaatgccggttccagtgacggggattgtacccaagtg

SEQ ID NO: 15007 - DNA, 486 bp, Glycine max
  Clone ID: PAT_MRT3847_113557C.1
actagagtaatatttatgataaattatctacctattgtattatacacaattgaaaggtctaagggagataacattctgcctcttggtcatgaaacaatttttcttttccttcaagactcgaatccccagctaattaacgcttcgtgcagttcaaaaggtaccaagaagttgaaatgctaacttatacgtactaattactgataaaaaggagaagaaggaggaggagaaaaagaaagtttgggagctgattcctttatagctagctgttgagagaaagagaataagtaaaaatgctgcaaaagagagggtagctagcccaactaactttgaaactaaatcttctccattcattattgggggcgtggaatatattattttatttgatcgatcactgccgatgatacctgcaagagggatccaaatcaaacagcagcgaagtcccagttctgccccctttgtgatccccaaaccctcctgacgacgaca

SEQ ID NO: 15008 - DNA, 392 bp, Glycine max
  Clone ID: PAT_MRT3847_113558C.1
attacaatctcttgcgtattaccgtttcagatcatgtcaggttctatggatcgaaatctaactgcataatcttaattcttaggaggtaataaccctcattgaatcatatatgctagttgacgacacaccaaaggcaaacaaatacactgtacatactaagcttgacagatcatgaatcatcaaaaatgtcccccaagatgatgatcgatgtcaatctttaagtgggtccattccctgcctcagatcagctagttcggcccttctcactctcgttttgacaagcacctctatatactttatgtcaggtgaatacactggtaattgtgattcaatgccaacccctgcgatttacctcctaactccgaatgtcacattgagtccaacttctcggc

SEQ ID NO: 15009 - DNA, 473 bp, Glycine max
  Clone ID: PAT_MRT3847_113559C.1
ggtgggtcgaagatccaggaggcgtatctgatctttcaggatttgtcggagaggtatcagtccaccaggttgctcttgaatggcaaggctggttgctgcatgcacatgggcaacttcgacgaagctgagacccttttggttgaagctcttaacaaggcatgttttgcatgtgtatatatcattcacttctatggatttgacgacacaattgatattgcatcatgcttacaatttgtccaagatttgaaattgctgagtgatttgattgagttcaaaatgatctcaattgtcttcccattttgcaactattcatgggatcaatgtttttttaagaatatttaaaagagatatgataaacatacaccccatcttggggtgtgttagatgaagggagagagatagaaagaaaaaagaaaaggttgagagaaatccataaaagtgacagatgcgataagtgatattatagaaaagat

SEQ ID NO: 15010 - DNA, 577 bp, Glycine max
  Clone ID: PAT_MRT3847_11355C.1
aattgtttaaggtccttcaatttttttccattagcctttaaacttttgtttgaccggttaaagtccctaaaattttaaaaatatcagttttaagtctctaaacaaaaatttgaatctattatttttatttatttaatgagatttcaagggataaaaactaaattttaaaaaatttagagactaaaaattttaatgaaaaaagttaaagaaccttgaccaaacaaacttttgtttaggactaaaaattaaatttcaaaaaagttgaagcaccttgattagtcaaatttttgtttaagaactaaacattgaatttcaaaagttttatgaactaaaatcttaattaaccctttttcatgcattagaatacaaaaacaaagaagcaagaaaactacattagttatgcttagtaaaacagactcctatggtatcgacaatcaacttggtttggagattaaatgagcaagtatctgatatcaaaagatgttgatcttgcatagcttctgatttagcttgccaattaacacaactattttcttctctaagggaatgacgaaagctaaaatgtcagtgtcaggat

SEQ ID NO: 15011 - DNA, 279 bp, Glycine max
  unsure (1)..(279): unsure at all n locations
  Clone ID: PAT_MRT3847_113560C.1
gtctcaccatggcctggatccctctcctgctccccctcctcattctctgcacagtctctgtggtctcctatgagctgagacattcatcctcagtggcagtgtctccngaacagacagccacgatcacctgctcaggagatgtattggcaaaaaaatatgctcgatggttccaacagaagccgggccaggcccctgtcttactaatctataaagacagtgagcggccctcaaggatccctgagcgattctccagctccagctcaaggaccacagtcacct

SEQ ID NO: 15012 - DNA, 131 bp, Glycine max
  unsure (1)..(131): unsure at all n locations
  Clone ID: PAT_MRT3847_113561C.1
gttacctcnattgnggtcntcatgaacttctncggcnacttcatgatatttacttnttgtctcngggcgcatngccaaaccccaagtgnggcanangtgtctctacatttgccattggtgcaaattctcaa

SEQ ID NO: 15013 - DNA, 269 bp, Glycine max
  Clone ID: PAT_MRT3847_113562C.1
tcgggtgtaatgggatattctaagaacttaacccaaggcctttggggtcaccggaaaaaagttttttttttattttacaatgaccttcattttcccttacctaccatatccttttaatttgaatggagagagcccttatctgaattgacggggcctacaaaaacccaaaacccgggatcttagtattgctctgccatctcaagccaagccttctttgtttcttctttaaccctaatttggcttttcccatgccggaatttcacgaattt

SEQ ID NO: 15014 - DNA, 584 bp, Glycine max
  Clone ID: PAT_MRT3847_113564C.1
gggccaaaaaaaggaaaaagaaaacattgggggagttttttaaaaaaacccccattacccacccaaaaaggaaaaatcccccccccggagggggggggaaaaccccccccccccaaattttaaacccaaagctaaactaaaaaaaaacccggacaaaatattcaggggggaaaaaaaaaaaaaaacaagcctgggacaattaccggtaaaaattttaaataaaacccggggataaaacccccgttcattcctagttaattagcaaaaaaaagggggaacctttttccttttaaaaaaatttgaagggttctgaccgggggggggcaaaaatttgcaattaggacaagcgggggaaaacttgcccaaaattaccaaaaggggggacctaaaaaaaaccggggaaaaaattttttggggaacaaccccctcggagaaaacccacaagggggcagggggagtaaaaacacacaaaacatccttttgggacttggtggattcaaccaaaaacaaatcacgttcaccaaacgcccccccactaaaaccaaaattttttttctaatttagggaaaaaccatcttcctttt

SEQ ID NO: 15015 - DNA, 161 bp, Glycine max
  Clone ID: PAT_MRT3847_113565C.1
cggatcaaacgaaactttattccacacgatgaaagcctcctaataagcaactttcaaccaaaacctcacataaatctgcaccaactactcaacagtctaacaaaccccaccataattaatctcatacctcatctcatccccagattataaaataccattat

SEQ ID NO: 15016 - DNA, 601 bp, Glycine max
  Clone ID: PAT_MRT3847_113566C.1
cccaccaagttgacaaattttttaacggggaaaaaaaaaaaaaaagatttccagaagcttattttttacagtttaagggaaggccaaaatatacctattaagggcggggcccactactactaccatttattgggaggcagcccctcacaaatgggcaatggttttaataaaccctttatgcattaaatatacttatgaggcttctttcctaaagggaaaggacatttttacaaaaaacaaaatatatgcccatttttttggggatgtcaaacctttgaacaaaagcacaccaacagcaccaatggccaaagtcaaaaccagggggacgggaacggattcagtttcacgcatttttcctgtatgggcgggtcttcccaggcgggacctttttccaaagtattcatgcaaaaaattgctcaaagggtctagttgatgcatgatttgacgttgccctcgggcaatcactaataccttttccatcaggggagactttttacccaactgaaaagatgatgatgaattaggtagcaatgatccagtcaatgaaccattgcctcgtccagttacaaagaaggaaggggggcctgagccattgcaggcc

SEQ ID NO: 15017 - DNA, 313 bp, Glycine max
  unsure (1)..(313): unsure at all n locations
  Clone ID: PAT_MRT3847_113567C.1
acctctccatccctacgtaatcctcttcatttttattccacctttcattaccctctggtcggacctttcagaatgctagcggggtgctacatttcatactcctcctcagggtttaaaaaatcctatacctattcaccctccctaattttcaagagtgtgttaacattctccacttttttctttctcagagcatctcatacggagccctcctcatatgcagacctctgtatcacattcacttgngacccttgatatacacctccttcccgactcattataaactactctgtcataaaacacccctagtatcata

SEQ ID NO: 15018 - DNA, 1079 bp, Glycine max
  Clone ID: PAT_MRT3847_113568C.1
ttctttacggctgcgagaagacgacagaagggtacggctgcgagaagacgacagaaggggaaagtgttgaatttacagtgtagtagtaaagtgagtagagaaatcgaagttgaaaagataatagatagtaacagcatcattcatcactcatcagagatggctaccgttgaaagtagaagcaaatcagtggtattggctctctccaagtacctatcattggatcctagtgttgttccagccgatacttcagacagtgatattaagagtctttacctgaacatcatagcggtatcaggacatggggttaatcactctgatgaggtgttgaagtgggtagcatttgcagaagccttccctgtggcccttgatgcatgctttgagaatctcaatagattaaatgatgaactgtctggaaaggctgtgcttctgggcaatggattgaacccctctgaagctgatgttatagtgtattcagtggttcattcttccctgatcaacctttcagatacaagcaaggagaaactgccacatgtcttgagatggatggattacatccagcacaagcaagaatttgtaggtttatttgagaaaatattgttgcagaagcctggatttgagcccccggtaacacaacctgttggagctgtggaagctgatttaaaatcaaacaagactgagcaaagcgtaaagaatgtcaacaagtccgaagtagactcaagcaaggataaaaacaaagctgagggaaaggcaacaggaggaaaatcaactggagacaaagaacccaccaaagccaaggcaaaacctgctgacaaagaagtggctgagaaagagaacgaagttagcgtcagtttgcttaatattcaagttggattaattcgcaaagcatggaagcatccatctgcagatagtttgctagttgaggagatagatgttggggaggacaaagtgcggcaggttgttagtggtttggcaaagtactgcaatcctgatgagttgacgaatcgtcgtgttgtacttataacaaatgtcaaacctggaaaactacgggatgtgatgtctcaaggattggtcttatgtgc

SEQ ID NO: 15019 - DNA, 1452 bp, Glycine max
  unsure (1)..(1452): unsure at all n locations
  Clone ID: PAT_MRT3847_113569C.1
cttctccaatgtccgattctctcaccgatcttgcgccaaatacaaattcgttacatcctaacccagggttccgacgagcatggtggacggtccgacgagtccaggcaatggtagccatgagagtggcgagcatagccctcgctctaacgtgcgcgagtaggacaggtacctccccatcgctaacataagccccatcatgaagaaggcactacctacgaatggtaaaatcgccaaggacgccaaagagactgttcaggaatgcttatccgagtttttaagatcaacctttcagacacatgtattgagatggatggattacattcagcacaagcaagaatttgtaggtttatttgagaaaatattgttgcagaagcctggatttgagcccccggtaacacatcctgctggagttgtggaagctgatttaaaatcaaacaacactgagcaaagcgtaaagaatgtcagcaagacccccggccgggttcggattcgggccatgagattgcgggtgggtgggggagggagtggaggggcaaggtttgggtttccgaagtaaactcaagcaaggataaaaacaaagctgagggaaaggcaacaggaggaaaatcaactggagacaaagaacccaccaaagccaaggcaaaacctgctgacaaagaagtggctgagaaagagaacgaagttagcgtcagtttgcttaatattcaagttggattaattcgcaaagcatggaagcatccatctgcagatagtttgctagttgaggagatagatgttggggaggacaaagtgcggcaggttgttagtggtttggcaaagtactgcaatcctgatgagttgacgaatcgtcgtgttgtacttataacaaatgtcaaacctggaaaactacgggatgtgatgtctcaaggattggtcttatgtgcttcggatgaaggtccaaccattgtggagcccttgctccctccagaaggatcacagattggggaacgtatttctttttctgggattgatggaaagccagaagatgtactaaacccaaaaaagaaacagctggataagattacaccgcatcttttcactgatgacaagggggtagccacatacaagggaataccatttatgacgtctggtggaccatgcacatcatccattcccagagcaactattaaataatggagatatggcccattcattgttcttcgccactcatagatttttggtaccacaaaatatttgaagttttgattacgttaatgagacgttactatcttgttgacaagcttatgctgcacttgcacttgcatgctctttaatgctaccaatataatcttgaatccaatgattcttgaggtaataccatagtaactttctccacattgtaaaaagaacgaaagactttaaaattatacaacctaccaaccaagggttattatgcaaaannaaaagnaaagg

SEQ ID NO: 15020 - DNA, 218 bp, Glycine max
  Clone ID: PAT_MRT3847_11356C.1
ggagccggcgctggcggtggcatccccaacgaggcgatggaggcgatgatgaacaacccgcaaatggctgctttgcgcaatgcggtgcagcagaatcctgcactgatccagcccttgatccagcagattgcgggcgccaatccgcagctggcgcagtcatcgctcagaaccccgaggcgctcctgcagctccttggcgccggtggcgaggatgacgac

SEQ ID NO: 15021 - DNA, 427 bp, Glycine max
  Clone ID: PAT_MRT3847_113570C.1
gagaacaattaggaagacagagaaatcggacaaaaacctaaacctaaaccttaccctgcaaagtgttgaatttacagtgtagtagtaaagtgagtagagaaatcgaagttgaaaagataatagatagtaacagcaccattcaatcactcatcagagatggctaccattgaaagtagaaggaaatcagtggctttggctctctccaagtacttttcattggatcctagtgttgttccagccgatagttcagacagtgatattaagagtctttacttgaacatcatggcggtttctggacatagggttaatcactctgatgaggtgttgaagtgggtagcatttgcagaagccttccctgtggcccttgatgcatgctttgagaatctcaatagattaaatgatgaactgtctgaaaagtctgtgcttc

SEQ ID NO: 15022 - DNA, 425 bp, Glycine max
  Clone ID: PAT_MRT3847_113571C.1
attaaacattcagcctgtgcgttttggaagcagagaccggattacttagagatggcccgtacaaagcaaactgctcggaagtcaactgcaggaacagctcccaagaagcagcttgcatcctaagctgcacgtaagtctgcaccagcaactgctggagtgaaaaagcctcatcgttatggatcttgaactagtgctactcgtgagactatgaaataccagaatagcactgagctcctaatcacgaagcttgctttacagaggttggttcgagaatattgccactatttcaagactgatctgcggtaacagagccatgctgagctcgcattgcaagaggctgatgaggcatgacccgtatgagctcttgaggacactaactcgtgtgccattcacgccaagcgcgtgactattatgcccaaggatat

SEQ ID NO: 15023 - DNA, 270 bp, Glycine max
  Clone ID: PAT_MRT3847_113572C.1
aattcggctcgaggaaaagcatggttgatcttgcagttgacattgacagccctgcctcttggctctatgtgatttaaaatagagagggggctggaggacaagacagaggctcatctttataaaccatggacatcacctgcctctatgagaggagctgcctgtgaaccaagctccatgcttcctgtgagcctctcacagtaaccctgcccctatcttacctcacacgtgcaagagggactctaaagagggcgtacgctatataggcacctg

SEQ ID NO: 15024 - DNA, 398 bp, Glycine max
  Clone ID: PAT_MRT3847_113573C.1
ctttttcgccaagaaacttttgcaacaacatagcattacatggtttaacttttgcaaggtggcattgaattgaaccaacgtgtgtgtgtgtgtgcgatgtgtgagagtggggcagattctgttgagaattgagatccgtgtacgcacgcattattcaccgttattcttttcaaacgggcatattctgctctgttctgggaattcaatttcaaagaaacaaagaaaaaaaacccttcctttgcgttttattgtttctttcttttctctctctgttgccaccgtctctggtggtggcacttataagaacgcgagaaacggtgcgttttggttctgaattgctgtgactgtgatagatgatgggtagttgcccttgtttcgggttgtggagctggaagacc

SEQ ID NO: 15025 - DNA, 292 bp, Glycine max
  Clone ID: PAT_MRT3847_113574C.1
ctactacttctgatcattgtcttaaaaaccttctctctcaacaatacctacaacaactacaaaaaaagagaaatttcttagaacaatgtaggcatcaaagatgaagatcttcatgcttctctactgtgctgctgggatttcaggaggtcccattaacccagctatgacatttgggctgtttttgtctagcatggtttcttttatccgaaccatcttgttcattttggctcattgcttggatgctgatctgggagttggattattttatgcttttcaaaagtcctacttcaac

SEQ ID NO: 15026 - DNA, 915 bp, Glycine max
  Clone ID: PAT_MRT3847_113575C.1
ttttcattggtgtttttggacggattgaacatggaacattcttgtcctgagggctgaggcagcgccaccaaaaacacaacattgaaccctgaataaacactcgtgcactctccgatgggttctagcgaggatccgaacaacaaagtcgattttccgtacgagtccccggcatcgcaaccctttctatcgaaaccctcgtacccttcatcgtcttcttcggctgtggaagaagaatcggagtcaaaccagcaattccatcacatcacttacaattcaggtcctcgctccttcaaggaccttcctttcctcatcctcttccttctcttcgtactttcctccttcgcctttggcatcttcgccatcatccaccgaaacaacagctacccctctctctcctccttcacctacgaccccaccaccacctcctgcgtcctaaacccttctaattcctcctcctcctcctccgtctccacgctctccctcgtcgacacaacatcatccgtttctccgaaatcggtgaagggtctcatatggactctcgtcatcaccttcgttctcaccatttccctcaactgggctttgcttgtgttactcaccctcggcaccaaacagattaactacgctgctattccactctgtatcgccatcctggtgttcgtgttcttggtgattgggatcattgtgtggatcttggtggttaattggcatcccgtccccctcgcgtaccgcatactgagggttgcttccctgtttttgttgaggaacatcattttgttcggggtcctcccttgtttgaatcttggggagctcacggtgagcataatcggcgtcgcttccctcgcgcttgcgaggttcatggcgttgttcggggtgctgccttggttgcctggtgggccggggctgtggttggttcca

SEQ ID NO: 15027 - DNA, 429 bp, Glycine max
  Clone ID: PAT_MRT3847_113576C.1
accacagaaggttatcagctgtcccactctctttagcaatgggcgaattggcgattgattagggcaacgttagtggcacatacggctgcttacaacaactgagctcctcataaatatccatcattcatatatgttaacaatatcaacacatcgtcaacctgcacacttctagagcattagcgcgactatgaagaggcgcagcatcgatccaataaccatgatatctcaaaccgtcatctaagaaaacccataggactggccaaaacacgtaaagtacttttgcccattttgacctgaacccccatactatttcactgggcaattcccaggtgactatggttctgacactgctgagctttctgctgacccacagacttttgccaaaaaccgtgaactgtaagtcatccactccagataggccatgtttgg

SEQ ID NO: 15028 - DNA, 307 bp, Glycine max
  Clone ID: PAT_MRT3847_113577C.1
tcgttgagctttgctcttccgtatcttgagtcagactcggtggagtctatcccaggagtgcgggaaattctaactgatgagctcaactcaagacatgggtggacttgcacccgagggatcacaattggatgctcgtgaatgtgattctaaaaagagtgactcattttgatctgatggacaggactggttgacatcctatgacgaggtttatgacagatcttgacgctatgggtttgtgggaaaatcttctgaagggaatattacagaaattggttggagaagggacttgccatttagctgaggggga

SEQ ID NO: 15029 - DNA, 539 bp, Glycine max
  Clone ID: PAT_MRT3847_113578C.1
ccacgcgtccgcaggcagtcaaagaaatttaatacttgtatcatccaaaaacaaaattattgaaagatcggcaaccatgagtgacagcaccaacacaaaccccccaccacctccggtggcggagccaccgccaccactgcaatccggttcaccggaaaacgacgtcgcaatgtccccccaaaactcctccgaggacccagactcctccctccccacccaaacaacacccgagcccgccgttccagactccccggactccgccacaacccgacccgacccgaatcctccgcctcgaaaacgccgccgccgcaagaaattcttcacggaactcaccaccgggccatccacgcgccgaaacgacgtcgccaaggactgtgacgtggaagccctaatcgcgatctcggtagggtttcccgtggattccttaaccgaagaagagatcgaagcgaacgtggtttccaccgtcggaggctccgagcaatccaactacatcgtcgtccgaaaccacatattggcgcgttggcgttccaacgtttcgg

SEQ ID NO: 15030 - DNA, 1513 bp, Glycine max
  Clone ID: PAT_MRT3847_113579C.1
cgggaaacgaataaactataaatgaaccaacacacttcacgccttcttcctccactggttgctggggcaaggaatttgtaccaggatcaaagctacgtatccaacctgacataaatccaaatgagaatgagagaaaacacacctagagaaacgacaagagttcagcctcctcttctatctggtcttcctgatgatcttgctattgcttgtttgattcgagtaccccggattgagcacaggaaactacatttagtttgcaagagatggcaccgccttctgtctgaagacttcttttattcactcaggaaaagtcttggaatggcagaagagtggttatacgtcatcaaagcggaccgtgctggaagaatttcagtccatgcttttgatcccatctaccaactatggcaaccccttccccctgttcctggagattttcctgaagcaatgtgggttggtagtgcggttcttagtggttgccatctatacttatttggcggagtagatctggaaggatctagatctattagacgtgttattttctacaacgcctgtacaaataaatggcatagggcaccagatatgctgcagaaacgtaatctgttccgttcgtgtgtgataaataattgtctttttgtggctggtggggaacttgaaggaattcaaatgactcgatctgctgaagtttatgaccccagccagaacaggtggagttttatctcagagatgagaacatccatggtgcctttgtttggttttgttcacaatggagtccggtttttcaagggaaatgaaattgggagtggtaattccatgtgtgaagcctattcacctgaaactgatacttggaccccagttactaatggaatggtcaatggaaggggtaatgattgtatctcactgaatggacaactctatgcattaggttgcccggatggatgcaagctcactgtatatgatagagcaacagattcatggaaaaagcttattgatagcaagcttcacgtggataaatttccatctctagtagctgttgcacctgtttcccttaatggaaagctctgcattatccgccacaatatgagcatcagtttagttgatgtttcaagtcctaaccaacaactggaaagcaatcctcaggacctttgggaaaatattgctggaaaagctcagcacattcgcaggtctttagttagaaagttatggtcaactatagcaaggcgtgatttttccaagagttgcattgtttgctgtcaggtgctacaagcctgagaacaaaatctcccctgataatattagttatgcagctaaggagactggtctctttggaaattaattgaaatatgtttatccactttcttgcaatggacatgtaggagaaattatgcttcttctttaaggttaattgtagatttttggcaatagaaccaagtctttcctatacaatcttgaataggtggcagacgttgtatatgctaaatctctctaaggccgtgcctttttcctttgttactag

SEQ ID NO: 15031 - DNA, 314 bp, Glycine max
  Clone ID: PAT_MRT3847_11357C.1
gtaagcctcctttaggtatttgcgaattcaagatttataacttgatttcgagattcttaaattgaaatcaagctcccgatacccgacttggaagcctataacctaattgcggcgcctaagggtaagggttgctttggattgaacgtccgttttggcaagaatgacattcagctaaatccccgttcgcaatttccaaacatcaagggacctcgtttgatgcagtctcagtagacgtttggatatggttcccttcaagtagatgtttatagtcgacccacagaaaaaaatcaagataaccaatcattttcttacga

SEQ ID NO: 15032 - DNA, 302 bp, Glycine max
  unsure (1)..(302): unsure at all n locations
  Clone ID: PAT_MRT3847_113580C.1
agtcgcangcacgcgtacgtaagctcggaattnggcncgagngcancacnanacagcatcagnacgaaancatactactancantctncaccanntcntcctccaaagaagnnncnatntnctatcanngccccangagctcntcgcccttancctcanngtannnntcacgntnntgnctgnnntcactgtcgtgtccatnctgngcannnnnncacatccagnccnctgatgctnccnaggtttacttcgnntnagnaggtactcanangnnntnagcgaggtacnnatntcgagcaccn

SEQ ID NO: 15033 - DNA, 252 bp, Glycine max
  Clone ID: PAT_MRT3847_113581C.1
ttaattattttcttttttgtggaaaaaagtaaagatggcctttttcatattacatgccctgaaatatacgacacaccaaccaaagcctaaatacaacgtgacacccataaaaaaagggtactatttctcaagaacctgtgcccaatagaattactggacctttaaacgcttaattgcattaacacaacaatactttggtaaccgtaactaccttagtgttccaccgcatgggcaagcttggcggcccttttt

SEQ ID NO: 15034 - DNA, 351 bp, Glycine max
  Clone ID: PAT_MRT3847_113582C.1
ggggggaaaaggcccccccaaaaaatgggccaatggggtccccccccaaaggcttttttccaaacctgttttgttgggaccggattttgggcggggggcctagtcccttttcctttccaaaaactttaaacgggtttttaaaaacttaaaacaaaccccttggggggggggggccccccatccttaaaaggttgggacgggcccccccccaggttcccaaactttttttggggggggggggggggggccccccccctgccccggttttaacctccccccccgtttttggggcccggggggaaaaacccccctttgggaaatttttttttgggggggaaattcctttaaaaa

SEQ ID NO: 15035 - DNA, 303 bp, Glycine max
  unsure (1)..(303): unsure at all n locations
  Clone ID: PAT_MRT3847_113583C.1
ttaaacggctagtatacacaaannctgctcggtaaattgtgcagggagtcctctcaaatttcttatntaacctgaaaccaacatcttatctaacaataactgcacctatttgtaaagaaatgcttatcccaaattattctaatgccaccatcatcatgtttccaaccttaactcctattgccccatttcattcatttttataaaaaatattcttcttcaaacactaatattacaatttcacttatttatcataactcttttttgatgtacctacaaccaccttattactatataatgaaaaat

SEQ ID NO: 15036 - DNA, 114 bp, Glycine max
  Clone ID: PAT_MRT3847_113584C.1
tggggtctcgtggaagtgtaatcaatcaaagccctagctgcacctgctttctgtgttggtgttatacatcaagatggattctcatgttaaacactcacttattttcaaaattat

SEQ ID NO: 15037 - DNA, 463 bp, Glycine max
  Clone ID: PAT_MRT3847_113585C.1
ggccagagtttttcacattttttttttaaaaaattaaaattgtggcgaaaccaagatcctgatcgcaatttaaaattttggccaagcaaaattagttagaagcctgaaattctgaaaagagacaaagaatttaattaatggtaaaaagcgaatttaattaaaatctcctaaccgtgtaaattttttttttccttaccgtatcatctaataataatttatcgtgtatattaaaattatcgactcttgtactaattactagtcatatctagattgatgtctaatgagttggtaatgtataaatcttaatagttaccattataaaaatgaaactctagaaaatatataaaataaaattgatgtatatttggctttggttgacagtttctaaaaattctactcatgagtctaaatggtaatccaacaagctatggcaaaaaaaaaaaaaaaaaactcgagactagtt

SEQ ID NO: 15038 - DNA, 537 bp, Glycine max
  unsure (1)..(537): unsure at all n locations
  Clone ID: PAT_MRT3847_113586C.1
tggggcannnanagaaagggatcagtanncntagtcgnannncacctgaannaattaccggggcgacgacgctactaggcggcggccgccctgtgtttttttttttgtttttttggggtttttttttttttgggcagaacataacgggtttcggtatgggatgtttttttaaagtataaaccacaaacacattttgccttagactacgggaacctttgagatccatatctggtggggaccactagggaggcccatgcgcgaaagctcaaagaaactattctggacggggtaacacttaaccctttttattgggacagagggcccacacttaagaacaaaatattggctatttttttaaggccaaaagaaaaaaagaatttcctgattacccacttaaaaacgcgttcccttgttcatagataggaaaatatcggccactaagtggagggaataacatattataacttttttcttaatccatcacccaaaagggtggagaagaaaagtgtggctgaacccatgagggtgggaaaggca

SEQ ID NO: 15039 - DNA, 526 bp, Glycine max
  Clone ID: PAT_MRT3847_113587C.1
tttttgaaagattccggtgtgtattatcgatagaattatggaaaccgtttaacctctaatttgcttaccacgtgttgacacatggttcttttagaatattttattactatgcactttttctctccttcgcggatccatactccactgtttcgatctttttcttccaattgtttatgctaaacaagaaattgtatcctgatctaagaccaccacgttggccgtggtcccgcccattaaaaggaagacacgtgtcctatagggaagtcctcactaacggagctgtaacaacgtttaatacgaaaatctgaaatttaaaaaacaagattatcattaacagcagattacgtttcatattaattggaaacgatcaatatccaacaacaaataactgccaaatcatactaacaaattttgcacaaatcggctcaaagaggttcaatcttgccgacattcttctgggcatggttggtggactgaagagatcctgttgttacattctttaatgttcaatcacatgaacattttt

SEQ ID NO: 15040 - DNA, 721 bp, Glycine max
  Clone ID: PAT_MRT3847_113588C.1
atgctggcagcttgaaatactatcctactagtaatggagcgggatatagaaatcatatcccaaaatttcacaagtccagatatgatacgcctggtagcaggcatcaccttcttgctggccctatgaggcaagggactgaacaattggatacttcagtccttgaggagttaagactacgtgatgctgtggctgagcctcgttttaaacgccatgtggcaaagttgaagagagatagggctaagagattgttatataaagcagatgtagtaattcacaaggccatgagtgctttaatgactgcagaagcaatgaaagcttttgaggggactcccttggtgaaatgaaagcttttgaggactaatctggtaattcacatggcctttggtttacttggtcaagagttgtggccttattttcattatccagggtgttcaataatgagagttgggttcagtgaggggaggagattttattgctgcatactgcaactcccctctccctgtctagtgtcttctggaaccttttccagctttgggatctgctcagttcagagtaactgtagcactgatctgcatggtgtataggtctatgaatttttgactacctatatttgtacaaattccctaccccatctcagtttcaaacattcaatatgaaaatagaaatcggccaataatacaacaccattttgagtaggagagggaggggggggggggggagg

SEQ ID NO: 15041 - DNA, 786 bp, Glycine max
  Clone ID: PAT_MRT3847_113589C.1
tagcacctgatgatcagactttacctctctgctggcacggtaaaagaccaattcggctcgagctcgagccgctcgagccgattcggctcgagggaattaagtggaaagcccttaaaagtagcacctgatgatcagactttacctctctgctggcacggtaaaagacctttcacaagcctacgtgaagtcaggaaatacttcaagcctgtggcacttggtttcaccaatggtggaagaactaaagcccaatttgagatccttcctgaagcttatctgataatatctaacctgggaaatgtttgtctgggcattctaaatggctctgaagtagggttggaggaactgaatctaattggagacatatccatgcaagacaaagtgatggtgtttgaaaatgagaagcagttgattggttggggacctgcagattgcagccgtattccaaaatccggagatgtcagtatttgatcataaaatatgcatagttcaggcatgcataaggacggtatcattatgcatgttgtcctgcagtttatagagcagggtgatagtactattgaataccaatttatgtttacttgtgatttgtgaatacagtcttgtgtatactactattactatatcagtatattggaacaggtatagaggtccatcaagataaggataaagggtatttattgttgtattggtgttacattctaattaccgagttgtgattcaaagggtaaagtcaatgtaagttgatgcagtattggatatacatcaaatattctgtatttagctggc

SEQ ID NO: 15042 - DNA, 199 bp, Glycine max
  Clone ID: PAT_MRT3847_11358C.1
gcttcgcttccggtgccgcttgggctttggtctgcgctaagaatagtcagtctgtgggtggagcaacgcatgaaagtgacaccattggctccgcagcccgtgattcagggaactacggtggcacagatggtacgacaatgccatttaatacagacgcctcgtcggatgaaggaagtgctcgttattacaatgggtgccg

SEQ ID NO: 15043 - DNA, 413 bp, Glycine max
  Clone ID: PAT_MRT3847_113590C.1
acggctgcgagaagacgacagaagaggagtgtaggagtggctcttggtttgcacttgggtggtacctttctctctactacttgtgttgtgttgtgtgtgtgggggttcagttcagcctttgattccgatggatcttcacggaaacccccacaattctgggatgaagaaacgaaagccggagcaggatactttgatcagtgatcatggaaattctgtgagtgtgggagagtcatctgggagtggtgatctctgcaagagttctacctcaggatcactgaattcaaacaatcaaaatggttccaattctgatatttcatgtcatgatgatgaggatatgattgatgatgatgcagatatgattgacgatgacggagatgaagatgctgattatgcttttgattacaatgaagatg

SEQ ID NO: 15044 - DNA, 722 bp, Glycine max
  Clone ID: PAT_MRT3847_113591C.1
caaaggtataaaagtaacaggagtgggttttaagggggtgtacaattttattggttttcagtgtgggtattaatgaaacaactattaaattatgacaaatagcaaactaaagacaatttttttctccaaaatccaatacatgccttcttgaaagataaggtaaaacaaatgtgtatcatattgttttcaacgaatcaaaggtcactaaacagaatatatcaaaataaaaaggccactaaacagagaaagtatagattaatattcttcaacagaggggcatatctggcggtggtggtggtaacgtttcatttgaagcctttccattcttcacaataaacaccgtctccatgccccaaacttggtggcgttccagatggcagtgcatgaaccatactccagggttggtagccacaaacctaacagcagcccaaccatttacaggcacaatcactgtattcaaataaggaggatccacgagattgaaattcttggggtccttgctttggttgaaattgcctaacccatatccaacaacatggaaactgaatccatggagatgcataggatggtctatccctgcaataacgtttgtcccttggaatacaatttcaaccgttgcaccataattcagtacattaaccctagtcccttgctttggtatattcaatggtataggcaaaaatccccagtgaagttaaatataaggggtggaaatctaggaa

SEQ ID NO: 15045 - DNA, 159 bp, Glycine max
  unsure (1)..(159): unsure at all n locations
  Clone ID: PAT_MRT3847_113592C.1
agtttttgatactatgaaaaaaangtacttttnacaggaganatttatgtggaaaaaantagtttcgnntatnatgctgaagaaaanttngtaatannngaannctctagacaatataagagaaatttctcnggggaaaagtacgtttttgatacnatg

SEQ ID NO: 15046 - DNA, 227 bp, Glycine max
  Clone ID: PAT_MRT3847_113593C.1
aagcatatatttaacgattgacttaattgcatgaataacacgggcatcaagtccaacatgtgtacattataaggcctaattataaccatatacgatattaaacaatgacaataacaaagcccatcattgaaaggcttatcttaaagaacacagactaaaggatcactgtttaacaccactttcaacaccaaccaactatttagattctactactgattgcagctcaa

SEQ ID NO: 15047 - DNA, 351 bp, Glycine max
  Clone ID: PAT_MRT3847_113594C.1
ggctcgagattctttcttcccatggtttctttggcgaacatagtgtgtagatataaaaagacccaggtggcccgtatctttactttttgccacaaacaatttctttacgacataagatgctcaaatgactaaaacttatagattgaacatatgcacctgcttttatagaattaccacgctcctcccagttcaaaatgatacgatacgaagactaccacgaacgattatttacttaacctatcacagggacaggctccgcaataccttaagcactgagataggaattgaacatcaataaacctgattagaagaagggttgacatgcacctgctcatacaatgtggagatttc

SEQ ID NO: 15048 - DNA, 657 bp, Glycine max
  Clone ID: PAT_MRT3847_113595C.1
cacgtgaagaatcttttcgtattgagtattttttatacatattaaatcaatcaattaattctattgagacacgatttgaacaatttttataatatgagactattttttgttttttatttgattccaaaaaaattaaagctttagatgaggatgaattgaaaaaatattgtattaatcttaaaaagtttttaaggtttaatgaatactctgatattgatgatcttgatttattttcaaaattgaaagtactaagagaagttttaagaaaagaaattagcacatcaatagaagtattgagttatattaaaactttagatttttttccaaatgtttacattgcatatataattttattgacaatccctgtaacaattgctactgctgagagaagtttttcaaaattaaaattgtttaaatcatatctaaaatcaacaatgttacaagatagattgaatgaattagctattttatctattgaaagtgaagtgttagaattgcttgattataaaactttgataaatgatcttgcagctaaaaaagctagaagattaatataaaaattgatattttatataatatactaagtctctttaaaattcttgtaaaaaaaaagactcattaaacattttcgccttaggccccaaaatgtctgtacac

SEQ ID NO: 15049 - DNA, 385 bp, Glycine max
  Clone ID: PAT_MRT3847_113596C.1
atcaaaatggccgctgctgcatctgcaacatactgcagcattctctaaagatgggaatctgcatggatggcgctggtgccgaattggactacttgggagcgtgtgacagacacgatcgactgctgcctgagaaagtgactgtggaaggtgacaagactgccatggttgcttgtggctgacgacacacaatactggtagcatctctcggaggatgatgcacaaagggagactgcctatacgggcagtttgtacatgcaagatttcgaggatcactttctgccttctcagggttcaagccaccgacgataaactcatttcacactcatcaactatgtggaggcatacattggtgctcacgtttagagaaccacttctgtgcttagga

SEQ ID NO: 15050 - DNA, 680 bp, Glycine max
  unsure (1)..(680): unsure at all n locations
  Clone ID: PAT_MRT3847_113597C.1
ggaaaatgagtgttgatgccatacctttaaagtcttctggtaaacctagccttcaaacgtttatggttgttgtggagaaggagctgtctactttagtgcatcagattacatcattgctccataattcttcacttcatagtaattcaaaacaggtagaatatctgggctatttctactttttgttcagttctcatgggcataagagttttcttataataaggatctatggatgattaatgctacatttgttattgttagtgatatagatagtattactgtagggtgttaaatgttatggttgtagagaaggggtagtttttaaagttatgaagtactaatgcctatttgtatagagaatcaggtcttattatcttctgtttatgttctccccccccccnnnnnnnnnntnnttnntttcccctttcccccctctctccccccttttcctttttcccctttttcccctttccccccttttttccccccttcccccctccctccccttttcccccctttctctttcccccccttttccccctttttcctcccctttcctcccctccttttccttccccctttttccccccccttttcccccntttttccccccttttcctctccccttttcttccttttcccctttttgctcccttccccttttttttccttcccttttcgtt

SEQ ID NO: 15051 - DNA, 313 bp, Glycine max
  unsure (1)..(313): unsure at all n locations
  Clone ID: PAT_MRT3847_113598C.1
tttattgtttgtatgtaaatnttattagttttgngngtnatgnanatttatntttntnttagttnattttatatatntttnttttaaattgttttgtttgttanttanntttttttatttggtatatnatatnatgttatanttattnttttatnatatttttnnngnnatatagnnntnnttgataannntatntatgantttttnngnttgaaaagttttntnatnagtaagaatngangttnnagtnnnnagannaaatagatanaanattttnatttgaggntangatanagttntaaagattttaaaa

SEQ ID NO: 15052 - DNA, 348 bp, Glycine max
  Clone ID: PAT_MRT3847_113599C.1
agcgattagcccccgggaaagtaaaaggcacaggcatacatactactggtttactagttaaaacaaattaatttttttttcccgaaaaattttgattaaaaaaaaaatgaagtggtttccccaaatggagaagggggaattcagctggtccaactggtgcccacaaatgcaataatacatacgggccttaccttattagaattataaaaaatcaaattaccccccccccgctttttccccactatataaacaagggtttttttttttagaagggttcatgaattttgaggtggaataaaccgaaagcggtggctaagggaaaaaatttttccgggcccccctcccttc

SEQ ID NO: 15053 - DNA, 442 bp, Glycine max
  Clone ID: PAT_MRT3847_11359C.1
tgaatattggatagagtggaagacacccctaactggatatcccacaatactatactaggcatttgtcatgaaatttgccagttttaacaagagagaaagctttaatctgctgttggaagttagttttggtaaccttgcttgcttccactctgaccgcataaacagttttgttcacttgtttcagtgtgttcctgataaacacaaatttttctgataatgtgcctgaaatcaaagttagtttctaggtttcttttataatgtataacttgcataatacacggatatgctggatgtctgattgattagtgtcgttaaattaagtggcaattatgtctttggagaacattggtgtcctattctgctagagcaatattttaattttgatgtcttcatcttaagaggccatgtttcactagtatactaatctgcctatactaagagc

SEQ ID NO: 15054 - DNA, 301 bp, Glycine max
  Clone ID: PAT_MRT3847_1135C.1
tcaatcgcaactgtcgctcgacgctcacaaaccggtaccgtagctcccaacacgtgttcaccggcacggatcgcgtcatgacgggaggagggtccagctgcgaatctaagacagccgggtatcctgctgctgtgatgacaaacggagccgccaccactgcgacgtaagcccccggcaaagggaaagcagcgaaagaacctaacaagcgaacgaggcgtctaagtgctttcttcgctttcatggaagatttcaggactgtattcaagatacaacatccctgaatacaaggcagtgtctgctg

SEQ ID NO: 15055 - DNA, 250 bp, Glycine max
  unsure (1)..(250): unsure at all n locations
  Clone ID: PAT_MRT3847_113600C.1
cgnntctcttcgttccttcgattcgttccatttcttccaaaatggccaaagacccagttcgngnttctccgtcactggagctgcaggggaaattgggtangctcttgtccctatgattgcnangggngtgatgttgggncctgaccagcccgtgatnctccacatgcttgacattcctccggcagcagagtcattgaatggggttnaaatggaattngtggatncngcattccctcttcttaaagtgttg

SEQ ID NO: 15056 - DNA, 616 bp, Glycine max
  Clone ID: PAT_MRT3847_113601C.1
ggaagaaaatagaatttatttattgattgattgtatctctacaaggaattccctggaaatttgagagatacaggcctctctcaagtcccaattatatgtcaccaaacgactagatatcactccctctcaatccctcttatttaaaggcagcatgccttatttcttcaaccgactgacctactaactatccaactaactcacttaactaactactaatgactctccctgaccatacaccttatccataatacaaaataaataaataaataaaagttgggctgtttacatacaaagttgtcatattgtcgtctgccactttatttgatgatatgggtctagtgatttgattccagctaagatcttggttccattgcataccaattgaagcattccaaatttgatagtaaagatatactccacacagtctatacggctcagaatttttgtatatgtcgtgaaaatcaagacttccaacatccaagtagttgggttgtagccatctttgattttagtaaccccttcaatgctcaggccaatggaaaagaatgacaaaaaaagcaaatgcaaacaaaaatcatggctgtctacttgaaataatattggacttaagttgcat

SEQ ID NO: 15057 - DNA, 377 bp, Glycine max
  Clone ID: PAT_MRT3847_113602C.1
actaaaacggaagtcccggccaaaaaagacccggcccaaatttaatggataaaaccgttttaggggccacgatttttgaacgcagggtaccaagggaatacctatatcccaaaaacccccatgtcaaaaaggaaacaaaggcaaacggaacttatttcagccagctgtaactggctcgttcaataaaacggccccgtggatccacccggaaattggggacccggaccatcaaggcccccaactttcccaaaagggaggcgtattaaaagtgggggcaataaggggcatggctagaccctggggaaaaagggtacccgctaaaaattgcacacaaaaaaaaaaccggaaacataaagagtaaaacccggggggccaaa

SEQ ID NO: 15058 - DNA, 912 bp, Glycine max
  Clone ID: PAT_MRT3847_113603C.1
ttcggctcgagctttcgtgtttcatacaacttttgtttaatgccaaaagtctttggtgtttaatgagcaccatgaaattaagattgttttggaagaagaaaaaacaattggtattttgcagacactaaaacgagggacagagatgttaaacttgaaatcctcttcatcccacttgctactcctctttctcttcaccttggtgaccattgcaagtgaagcagcagctcctatatacagcgcacatgcctgcacagatgatggaccattttaccaacccaacacaacataccaaaccaacttgaagctcctcctctcttccctcgtctccaacgccaccctccaccagggcttcttcctcaccaacatctccctcggaaaccccgatgaggtcaagggactcttcctctgccgcggtgacgtcaccccctccgtctgtcacgactgcgtcgccgccgcggcaaccaacatcacagacctctgcaccaaccaaacagagtccgtgatctggtatgaccagtgtatgttgcgctactccaacctttccttcctcaacaacatagtccctggagttaacttgaattccgaacagaacgtctctgactccaacaataccggcttcatcaattttcttgcgtccacgttgaatggtctggcacaggaagccgtgaattctctttccgggaagaagtttgctacaaaagaagcgaatttcacgagctcgatgaaggtctacaccttggcgcagtgcaggcctgatttgtccacctttgactgtaacatgtgcttcacaagtgccataagtaacctcggtgatggcaaacgaggtgcacgatctctgcttccgagttgtaatgtcagatatgaattgtaccctttttacaatgtttccgcagtgtcctctcacccagcccc

SEQ ID NO: 15059 - DNA, 543 bp, Glycine max
  Clone ID: PAT_MRT3847_113604C.1
ggatccgacgggtcacattgacccggtacgtttctcaactggttcccaaaacgcgttggcacccacacgacggcgcagcctccattgccggtggcgacgaacgtttaatttggccagcctcctcttggaatcgcgacggtgacgcactgagaccagtggcgtcgatcctatggcctcaaagctgcttttgcagagaaggctctttaggtttctgcaactgtcaccaccttttttttcttccattcatgcagccccaacaatcctttctgcaaaagcttcagaattcatgtttctctacaatgtgaatgcccttcttcctcctctctctccttctagaaacttctgctctcgcagttttaaccttcatgaatctcaaggccccctgactattgattacagttctctactgcactaccttgaatttcatagactgtattcttatacaatacatagcctacaagagaaattagaggactatggagactcagttgaagttgatggatttgacatagattatgggaatgatgttttgactataaaact

SEQ ID NO: 15060 - DNA, 199 bp, Glycine max
  Clone ID: PAT_MRT3847_113605C.1
tagaggcttaactgccaccatgttttctgtgcaattactagacagtcaacatctggttagcttgtctaactttggtagagtgatggatgtctgtggtaaattgaagacaagacatgagtttccctcagaggagtttggtgaatacctgaagctgatgcagcatatgtatggtggaaaggaattatggactagcaaggac

SEQ ID NO: 15061 - DNA, 703 bp, Glycine max
  unsure (1)..(703): unsure at all n locations
  Clone ID: PAT_MRT3847_113606C.1
tttgttcctctgagtagtgatggctagcctcaagtttgcatgcgtagttgcggtgatatgcatggttgtggtgatcactgcacccatgacaaatgccatcacgtgcggggaagtagccagatccctatctccatgcatcaattaccttcggagccgccgcggcggatcaccggaggcggaatgctgcagaggagtcacgagcctcaaccgcgccgccagtaacaccgccgaccgacgcaccgcgtgcaattgcctgaaatccgttgccgcttctatttctggtttaaatgccaacaacgcagcttcactccccgggagatgtagagtcagggtgccctacaggatcagcacctccaccaactgcaacaggatcaggtaatgaatcgtgcatggatccggggaggaagaaatggaagggaaatttttcaatagcacaatactatatatcattttgtcattgtagagttataattaataaatcaaagggcgatgactggtgactacacttatgcgactgtcatcttggtatcagcgtgtgtagtcgtttcagactttgttctagatatgttaatgttnggtgtgttcactgaaatttgtctgtttgttggtgcatgtaataaagacaaatgtaataaattccttgctactttactttaatttttgcagtttgctttttataacagaatattgcagtttcctttgt

SEQ ID NO: 15062 - DNA, 961 bp, Glycine max
  Clone ID: PAT_MRT3847_113607C.1
tacggctgcgagaagacgacagatggggacaccttgttttccattatcttcaattcttcttctcatcatttcttttcacacaaaaaggtaccatggaagggagaatgggactgttgtttcttgttgtattaggtgctgcttgggcatgtgatgcaagggaactggctaactctgaaacttctgaactaagcataaaaccggatgtgtgtgcactttgtgaggaatatattaccaaggcacttgattatctacatgaaaacaagactgagacagagatcattagtatcctgcacaacacttgccaccagcttccttctttcaagcagaagtgcgttgctttggtggactattatgttcctcttttcttctcggaagtagctacaattcagcctggagaattctgccacaaagtcaatctctgtcaggacattgcacatatttccttgaaagttcaagaagatagctgtgagttttgcaaagatactgtttcaactctattggagaagttgaaggagagtgacactaagctagagataattgagacattactgaaggtgtgcaattcagtggagaagtatgcaaataagtgcaagagaatggttttcgagtatggacccttgatttttgaccatgcagagaaaatcctagagacgacagatatatgcaatataatacatgcctgcaaatcttcagatgtagctggacagcaagcctttctttcggtctcttaattatagaaacaaagctctaccagatttatgcttcacttgttggctgaaagattgccatatattcaaatataataagggggagggggagtacaaattcgatacgttatcagcgcaaaatttttaatactatctaaatttctaattatgtgtcagcacatcattaaaaaagttgaacctcccggaagaagggcctgtgatactcatgcttgtttaattattttccaatgcat

SEQ ID NO: 15063 - DNA, 468 bp, Glycine max
  Clone ID: PAT_MRT3847_113608C.1
gtttccgtcatcactgtatgacgtcctccttctttgggggggggggggggggggaaaaaaacgtaaattgcgaaagagaagatggccgggaggaaccttaaccaaaccggggatttgtctgaaaattaacgatgattagtttgggtaataagtaaagaaaataaaggtaaaattccattgcgttaatgcgaaggcgataaaactaatggttaggaagtttaatataccctaagccttacacccggttagactagaagcgaaaagactatataaaacccgatagtaaagagtatgtagttctatgactgcaggagaaccaaggtgcgtagtttgtttacgcgcgtgtgttaagaacgtatgggcgatgacggttggcatagtttctcgtcaaaacaatagtttacaggagccacaaggaggtgtagagttgtaatttgcagcgatttaatatgaggatcagtcaaaaat

SEQ ID NO: 15064 - DNA, 974 bp, Glycine max
  Clone ID: PAT_MRT3847_113609C.1
gaccaacgcgtcagacgacagaaggggaccttgcttccattatcttcaattcttcttctcatcacttctttttccacaaaaaagaaaccatggaagggagaacgggactcttgtttcttgttgtattaggtgctgcttgggcatgtgattcaagggaactgactaactctggtacttccgaactaagcataaagccggatgtgtgtgcactttgtgaggaatatattaccaaggcacttgattatctatatgaaaacaagaccgagacagagatcattaatatcctgcacaacacttgccaccagcttccctctttcaagcagaagtgcgttgctttggtggacttttatgctcctcttttcttctctgaagtagctacaattcagcctggagaattctgccacaaggtcaatctctgtcagaaaattgcatatattgccttgaaagttcaagatgatagctgtgagttttgccaagatactgtttcaactctattggaaaagttgaaggagagtgatactaagctagagataattgagacgttactaaaggtgtgcaattcagtggagaagtatgcaaataagtgcaagagaatggttttcgagtatggacacttgatttttgaccatgcagagaaaatcctagagacgacagatatatgcactatgatacatgcctgcagatcttcagatgtagctggacagcaagcatttctttcagtcttttaattatagagacaaagctctaccagatttatgcttcacttgttggctgaaaaagattgccatatattcaatgtaataagggggagggagagtacaaattcaatatattatcagtgtaaaattcttaatactatctaagtttctaattatgtgtcagcacaccattaaaaaggttgaaactttctacgtagtggctgtgatactcatgcttgtttaattatatgacaatacataattggatgttaacat

SEQ ID NO: 15065 - DNA, 470 bp, Glycine max
  Clone ID: PAT_MRT3847_11360C.1
cgaacccactttcatgcaagaagaagaaaagtgaaaaacaaaatattggccctttgaaggtagggttagcaaaatttatatgttttttcaattggagcatgtataactcgtacctggcttgtaaactttggatttaattttgattcaccatctgggtaaagtttccatcataattgtgaaatcattaaatgagtttgattcgtgtttgtatcacaaccattcagattaaaaccatactttgactcattttacctagtttttttttacacttgaatcttgattaatcctgaagttcagattacagcttcttggctatataatgtattttttaaatacaaaatgctaatattctagatgtttctaatatacaccacatgtgaactatatacttcatgctatttttttctattgatcatgtaacttacaactgaccgtttgatgaccatacatgcataaaacaagaaaacttt

SEQ ID NO: 15066 - DNA, 836 bp, Glycine max
  Clone ID: PAT_MRT3847_113610C.1
gctagtttccttggcggcccaatcggcctgagggtcggttatgaggttgaaatcttgcgccccagctgcatccgaggctaaaagctagaaactttatctgtcttcgttggcgatgtgctatggatagacaagaaaatttgttagcatcctccatgcccagccagctgttatcaattgataaggaactatggcaaatggctgaagagagggcacaagagatactatggacaattgaaccaattgtattatctgaggtgaacagaaaagatgttattgattatgttcagaggctgatcagaggttactatggagcagaggtcttgccatttggttctgttccactaaaaacctatcttcctgatggagatattacttgacagctctcagtcatgaagatgcagaggaggatttggcacaagcagtatgctatgtacttcaaagtggagatgaccctgagtaccaagtaaaagacataaaatatattcgtgcacaggtccggcttgtgaaatgtacagtgaaaaacatagcagttgacatctctttcaatcagatggctggaatatgtactctacgctttttggagcaggtcgaccaacttgttggaaagaaccatattttcaaacgtagtattatcttaatcaaagcttggtgctattatgagagtcgacttcttggtggacaccatggcttgttatcaacatatgcggtagaaatattagtcttgtatattatcaatcgttttcattcatcagtgcgtggtcctctagaggtgttatacatatttttggactactatggctcatttgattgggaccataattatgttagtatatggg

SEQ ID NO: 15067 - DNA, 5299 bp, Glycine max
  Clone ID: PAT_MRT3847_113611C.1
gggtcgaggctctttctgatctctctccccctctctctaacaataaccctcgctgtcgctggttccaatacggctgcgagaagacgacagaagggggtctcgagcaagggcaacacagcaatagcttctggtgatctcgttttctcacattgctctcttccccctttctctctcctctttctctctcttccattgcttctccataagcaacgccacgcgaggtcaatttcgcaatcgccatgactgtgatgactcctgctcccattgaccagcagcaggaggacgaggagatgcttgtcccgcacacggatttggctgagaataatcaccaacccatggaagttgtggctcaacctgatgctgccaacactgtggagagtcagcctgtcgaggatccttcgacgtcaaggttcacatggaaaattgaaaacttttctaggatgaatacaaagaagctctattcagaaatatttgttgttggtggttataaatggcgtgtacttattttcccaaaagggaacaacgtggactatttgtccatgtatttggatgttgcagattcagctagtttgccctatggctggagtagatatgcacagtttagcttggcagtcgttaatcaaatccataataaatactctgtgagaaaagacacacagcaccaattcaatgcgcgggaaagtgattggggtttcacgtctttcatgccacttggtgaattgtatgatcctagtagagggtatcttgtgaatgatactcttgtagttgaagctgaggttcttgttcgtaggattgttgattactggacttatgattcaaagaaggagactggctatgttggacttaagaaccaaggagctacatgttatatgaattctctactccaaactttgtaccatattccttattttcgaaaggctgtgtaccatatgccaacaactgagaatgatatgccctctggaagcatccctttggctttgcaaagtttattctacaagcttcaatacagtgacaccagtgttgcaacaaaggagctgacaaagtcttttggatgggatacatatgattctttcatgcagcatgatgttcaagaactaaatcgggttctttgtgaaaaacttgaagacaagatgaagggaactgttgttgagggaactatacagaagttatttgaagggcatcatatgaactatatcgaatgcatcaatgtggactataaatcaactagaaaggagtcattttatgaccttcagcttgatgtgaaaggctgtcctgatgtttatgcttcctttgacaagtatgttgaagttgaaagtcttgagggggataacaaatatcatgcggaacaatatggtttgcaggatgctaagaaaggtgtcctatttattgattttcctcctgtccttcaactccaactgaaaagatttgaatatgactttatgcgggatactatggttaagattaatgaccgttatgagtttcccttacaacttgatcttgatcgtgaggatgggaaatatctatcacctgatgctgataggagtgtccgcaatctttacacacttcacagtgttttggttcacagtggaggtgtgcatggtggacattattatgcttttatcaggccaaccctctctgaacagtggtacaaatttgatgatgagaggcagatgcaaaatgaagacaaatggggggggtctcacctttcaacaaatccatatgttgatctcgttttcttacctcactttcttctctctccccttctcctctttattttttctctcttctattgcttctacatgcaacacggcgcgaggtcaaatttcgcaaaccccatggactgtgaggactcttccccccttggacatcaaggggaagacggagaaattcttgttcccgacaacggattgagttgatacaaataccaaactcaggaagttgtggcccaatgagaaagctccaacacttgggtaactgtgctctggttaaaagttgtttggcactggagctccgatattattttggtaactggccaccgctctataaacagaagcactatatataactattagtcgctggcaagatatattaataaaagagcatttgtggagtaataaggcagtgaggaagagttaccacagaaaaatcctggatcagactcaggttaaatcaaaggtcacctgatgacccataaatagttttgctggttatttacgaatcaaagtcataacaaaatctcagggaggaaagtctcaacaagaaagtaacatttcgaacaagccagctggaagatggagatatcatatgctttcagaaggcttcctctatggacagtcaggaaaatgcccggtatccagacgtgccctcatatttagaatatgtgcacaatcgcctggtggttcactttttttctcctggtagaccgtggcaaggtgaggttttcctggcgacgacaaggcttttcacttaagattatgtggtgaagagagtactaaagagtttggcttagcaggtcaattccagagcttttggcactgggcaaagcggcaacaccatacagcccaaacccgaccctattaaatacccaggacaagaacacttttatgttctgtaaggtcataacaatcagacgtaggatatattttactatgaagtacttgacatccctctaccagaattacaagggttgaaaactctaaaagttgcattgcagcatgaaaacaacgaaagggaacttttgttgagggaccgtctacaaaagctatttgaatggcatcggatgacctatatggaatgcatcaatgtgtactataaatcaactagaaaggagtcattttatgacctttagcttgatgtgaagggctgtcctgatgtttatgcttcctttgtgaagtatgttgaagttgtaaatcttgaagaggataacaaatatcatgaggaacaaaatggattataggaggatattaagggtgttgagtgtcctattgatcttcaaacatttcgaacaagccagctggaagatggagatatcatatgctttcagaaggcttcttctatggacaaggtgaaactcttgaggaaaataaagcccggtatccagaagtgccctcatattttgaatatgtgcacaatcgccaggtggttcactttcgatctctggatagaccgaaggaagatgactttttcctggagatgtcaaggctttttacatatgatgatgtggtggagagagcccaacaacttggtctggatgatccatccaaaatactacaccacacaactgctactctcaacaaccaaaaccccagcctattaaataccgaggggtagaacatttgtctgatatgttagttcattacaatcagacatcggatatactatactatgaagtacttgacatccctctaccagaattacaagggttgaaaactctgaaagtcgcatttcatcatgccactaaggatgaagtggttattcatactattcgactcccaaagcagagcattgttggggatgtccttgatgatcttaaaacaaaggtagagttatctgatcctgaagctgagcttaggttgcttgaagttttctatcacaagatatacaaggtcttccctcccaatgaaaagattgaaagcattaatgatcaatactggacattacgagcagaggagattccagaagaagagaaaaatcttggtcctcatgatcgtctaattcatgtgtatcatttcaataaagacgcagctcagaaccaaatgcaaattcaaaactttggggaacctttttttctggtcatacatgaaggggagactttggctgaaattaaagtaagaatacaaaagaaacttcaagttcctgatgatgaatttgtcaagtggaaatttgcctttttttcattagggcgtcctgaataccttcaggattctgacattgtatccagtcgttttcagaggagagatgtttatggtgcttgggagcaatatcttggcttggagcatactgacaatgctcctaaaagatcatatgctgttaaccagaatcgccacactttcgagaagccagtaaagatttataattaggaaactggtattgatgagttctcgtcttgcgtgggatgaatttggcatattctgctacatctatgggcttttgtaaaaacagggaaaatagcgaaaggctactctgtataggccataattagtgagatcagcaatccaggtggtttctgcaggttttatattagaattgtggtatgtaattctttctgtcaacggatctcaacactgtctgccgaccacagcccgttgagctttactacttccaactttgtgtggaagttgttcaagttggggtcattgatcatcatcactgtactgtaccagtacataagatttttggattagtgagtgtatacagggtatagttggttgactttttttttttttgttcatcttgattgcttccagattttgttcagtcagtagtgttaatttaagtgagggctgcaaaatggtgtagcagagttaatgtaatgttgtaaaagagactcgctagcctcggtataaccctttagcataaaaatatagtttcctgccgcaccatttgctccatttcatttggctttttttttttgttgagttttttctgtttcgaccttttagaaaataaaattaaggtgtttgggttaaaaaaaaaaaaaaaaaaaatgtatttatgtaccttttggcctgtgtccgtgccattcactatttgtgactatctttttttttggtcaagaaaagataagtatatatatatatatatatatatgaaaagaatccaagtaccagaggtaccatgataacaataatatccagtggaatggttcccaagacagactacacagcagtccttgagggaaccaaactggaaaacatattgatatagttaccactaaactatgatttctgccctcaactaagaacaaaagcatctttaaggttagatgaccattggttgtaatgatttctgccctcaactatttgtgaatatctaattggtactcaggtacaaatttgatgatgagagggtgtcaaaagaagataataaaagagcattagaggagcagtatggtggtgaggaagagttaccacagacaaatcccggattcaataacaccccatttaagttcaccaaatactcaaatgcttatatgctggtgtatatacgtgaaagtgacaaggacaaaatcatatgcaatgtggatgagaaagacattgcagcacatttaagggagaggttgaagaaagatcaagaagag

SEQ ID NO: 15068 - DNA, 427 bp, Glycine max
  Clone ID: PAT_MRT3847_113612C.1
gaataaatgtgcatgattcatttgatcctaatggcgttcatgccacaggaatggaacgattcttccaaccttgagtggatctcatctgataccctggcttatgattaacacaacgttcctaccttgaaccttgcgcttcaataattaccccgaacctttgctcgaacgatccatgatcagtaatgtccacggaactggctttgcaggtggaacactgcttcaatacccatgaaatttatggattacacgctccttcatgcccgattgaagctcgttaacagtactggtcgcttatgcgttatttctgggtctccacaatcccagtgttaaatggcgggtatcaacatgtgctccataccctgggtgctactgaatgaaaacccgcctccaataatattgatgctgctagcttgctaattcaccatgt

SEQ ID NO: 15069 - DNA, 470 bp, Glycine max
  Clone ID: PAT_MRT3847_113613C.1
acggctgcgagaagacgacagaaggggatatataaacttgtttgtcagcaatattctttccttggtgccttctcctcccaaacctccccgcagggggtgagaaaatcacctaaaactccttcattcatatttcatgtcctcgatcatggaaacacaacctgaatgcgctgtcatcaacatcccaaacataaaaacagagcaacatgtgtccgtgtccccaaagaagaagaacggtggcggcatgcgctttctcagggtggcactcttcaagatgcgagggcgttccgcaaaaccaaccgcgcttcaggtggataataatgaggatggtgagaggtccaagggcacttgggggaagtttgtggggtccatgaggccattgcaccttcaaagcacccaatctccacgctcatcacctgatcctccatctgaatataaatcggattgcggcggctatgtttctgatttttggg

SEQ ID NO: 15070 - DNA, 114 bp, Glycine max
  Clone ID: PAT_MRT3847_113614C.1
acaatgaactcgttttgtgaccactctaatataataaggcatattgtattgctttcatacactaagaagggatttttataccacttctatatttcaccttaatacaaaacacac

SEQ ID NO: 15071 - DNA, 139 bp, Glycine max
  unsure (1)..(139): unsure at all n locations
  Clone ID: PAT_MRT3847_113615C.1
gatagataagatacggtctggtgtnttactactcccatgtttgataggtanagaaaataagaagtcttntgttgagnngatgtcttngtgtggatcttttactccatgtncttggaattcctgttaagaacagcaanaa

SEQ ID NO: 15072 - DNA, 544 bp, Glycine max
  unsure (1)..(544): unsure at all n locations
  Clone ID: PAT_MRT3847_113616C.1
aatcctccaatggcgagaaagcgcaagcctctctggggtctctccaccaagaagctcggaagactccctcacgtgttcagcagggttctccaactccccttccccgctgacactgacgtttccgtccaggaagctccccactgcttccgattcgtggcggagtcccccgccgccggccaagtggaggcccacatcgtcgaaatccaccccggggtcaccaaggttgtcgtcagagaaactggctccaccgccttgaacgacctccaccttgatgtttggaggatccgcctcccggaatccacgcgcccggagctcgccaccgccgtcttggccgctggggaactggtcgtcacggtgcccaagacccaggatgtctgggctgctgtaccctctttttgcagcatagcaactaacttacactgttgagggtgttgtttcctgcgtctttatcaatgctagtattggctaacgtgcgccttctgttcttctatcctattcctttgtgactttctcagntcttccattcttgttcttattctcctta

SEQ ID NO: 15073 - DNA, 315 bp, Glycine max
  Clone ID: PAT_MRT3847_113617C.1
gtggtttttttgaacaaggcccaaaaaatcaaaggacttttcttttacgcaatcatcactcacagaaaatgaagtatacattaacagttcccaatcgccatacgtctgagtaccctatataaacataggtcccaatcacctattttaggacatagaattcaggagatcaaaagcaatactaaacaccaattatgtaacattgctaaacatacacaggccttcaaaaaccagaccccaggtccccctccactaaatttattaggaatcaactccgaaagaaaaccagatgggagaaacacgaggaaacccgcaccg

SEQ ID NO: 15074 - DNA, 521 bp, Glycine max
  Clone ID: PAT_MRT3847_113618C.1
agaaggcccaaaaaacactagatattatcgtcgacacaaatgctgccgattatcctgatgctcttaacaggaccctaagtagtggcccctttatagagagccctttcggcatcacttagattgcgttacattgtaaaaagtgtgcttgacacacagcaggaacagcccgatgaaaaattttaataccccccacaatgccgggaacttgccttcgcatagttgagggccagacatgatagtacagcaacatcatggggaatgaagcccaactccaggacagcaaaattgatgatttcatcagggaacatggttttgatgaggttaaaatacagcttggcccttgatttgccagccaccacgtgcgtaaggacgcgaagttcttgacccggctgggcgtttttcttcctgaagacacagaccacgtatctgcccgctaaaacggtcaggtgcgggcgaaggacaataacaagggccgtgttgagtgcagcattaacacaaccccaaggaataaccgtcatggt

SEQ ID NO: 15075 - DNA, 380 bp, Glycine max
  Clone ID: PAT_MRT3847_113619C.1
tttttatttataaaaagaatctaacaagtaagacacgtggggtgttgaaaactggtttataggcgcacttaaaaagcaaacatcatcaaaaggactaattaaaagtggattgcattttatataaaaattctgaggtactggccacctataaaattttacccacgatgcaagatgatattgaatacatgaaaaccagcttgtatgaggcgttatgagatattcaagcggtaatcctctccaataaaacccaattagaaagaaactagtccaaatggaccacccttcggtacaggggaaccaatttaaagcctgaaaggactgtaatatcctaaaccaaaagcttcataacctgtgtatgggtgcgaggacaatgaatatgg

SEQ ID NO: 15076 - DNA, 405 bp, Glycine max
  Clone ID: PAT_MRT3847_11361C.1
aaccaaaaacaaaacccagaccaaacaataagggaacaaaaaatcttccaacccagaagttaaaaattaacatgacatttcacctgattacaaaatttttaaagactaccttaaggaggggcaccctaacccagctaaagggctaaaacttaacaccaaatacaaaacaaggggatatgtagcttcttagccattaatcaacccacatcgggccaaaccaggggaaaattgcacctgggtcccgaaccccctatccaaagaaattgccaagattagggaagaagtcataaattgcaaaacccttgaaaggggggcctcgattgcccattggggccgggaacatgtatagggcggccaaacacgctttggggatccccgcgataaaccttaacctaacaagttttg

SEQ ID NO: 15077 - DNA, 2087 bp, Glycine max
  Clone ID: PAT_MRT3847_113620C.1
gtcgcgtgagcgaatcgatacaccaccaagctatctctatacatttctagatcggagctccttgtgcagcgcccgacccccatcaccatgtcttacgacaagaacccatcgccggtgccgacgagcacgacgggcgatgaggagaagaaagtcaccggcggcggctacgacgtcggcgtctactctgcccacggacgagtcgaccacaatgcgcgtgcggttgacgggcacgacctcaacgactcgtacgacccgtccaaggagtcgctgctcacgcgattgggtctcaacatcgagagtttcaagcgggcacccggtaccacgcgcggtctcgtcgcccacggtgacatcccacccgagtacctgcaacacgacaacccgctgctgcagcagaagatgaagccgaggcatttgcagatgattgctgtcggtggatctatcggtactggtcttttcgtcggttccggagcttcccttggaaacggaggtcccgctgcggtgctcatggcctggattatcatgggtgtcatgttgatcatggtcacccaggctctcggtgaaatggctatcatctaccccgtctctggaggtttctacaccttggcttcccgtatgctcgacccctcgtttgcctttgctatgggctggaactacgttctccagtgggccgttgtccttccgctcgagatcactgttgccggtacgaccgttcagtactggacggacaaggtgccgctcggcgtgtggatcaccatcttcttcctgctcatcatcttcttcgccacgctcggcacactcggatacgccgaggaagagttctggtcgtcgtgtctcaagctcgccgtcgtcatcatgttcatcttcatcggtatcgtctgtatctgcggtggtggacccgccagcggtgactacggctcgtacgtcggtggccgatactggcaaaacccgggtgcgttcgccaacggcttcaagggtgtctgtgccatgttcgtcactgccgccttctcgttcgccggtaccgagctcgtcggtctcgccgcgaccgagacgcccaacccgcgcaagacgctcccctccgccgtcaagaacaccttctggcgaatcaccatcatctacatcacctcgctcaccatcatcggcctgctcatcccttacgatgaccccgatctgttcggcggctccggcgccaacgtctcgcccttcgtcatcgttctcgaccgagccaacatcggcggcttgaaccacctcgtcaacgccaccatctgtatctcggtcctgtccatcggtctctcgtgtgtctacgccggttcgcgaaccctcactgccctcgccgagactggttacgctcccaagatgttcacctacgtcgacaagtccggacgacccctgtactcggtcctcgccatcctcgcctttggccccatcgcgtacgtcaacctcgccaacgtcggaaccgacgtcttcaactggctcttggccctttccggtctgtccacccttttcacctggcttgccatctgcgtcacgcacatccgattcaggcaggcgtggaagatccagggccactcggtcgaggagctgccgtttaccgccatcgccggcgtgtggggctcgtggctcggtgccatcctcatcgtgatcgtcctcatcgctcagttctacatcggtctcttccccctcggaggcgtcgagagcggcaacgcccgtgctgagagcttcttcctctcgtacctggccttcccgatcctgctcgcattctgggttgtcggttacgcctggaagcgaactctgccccgaaagacgaccgaaatcgacctggacaccggccgaaagtcttggctcaccgtcgaggagatgaggcagtacaaggccgagcgacgactggctccgtggtggaagaggatataccgcatgctctttaccagcagctaagcgtcgcgtggcgtctctccttttcctgtcgtcatcgacaccaaaagtatcagctcacgggagggattggggaagaagagtaagccgggagagtgaagcacttgtagtcgacgcatctaattgtatcttccgatacatgcatgttgctagtcatc

SEQ ID NO: 15078 - DNA, 313 bp, Glycine max
  Clone ID: PAT_MRT3847_113621C.1
ggggaggaaattgaaattttattgaatgaataacagggaatatctccctatgaaaatgatacattgctccagaggtttaagaggtctggatccactccccacaattttctattttttcaaagtccccttttataggttaaaatagtatatagttattcccctttataggtagttagtaactacaatctataacagaaaactcctaactagacccaaccaactgcagcccgttctaataaacacttacttaatcatgggcctgcaatgcagttagaattaatcgatgtattatatttcaaataaggaagcatat

SEQ ID NO: 15079 - DNA, 568 bp, Glycine max
  Clone ID: PAT_MRT3847_113622C.1
gggtttaatttatcactaaatttgaattaaaaatatgattaaatatgttttttatattgtttttatattattatctcaaattaacttttgatcaatcatgtacatataaatgttaatgatgtgtcacatagattgtcacttccttaaacttaattactaacacatcatcaatatcacattattttttattatttaaattatttaaaaattttgattctctttctttttctttacttctccgacgaaaaccatcaccgccatccaaccccacatcacctatgctatccaatcctcatgtcgaggtagttgctcgccaatatcttgaatgccgagaaatcacacatcagaaagtggatgtgcgtgttgactcgacccaacccgaccctaataggttcaagtccactcacttcttattgttgttcatggtgaacacaatcaccctctccttgctccaacatgtgctaacaattccgtccatgaagttttggatactcgacattgtcgttgtcgctatccttgatttcgattccataaaccaatccaaattccctatcaggattatcgactt

SEQ ID NO: 15080 - DNA, 812 bp, Glycine max
  unsure (1)..(812): unsure at all n locations
  Clone ID: PAT_MRT3847_113623C.1
ccacgccgtccggaaaaaaattatagtaaatgcttttgaactacactataaattgttaggttgaaaaattattggacctccaaaacaacttatggggaaagcaagtttgtatgattttttctcttgcccaaaccatgtaatcagcatatgtcactattcataacactttttcctgatgttatggcagtattatcaaaggtctgggggttgtaaatttggtaaatcttgtaaatataaccacacaagaggaaaaatttcaacagcaccagcaccacttttggaacttaactttcttggcctgcctattcgtccgggggaaagagagtgcccctattacatgcgcactggctcttgcaagtttggagcaaactgcaagttcaaccatcctgatcctacagctgttggaggaggaggaggtaatcctccttcagggtatggtaatggagggtctatttcattacaaggtgtatcacaaacatctgtaccctcctggtcttctccaagaacattaaatgaagcatctccttttgtgccaatgatgctttcacctactcaaggagtttctacccaaagttctgattggaatggatatcaggtaaacagagtcaatgccaataaccatatatggcaaggaacaatttattatataattagtacaagataacatttagtcttccagttttctatcatgcaacgttaatgctctcttcacctagtgggataaggctttgttgnntgtgaaatgttaatgctctctgttgctgcacatacattggcaatgccatgtcctcatttttccttttgcaactgca

SEQ ID NO: 15081 - DNA, 441 bp, Glycine max
  Clone ID: PAT_MRT3847_113624C.1
ggtaaaccttttttttttttttttttttttttttttttttttttttttttcttttttctttttttttttcttttggaaaaggccaaatcattaaacaaattatagcttccctaaaaataaaccgggccaaacaataataaattgaaacattcctctataaaagccggctgggggcaaacggggggccggacaaggaaaattccccggacggaaaactaggggaccaacaaactttgcaattaacaggggactggggggaaaaaaaatttttttttcaaaaatatacgggtcacttatcaccattcaccaagtttttactagcccaggggcccaatttttccaattaaaccttcaaaaaaacttattttttaagcggacaatatttttaaataaaaaaacctttttaaggaaatagtccccttgttaacccgaacccgtggg

SEQ ID NO: 15082 - DNA, 343 bp, Glycine max
  Clone ID: PAT_MRT3847_113625C.1
ccagaagcttcggcgggaggaggctcggatcctatgagccacgcgtccgcgcggcttcccctacggacgctaatcacagccatattcagatgaaggcctttactggcacccaggcttgaatcttttttttttcgctcattatttatttatttatttagaatttttgttatctatcgttagtatttgatcagaatgtagggacattagtattcctgtttagtgagtgagagagatgaatacgtgtgtagttccaattttgttttgttatgatatagaacttttcactgctttgcatatacctaaaaaaaaaaagaaggggccatatggaccttcgatcttttga

SEQ ID NO: 15083 - DNA, 231 bp, Glycine max
  unsure (1)..(231): unsure at all n locations
  Clone ID: PAT_MRT3847_113626C.1
tgaacatgtaccagagaagcatctttgctgctacttgcctaggattaaatcatccatgcttacatctcatataaaaacaaagttggtnnnntnaagagaatggagacagagctcnngcaattccaatcattgagagaaaagagataccgggattcgacatccnntcatgtcgattttgaccatagtttcctacaatcctttcactggttaagggggagcacggtgcaacca

SEQ ID NO: 15084 - DNA, 217 bp, Glycine max
  Clone ID: PAT_MRT3847_113627C.1
cttattttcctttttttttttttttgaagggggcaaaacatccaaaagcatttttgcagatgcttctcctttccttcgacagaaaaataaagaatgtatttattacaagtagccatatattaacaaattccttattttttttttaagcgcttctgatgtggggggggattattccattttatacctattcatgaaaagattctatgggagggaggga

SEQ ID NO: 15085 - DNA, 232 bp, Glycine max
  unsure (1)..(232): unsure at all n locations
  Clone ID: PAT_MRT3847_113628C.1
acgtcngccagaagaccacagaaggggaacacaggggaaaatctaaaaaagcacggggggctaaacaacgccagccacaaaaaagaaaacaaacccccaccgagaggccgccaacatacaggacccaagcgagcgccacggcgcatgccaaggccaatagcaattcgagggccccccccaaaaacaagtgacagaccgcaagtacacaaccccctaactggaacaccccacc

SEQ ID NO: 15086 - DNA, 974 bp, Glycine max
  Clone ID: PAT_MRT3847_113629C.1
cttcaaatatagctagctaggtacaatacaattcaccggagcaaatactaaggaggtttagctcaattgattcagcaagtgtgtgagtgagttattgtaaactttctgatatctgtcttccatttttatgattaaaaaaatcagagcaatgaatgttttatatttaagctcaagttcaagcctaagcatgtccaagccgtttcaattctcaagtaaacatcatcaaagagcttctagtgtgaagtttggtggtgtttcatgcagagccgcaacgttaacccaagaaaacttgtacaaaatattgtctggttctagatcgcgagcggcgccctttttttttttttttaatatgtaaaataaatagtgcatatattgtgagtaaatagtttggctactttgaagggctccaactgtgtacaggaagtgaatggcccaacacaacccctagaatcataattagatacataaccttatatttgatgaatttcaaaatttaaaaaagaagaatcataatctaattctctaatcattgccgaaaatttactcacagcacaactatattttagctggatgataattcaatgaagtaatgaggaactttattaattagttgaaatacctcgcatcctttccagtcccaggatagttgggcagatttaggggcaactacaaatgatggttctttccgatcagctttacaggaagaggcatggaggaggcacaataagcgaatgcaagaggagttagaggaggagatcgaaagagtggaacgaataaggcgcatgcaattaacggaagtacaaaaagctatgctgggaaagtcctggatatttccaagagattggtactggagctgaatttgaactaattatatggaaactacatacctacttttctgacaaatattctgagatcaagacagcttttaagtcaatggctcttcagtaccaccctgatgtgtgccatgatccttc

SEQ ID NO: 15087 - DNA, 685 bp, Glycine max
  unsure (1)..(685): unsure at all n locations
  Clone ID: PAT_MRT3847_11362C.1
taatctagacaaatcagatgggggaaatcaagtgtttacaagactatacaaaattacatagtagattggtggtgaaaataaaacaatgtctcacatgaatactataaaatagggatatagccaaacgctgtgcttcgatccactctcctggccccgataaattaagcagaccttgtccatgaactccaaggtttgcattagaatgtatcacagaagcccccctgagaacaatctaattactagcctcaagtaacgaagttgccacagttatatcttccccgccatctatgagcatttttgagttccacatcaagaacatttttacagacatacgtagagcaccatataccttcatcacagaatcactcatcaacaattcttcagccaataactcaaactctgatgtagcatagtgtcgtagcccaaagctcaacaccccaccctgcaagatacttatctgtccttgtacctgtacacgactccaaagcaatggaactgtggccctagccttatttcgaacataaacattagtccaaaggggttgatttggaaactccaatagaagtgtctctgtatcagttgtcatgttaaagttatcaactataaggcttcgagggactgcatcataaagagtcccagcagcacctgcattttcaggacagccaaggctctncnnacgcgtggg

SEQ ID NO: 15088 - DNA, 260 bp, Glycine max
  Clone ID: PAT_MRT3847_113630C.1
gccggtccggaattatttcgggtggggagctgactagttgggggggggcctttttttttttttgatgtaagagcatatgaaatacactcacctactgcggggtaaaagcacattacattggatcgtactgagagagagatccatctttcaatttatctacaatggcccctccgtttatcggctaacagatatctccgtgcaatgaagactttaaaatattcgacgaggtcggctatagctttcttaccatgcaaggccta

SEQ ID NO: 15089 - DNA, 426 bp, Glycine max
  Clone ID: PAT_MRT3847_113631C.1
gctctctctctctcgatgatggcgctgcactccgtgccttccgtttcgcacgtgctgcgcctcgccgagccattcccttccctccacaacgctcacgtgcttctcgacctcgcgcctctccgccgcaaacctaaacgccgcactcgcagactcacggcgtttccctcgccgtcgtcttcgccgctccgtcattccgccgtcaaagccgttctccacctggaccgcttcaacgaacacaaccgcctccataattcctctgcttcgtcttcttccgattccaaaccgcaggtctggttctggttttgctttcgtcgtaacattttttttccttcttttttcttttctttttttcattttttgattgttcgtctgtttcgcgagaagttgtggatcggacgatagaacggtagaagaaagcggtctcga

SEQ ID NO: 15090 - DNA, 995 bp, Glycine max
  Clone ID: PAT_MRT3847_113632C.1
aattcggctcgaggataattagccatacaaagatgaatctcaatagcacagaagcacttcttgtgctttttgcatttgtcttcttggcatggggcaatgcacaaaatacccttgtgccagcaatcataacatttggtgactcggctgtggatgttgggaacaatgattatctgcctacccttttcaaggctaactaccctccttatggaagggactttatcaaccatcaacccactgggaggttctgcaatgggaaactagctactgatattactgctgaaacactgggttttaagagttatgcacctgcgtaccttagccctcaggcatcagggaagaatcttcttattggagcaaactttgcttcagctgcctctggttatgatgaaaaggctgctattctgaatcatgcgattccattgtcccaacagttaaaatattacaaggaataccgaggcaagctggccaaggtagttggcagtaaaaaagcagcattgattattaagaatgcactctacatattgagtgctggcagcagaagattgcaattttcctaattcacacatctcttgatcaacttggtcaatccccctgaaaatctggttttgtggaggcaaacagaaggttgctgtggtaccgggcctgtagagacaccatcccttgtgtgtaattcaaaatctcccaggaacttgttctaatgccacacagtatgtgttttgggacagtgtccatccttcacaggctgctaaccaagttttagctgatgcattaattttacaaggcatatctcttgtcacataaagactcgtgattatttatgtgttagaatttattttgtacaactacacatcgtgaaagtgattcaaaagtttgctgtttttctttagtttgaaaaaaaaaactgtactctatttattttagatcttgagaaatttcagataaactcatttgtaaaccattttataataatagagaaatgtttgcttattatctgt

SEQ ID NO: 15091 - DNA, 405 bp, Glycine max
  Clone ID: PAT_MRT3847_113633C.1
catgatccactgcagacaacatattacgacgactaccgcgcatggtagaatcgaacctttgtggaatggtactaccgtgctaagggcgtgtgtctcggccttatcatcgacttgttgctcatgtgcggatacgacaacgagcctgttctcctgactgactcggatgatgagcatggacgcacagagtgttgatcttaagctgaatagcgacggcttgatgaggactaagagccgtattggagggaaatggacggatgctaacgagggctactgcatagggggacataatgcaaggagtggcgaatctatcgcagatggctcatgcatggctggaagagagacacatgacgcaactgctggcacgtatgacgcatgactcatggcgcaaactcactgacagcgaac

SEQ ID NO: 15092 - DNA, 750 bp, Glycine max
  Clone ID: PAT_MRT3847_113634C.1
gcgaaaagaggaacaaaaatcaaactcatctttgttctgctgtctgatgcatgcacgtctggtcctttgatcatgaccactgagggtctcttcacatgtcgtttttgagccccatcgtgattctattctcagacacaggagagcggaggccgagaaagccggggaaaaaatggtttggattggaggtcacagagggagagagaggtttctactttctatacatggaaacttgtttccaatttgcagtttttcccttttcttcttctaagccttcacagaatttataggtgttgcctcttcaaactgatggcagtgtttggttggcaaccttgtcctttcaggaaacataaaaataagctatggtgagtgagtgaatgagtgagtgagagaaaaacaaaaaacaagtggtctaatggcagattcagaaaagtacaacaagaaaccctcttcatcatctttcttcagttctccgaggttgttcaccaatttcactccgaaaggtttccatgaaaccgaaaccatgatgagccctacctccacactcgacagcaagcctttctctggcttcaagaaccctttttggtccgaaactaacagccccagaaccccagtgagtgaacacaagcgttactgggacaaattggattccaaagggattggtcttggccttgttgatgctcttgttgacgaagagaaacacggtgaagtgagttcgaaatcggagtctcgaatgggttgtgttgggatctc

SEQ ID NO: 15093 - DNA, 2563 bp, Glycine max
  Clone ID: PAT_MRT3847_113635C.1
catcgagcccacagaggttgtgggatgttttctccctttatacttggaaagttgtttctaaatggcagctcttgccctttgcactttcaaagccctcacagcaattttatgctaatttttttggtctcagccgcttcacatctaatggcagtgttccaatgactgcctaggccatcttcccttcgtaaataaaaaactgccattgctaaaagaaaaaaaaagagcatagtgtgctggttttattaataccactgatccttttctttttctcctgaaaccaacacacacacacacaaaaagtaaaatgaaaaaagttaaataaaaactactgattctcaaacacacgcgtctttataacaacccaccaaccggctattcctcctactaccacaaaccgctttctgattaatttcttcccttgtcttgtgtgtgtcctatctatgcttctctctttctcagtactactactgctctctctgcaactccatgccaatttttcagggctcatgatggtggcctgaactagtgggcaaataaagaccacagtgaaaagagataaccccactagtcataaaagggagagaagagaaaagaaagaaaaaaaaagagaggggctttatgagttatgaattatcatcatcacccgaccttttaacttttttttctttgtttgaattttccttctttttttttcgttttgatggtgaaattgggtattagggaccgtttgtttgggttttagcatagagggtgtttgggcttttactcgtaagactctaattatttgctctgaatataggaggcctagacataaatgcaaaatggaagaagaaagaaaaattgaaagggagaaataaaggtagcgaaaagaaggaacaaaaatacaaactcatctttgttctgctgtctgatgcatgcacgtctggtcctttgatcatgaccactgagggtctcttcacatgtcgtttttgagccccatcgtgattctattctcagacacaggagagcggaggccgagaaagccggggaaaaaagtcacctttctttctttttcattttccattttcatttaaaacattaaaaaaaatctattttttctatatctgtttctccacttcttttctcagtggtttggattggaggtcacagagggagagagaggtttctactttctatacatggaaacttgtttccaatttgcagtttttcccttttcttcttctaagccttcacagaatttataggtgttgcctcttcaaactgatggcagtgtttggttggcaaccttgtcctttcaggaaacataaaaataagctatggtgagtgagtgaatgagtgagtgagagaaaaacaaaaaacaagtggtctaatggcagattcagaaaagtacaacaagaaaccctcttcatcatctttcttcagttctccgaggttgttcaccaatttcactccgaaaggtttccatgaaaccgaaaccatgatgagccctacctccacactcgacagcaagcctttctctggcttcaagaaccccttttggtcagaaactaacagccccagaaccccagggagtgaacacaagcgttactgggacaaattggattccaaaggcgttggtcttggcctcgttgatgctcttgttgacgaagacaaacacggtgaagtgagttcgaaatcggagtctcgaatggttgtgtttggatctcagctcaagattcagattcctcctctgtctccatctgaatcttccaaattcgtagctgagaagggaaagtcttcttctggggttgctgatgctaattctcagcgtgtctttatggggtgtctctctgcgagtgaaatggaactctctgaggactacacgcgcgtgatttcacgcgggcctaacccgagaaccactcacatatttgataattgcatcattgagagtagctgctttgaacttgggtgttctgcttcttctgttaaggaaaatggatgttttcttgatcaaaccagctatcactctcggagctttctcagtgtctgctttcactgcaagaaaaatcttgggcagggtaaagacatctacatgtacaggggtgagagagcattttgcagcaatgaatgccggtaccaagggatgctgttggaggaagagatgagcaaattggaagcccagtgatatttatgggccttagttccattcctttaatccccacacccacccaaagccattcaatcttgattcaaacttcaaagggcttagaataataacaccaccttcatttttatttttctaggacacaaaatagtccttggaaattctgaatcactgtatcacctggtttttctatttctgcttatcacccctctctgatgtagcagtgtagaaagatagagaggaattgaaaaggcagagatactgtaggtgattttattgaaatgatgaaattatgggattgctgctgggatggccacagttttgtaatgataccagtgtatgacttgagcttacaaattatctttgtttatataaagtattccccagtaataataatactataatcacgcacataaaacc

SEQ ID NO: 15094 - DNA, 492 bp, Glycine max
  Clone ID: PAT_MRT3847_113636C.1
ttggaacctttgggctgatttatgtgcttgcatggtcgtgagaagatgatagaagggcatggtcgtgagaagatgatagaagggcatggtcgtgagaagatgatagaagggcatggtcgtgagaagatgatagaagggggaaggaagggagggaagaacagaacgggactcggaagcggaaaatatatcggagagcctcctaggagaagggacgtacggaggaagtacttgacgtctattaactagtcttgttatgttattttcggttccggtactgttgctgctgttcctggcactcattctgctggtgaataagctcataacaggtctcacgtctttgacttctacctgaccctctatgcgaaggttggggactattatcaaatgcccggatggatgtatcttaccttactactatccaacaagtccgtcagtacgcctctgtagttcccaacgcccaaaccctagattgcgcctgtcctcccggtatct

SEQ ID NO: 15095 - DNA, 736 bp, Glycine max
  Clone ID: PAT_MRT3847_113637C.1
ccacgcgtccgtcctttgatcatgaccactgagggtctcttcgcatgtcgtttttgagccccatcgtgattctattctcagaaacaggagaatcgagggcgagaaagccggggaaaaagtcacctttctttctttctttctttctttcatttaataaaaaaaatctcttttttctacatctgtttctccatttcttttctcagtggttttggattggaggtcacagagggtgtgagaggtttctactttctatacatggaaacttgtttccaattagcagtttttccctttttcttcttctaagccttcacagaatttttaggttggtgattttggtgtttgccgcttcaaaactgatggcagtgtttggttggcaaccttgtcctttcaggaaacataaaagtaagctatggtgagtgagtcagtgagtgagtgagtcagtgagagaaaccaaaaaacaatggcagattcagaaaagtacaacaagaaaccctcttcatcgtctttcttcagttctccaaggttgttcaccaatttcactccgaaaggttcccatgaaaccgaaaccatgatgagccctacctccacactcgacagcaagcctttctctggcttcaagaaccccttttggtcagaaactaacagccccagaaccccagggagtgaacacaagcgttactgggacaaattggattccaaaggcgttggtcttggcctcgttgatgctcttgttgac

SEQ ID NO: 15096 - DNA, 446 bp, Glycine max
  Clone ID: PAT_MRT3847_113638C.1
aataagcgctaatctcgggaatactagtataatttattctttattaattaacaaggtgcttcttgcataaagaacacaatatattattaactactttcatgttcagtagggtgagatttcatgatagcaaaagaaacttaactaaagtcacaaagctatcattaaataacattatgttcatcacttccgtcataacattatcaaagtttccagattctccgtgtaccgttatgattcatatcctatcatttgtccacaagcttcctctctaccatttaaaaaggatgcacctcaattgtcaaggagcatcacctatggtggataaatccaaattatttatcaacaaatgaagattctgcaagatcaatggcacgagcaagagctgcagctttgttctcgcactctctttgttcatcagcaggatcactgtcagccacaattcccgc

SEQ ID NO: 15097 - DNA, 390 bp, Glycine max
  Clone ID: PAT_MRT3847_113639C.1
aaaaaaaaacccaacaactggatttttttgaattgaatcaaaatcaattgcagataaacaaacagagggggtttgaagccttttttttcaacccataaaagggccgcacaaaaaaggctttatgacaacatacagcccaaacgtaaaaatgaaaattgtttgataaaagtccctagggcccacaaacttggaataaaattgaaaagggggatcccccagcaaaatggatcgttgcaattaaaaagcgtagagcttttttttaatcaagacatcccccctttttggaacttcacccttgggatgagctgtttgaccggggcaacccttgtaacttacaaaaacaatctccatggatttgccacaagcagcattagggcaattaatgggggg

SEQ ID NO: 15098 - DNA, 462 bp, Glycine max
  Clone ID: PAT_MRT3847_11363C.1
ggggaaaaaaaaagaggccttttttttattctttgaaaaagcaaagggcaaaaccccccctgggttccaaggggggaaacccttaatccccacttttaaccctcttttggaaacaaaatcccatttaaccgggatttagcttaaggacaaacaaaaccggggggccccccccccccaaattttccccaaagattgtgggtcccccatacatgaatctctttgggagcggggggggtttattagaaccctttaaaaaacccataatttttaaaaatactaaggcctcccccccatttttaatttttttttgacccaaaaggggtttcttagagacccttgaaaaaggggaaacccggatctttcggggggccccttttcttgaccaagggggggggcaaaaattctgggccccattggggggggccaggaaatttcccccttggaaaaacccccaccccggtt

SEQ ID NO: 15099 - DNA, 399 bp, Glycine max
  unsure (1)..(399): unsure at all n locations
  Clone ID: PAT_MRT3847_113640C.1
ccacgcgtccgcagcgcagagttcctttgaagtgaaaggaaggctctgtaccggaattcctctctcacatgaaaccagagcgacagtagaatgtgttgcattcagacttggcacttgcttggcattggtgggagacaaaagcanatggggacagaactgtgttggtgttggggattccatgtggagagaggagtgtatcattctgggggctgtgattgagccttgctgtggaagggaaantaccctaccaaaagctggtgtctggggccacattggtacttggtaattgggaattgggattgtccgacacaaagaatttgtgggtggggtggtgaaccgggttgaaatggccctggaagaaccttggattgatatttggtgggtgagggagaacattcc

SEQ ID NO: 15100 - DNA, 399 bp, Glycine max
  Clone ID: PAT_MRT3847_113641C.1
gaaagaaacctacttacccatcaatcgttatgacattagaatagagtaaaacaacggcctacacctaaatgaattacaaattaaagggcaagaaagccgtacacaagaatgaacgacaatgcgaatcatgaacttatgctatggcttcaaaattggacaccccactctaaaagagggaggcaagtactgacagatgaaccactctataaaaagtaacgagggcttttcaaaaaccatgcaagcacaacttcaatggtgcaacaccgcccataatattggaggtgtgagcttcaaccaaagaaccatctgtataacacgtggacattcattaattacagcgcataacattgggatgccaaaatatatgggagaatttctgaaagaccaaattctattttt

SEQ ID NO: 15101 - DNA, 384 bp, Glycine max
  Clone ID: PAT_MRT3847_113642C.1
attcatttgttcatggtcagctcctacattgtgggagcaggacgatggatcctggcagtttacgaaacagtcttggctactactctcatgtgggtttataacaaggttaacgttgacctcagagatttctgtgctgtatgatgatgcttatgcttaacattgtggcgacaacttgtggcacttcaaacgatgtgtcaagagctatattttgtcttagattctccattagcctgaacaagagacagtgcgagaatatctacatgtgaaaaaatttcgctagatgtttacatggtggaggcgtaaagcttttttagagcgcaatatgtgctgtgccaggagatatcttgcgttctactggggtagctgttattgtaacagctcaca

SEQ ID NO: 15102 - DNA, 300 bp, Glycine max
  Clone ID: PAT_MRT3847_113643C.1
ggaattccccggcgagccacgcatacaatatccattatgccataatcactgcattattattcacacctctcatcacacacactcgcaccaattttcatgatgtattctcactcccccacatatcaacaaaatgcctattactttttattgataaagcagacaccttcctttaccagtaactactcaatcctttaaaatacatattcaaaacttatcctataaaatataactatttaaactactactacatattcaagaacccaaaattttctacctcaaatttatctaacatcataaaaa

SEQ ID NO: 15103 - DNA, 243 bp, Glycine max
  Clone ID: PAT_MRT3847_113644C.1
aggggatcactgacaaataacaaagggacaagcctgagaaaagttaatgaacaatttgaaaaattggaaacccaatggccgaataatcctcaaaaaaaattttacacagatacaccaacttttgcgccaaaatccgagaaaattccagggtttaaaaaaaattctgtaaggccaacctcccaattttaacaaatcccaaaaccttttatgcccttcctgaaggtttaaaaaaaaggaaccaat

SEQ ID NO: 15104 - DNA, 298 bp, Glycine max
  Clone ID: PAT_MRT3847_113645C.1
gagcggccgccccccacgcgtccgctcggcgggggttttaacttcaagcccgagctcaccagcgaaacctgggcccacgaaaaagccctcgagcgccggaagagcgaaaactccctggccgacgcccaaccccccgcaccgccagtcgaggagcgacgacgaaccggactgaggcgccgcggaaccgaccatggtaggttttggcaaaggaaaaacaaaaaacgccgcaaaactgtaagaaggccctacagctctaggacccagaacgccttgcccactctaaagaaaaaaacccgtt

SEQ ID NO: 15105 - DNA, 367 bp, Glycine max
  Clone ID: PAT_MRT3847_113646C.1
gtggaccatatcatccctactgtgacgtcccaattttacttgaacccaaaaacactgttactgttgcagctggtgccgaatataatcccgttttttccataatgtccatgccaagagatccatgatgctatacgccatcaactaccgcgtgcatataagcattcatgacggtcggcaacccgtccgaaaattcatggccttcgaccgccacatgaacctctttactctgcgatagcgagtagttccgctaactttctccggcccagggcaagaatcctgtcttaggaggctaccgagatgaccaaccaacgctcaggctcgttctacttctcggtgaggtggtcatctccatgaccaacgaaggccc

SEQ ID NO: 15106 - DNA, 345 bp, Glycine max
  Clone ID: PAT_MRT3847_113647C.1
gtgttgggtttttttttttttttttttttttttttttttgaaaggaaatttttttttttcaaacctaaagaaacacaataccccattttcccaaactcatgtacccctgccaataaaataaaccctgattcctaaactccagcaccagcagaagtttgttcacttcaatacacaactcctaaaattttttatgtccccacctggtaagcaccctgatgtggaaccaaatgttgggcccacacgtggggttcccctccataatacaaccaaaggcttgaccctgatttaataataattttttgaaaaaaaaggtgacttaagaaattaattaaaaaaaaaggtttt

SEQ ID NO: 15107 - DNA, 895 bp, Glycine max
  Clone ID: PAT_MRT3847_113648C.1
ggtgttggtccacacatatatatagagcagacaagtgtgacacttcggagaagcttcacatttcaaagtgtgacacttccaagaaccaaaaaagacgccaagtcgtccgttccagtggtagtaatggatgcactgaatccttcttcttccggcgcttctctgttcctcgccaatcttccctctcgcggcctcttctcttccaccgtcgtttcgtccaatccgggtgggatgcgggtctacgtatgcaatcatgatacctcaccaccagaaggtcaacatattaagacaaaccaacaaaacatactgattagatcactcaccctcaagaaacaaaggggtgattccagctcaaaggatggatctgatggttcaagaaagaggaatgctgaaaagggtttggaaagagcatcagccaagaaaacaaataaccaaataaattccagacaagagggatcaaacagtcaaacaaccactagggacttccacaacctgactgtagagaggcttcgtgctcttttgaaatctaaaggtctttcaaccaaaggaaagaaggaggagcttattactcgtctaaaagatgcaactggttaagcgtagcatggtggaaggaatactctgttcattaagcatccaaatgtaagagtagttagtgtttaatgtaacttaggatctggaactaatatacataaacccagtgcaaattacagttacagttgaatattatcgttttggtgctactgtttcatgacaatcagcattaattatgttttttgctgcgtgaattatagaggtcaacggtggctttcaagtaaaatttacgatccacggttgccttgtttccaggttcttcccgtctcctgttgcgtctgtcttgtcttgcggttatctggtgacc

SEQ ID NO: 15108 - DNA, 138 bp, Glycine max
  unsure (1)..(138): unsure at all n locations
  Clone ID: PAT_MRT3847_113649C.1
tcatgtgtgggttattgcttggntcgttcccttggttgttnctgatgatntactcgcagtccnaaagggtccgnntgtcttgagcttctctnngcagnttgangcaccggtggccctgagctggngtgggctccatca

SEQ ID NO: 15109 - DNA, 193 bp, Glycine max
  unsure (1)..(193): unsure at all n locations
  Clone ID: PAT_MRT3847_11364C.1
atgtcatctgttgcatgaattgcattgctaaacagttgtgctttagcactgataacttcctagagagcatgtatactctgagccaaagatcacataatggagatattactactgtcaagtatggcaaagaatcccntgtgcctgagacatancatacgagttggctctccattgtgttattacagaaataata

SEQ ID NO: 15110 - DNA, 388 bp, Glycine max
  Clone ID: PAT_MRT3847_113650C.1
tttttgttttttttttttttttttttgggtttttttttttttttttttttttttttttagaaggaaaagggctatttcacttatttaaacaaaacaacctggaatgggtaaagggataaaaaaaccaggaacacttccggccaagaaaataaacctggaaaaaaaaatttagtttaacagacaacttgggggtttccaaagggcaactacctaaagggtttggggagaaaaggtaaaaattttttgggggggggggggcaaacccaaaccaaccttgggacttttttaaaggggcttgggggaaacctccccaaaaatggggaaaaagggtttgggggcccacttgggatttaaaacctgggggcgaattcgggggttacgtacgggg

SEQ ID NO: 15111 - DNA, 527 bp, Glycine max
  Clone ID: PAT_MRT3847_113651C.1
gtaaaggaaccccccctttacccatattttccttaataaaaggggggggcgaaatttccaaaatggcattacacactcaaacaggggggcgagcctcatttcctttattgtgcaaaacaaccccccattctaaaaaaaacccaaattcccctttgtgccagagattcctgtttttaaaaaattcccgccaatccctgagtaacaaaaaatgcccgcaaaaaattattacctgcaatctcaaattcttttgaaattcccgaaacaaaaataccatctggttacttttggccattgacaactacaaatctcaaaacccttataagtgaccatttgccctctattgagctccaccttttaaaaccattgttgggcccacattcctcttttggaaacatcaaatcccaggaatgtggttccgatttttaccaacaccatgaccaaaaaggccctatccctccttttgactgaaaaaacccttgacccaacaaggccaaccatttcattttcattgttgcattcccaaactt

SEQ ID NO: 15112 - DNA, 751 bp, Glycine max
  Clone ID: PAT_MRT3847_113652C.1
attacaatatccaaaggatccggtactgcactagattggaacagcatacagaaattgaaatacacatgggctgttgcacaagagaccatgagactctacccaactgcaccaggtgcattcagagaggcaataacagatataacctatgaaggttttactattccaaaggggtggaagatcttttgggcatttattggaacaaataagaatccaaagtactttcatgaacctgaaagttttgatccctcaaggtttgaagggaatgctcctgttccatacacttggttaccctttggagctggaccaagaacttgccctggaaaagactatgtacggtttgtggtcctcaatttcattcacattctcataaccaagttcaagtgggaagctatacttcctgatgagaaggtttcaggttcttcgatacctatcccagcagagggaattcctatacgtcttcatcactactaagttttcatgagtgcatatattgcgaagtttgaagaaaatctttgggtgtatagtttatctatcagtgcagattacatggagaatatgaccaatatcataataaaggtgacaaatgccccaaagaaaaggtaaagttggttatacgattatatgtctaaatgtaatgtgttgataatgtaataagaatattctcaatgtattctagtcattttctagagggaaaaaaagtgatgttaagtagctattatcattgaacaatattaataagtcatggtccatc

SEQ ID NO: 15113 - DNA, 406 bp, Glycine max
  unsure (1)..(406): unsure at all n locations
  Clone ID: PAT_MRT3847_113653C.1
cgttgaaacactttcccccttaccattcgtctcctcaatgcctgtcttgtttctcgtcactttgcagcctgagtgttttatctcacaaacaaccataatggaatttcaccaccaggtcctatcaagctggagctcaaggtgggtctgaaacggtgttggtggcttgagagcttaggaagcagtgcagtcagaaagcattctatggactgaaatttattggcagtgaatccaatggccttgttgtctggatcaagagatctattcagcctctttggatgcccgtcggaacctgcaacgtgtctcccgtctcatgtcttaaagatttatgttctttttggagcaatctttaaagatttatgtccactaatntattattacaagtatcttctttgattctagttgcatg

SEQ ID NO: 15114 - DNA, 441 bp, Glycine max
  Clone ID: PAT_MRT3847_113654C.1
gtcctctttggctagaagaactacatgttctctggttccttcatgctttacactgtggctggctcctgttgttctgtcacttttttcactctctgggggttcagtttaagttagctcaagataaagacatggattttcagaggtttctcatgtgacaaaaattgtcttggtaagttcaatgcttttggcggtgcttcggttactagtgtgaatagaaacaacccgtttttatgtgtgcttttggccttttcctctctactttttctcttttggcttgagaactcttcggttatactcttaaaatttaaaatgctttaatctctctctgaaggaaaattatagtgatttgcgattcaagtcttttgagaaaaaaaaaaaataaagagagaaaaaaaacatcgaagagcatttttcatgatccatgcaatctctatgtcactg

SEQ ID NO: 15115 - DNA, 413 bp, Glycine max
  Clone ID: PAT_MRT3847_113655C.1
gagtctatctcgaggttagtgcttctctcaccaaaattggcaaggccaacccttctattatgggctgtgttctttggtaatcctttttcgtattatggccttgttttgttgaccactgagttgaacggacatagtaaatgcatgccagataaattgcagacagagaagtcccaggatgttaaatacaagagtgtttttattgctagttttgcagagctacctgggctcctcttgtcagctgcggcagtagataaactcggagctaaactttcaatgtcaaccatgttcttcatgtgctggattttccttctcccattattattctatctggctgaaagcctaacaacgagctttttatttctagctcgcatatgcattacaacaaccttcacaattgggtatatatatgcacc

SEQ ID NO: 15116 - DNA, 875 bp, Glycine max
  Clone ID: PAT_MRT3847_113656C.1
ggacgcctgcgtccggtccggattcgcgtacgggtccccacgcgtccgataagctaccttgctagtttccatcatcgtatctgttagtatttccaaatatacacattttctattttattcatagaaatctttaacttgagaagcattacatggcgctgacgatgatggcggcgatcggcatcggcatgaagcaagagaagaagatgccggcgacgccggcgccggagaacgagctgaagaagcggaacgaggagctcgagaaggagctcagagagagcaaggagagggaggagcagatgaagcgcgaactccagagcgcgtgggagaggctgcgcgtggccgaggaggctgaggagaggctctgctcccagctcggagagctcgaagcagaggccgtttaccacgcgcgtgactaccacgcgcgcatcgtctccctcatggaccagctctcacgcgcccagagcctcctcctcaagactagtgcctcctccatttcgcttccttcctcctcctaaatcataatcacacacacacatatatatacaaagattgtaataaatttttttcattttctggtcagagtcattgtgattattagatgtatatgatgatgatcatgatcaagatgatccatatcgccgtggatcgaatgtgttgtaaaattttggtggatgattgagaatagtttgattggtttagagattcgagacctaattaagtaacgttcttcacgagtttttccgttctgtaatttttttactattttgttttggtgtccagaaaactcaattgcctcattttggaacttgtaagtcaatgtcattattggattaattcttggaattaaaggagatgatggaaatgtcgagtttgtg

SEQ ID NO: 15117 - DNA, 262 bp, Glycine max
  unsure (1)..(262): unsure at all n locations
  Clone ID: PAT_MRT3847_113657C.1
nacccaanncnacncanngnagtcgngganntccccncnatagtcngtcngcacctctcggtnaanannccacgntnctagnagnattngctantatcnngatacggctgattatcattnaggtctgatganntggangatcngtgngcatgatnnaagncatacgcttgagncctnnnatnannnaaattaanccatgantnnangnacngtcnggnngnccancaagnnagaaantctgcantgnctctgnagacttcan

SEQ ID NO: 15118 - DNA, 561 bp, Glycine max
  unsure (1)..(561): unsure at all n locations
  Clone ID: PAT_MRT3847_113658C.1
aaatcacaacaatttctccgtctccggtggcttgcttccttctccggcgtcatgagtaaatcgtagcagcagcaggcgcggcggagatcggttccggcgtggcggatctgtgtgatggtgtcgcacatactagggtttcatggcagatagtgaccctccatctttaggtcgtgtgaagcttactgatttagtcccttggaacgggctagcatctgattcctataaaatatcagtttcaattttgtcacattctctggctcagttttctgcagtcatcgttcagtttccagcaagtgacggggctattctgcgatctggtttagaatctgctcgcatgtatttccaccaaagggaaacgtatccacctgcagatataatcaatcctggtgagtctcgtgagtggtgcaaaacatctctggttattatgcagattctcatttgtggcaagaaacttatgactatagacctggattaactccttcagaacctaataattccattgagttccccccccccnncccnncaagcagggttgccagacatatttgccttatttggaaa

SEQ ID NO: 15119 - DNA, 554 bp, Glycine max
  Clone ID: PAT_MRT3847_113659C.1
ggctcgagcaacaatttctccgtctccggtggcttgcttccttctccggcgtcatgagtaaatcgtagcagcagcaggcgcggcggagatcggttccggcgtggcggatctgtgtgatggtgtcgcacatgtaaatcgacccttcctttttgcacttctgagtattacctgaaattggttttagcagtttcttatacccacaattctacttgtctagactagggtttcatggcagatagtgaccctccatctttaggtcgtgtgaagcttactgatttagtgccttggaacgggttagcatctgattcctataaaatatcagattcaattttgtcacattctctggctcagttatctgcagtcatcgttcagtttccagcaagtgacggggctattctgcgatctggtttagaatctgctcgcatgtatttccaccaaagggaaacgtatccacctgcagatataatcgatcctggtgagtctcgtgagtggtgcaaaacatctctggttattatgcagattctcatttgtggcaagaaacttatgactataga

SEQ ID NO: 15120 - DNA, 216 bp, Glycine max
  Clone ID: PAT_MRT3847_11365C.1
ttctcgagctgattcggctcagtcattctttgaatctttatggccttaatattgccttaaagtttgctctcttgcccccatagtcactgaaaattcttgggagaatctcaaaatcaggtttttctctcttttatttcttcccttttctgtttctggggcttaaatttcacttgagaattcattgaacccagatacaaagattcaatcttagccccc

SEQ ID NO: 15121 - DNA, 1194 bp, Glycine max
  Clone ID: PAT_MRT3847_113660C.1
acggttgcgagaagacgacagaaggggatacagaatacagattgacagagtccaacgttgcattgcagaggtttggtgtttgtcatgtcataaggcatgggcgatagggtggaaacgcttgccagattagcccagtggaaaatcgacaacttcggactttgttcctacaaaaaatctgaccccttcaaggtcggaatctggaactggtacttttcaatagtgaggaataggtacctctacatacatctttttccagaaccttcgcaggttttgaaggataacccaccctttgctcgattcattcttcgagtctccaatgccggatcatcccgcagctttcatatttcccctgttcaagaaaagctgcttaggacacatgacgactttgtctggcctgtggatacaacttttgttggtcgcttcatcattgatgttgagtttctagacctaaagatatgccctcctaatggtggagaaactagtcctgtatggccatctgatggaaattctcaatccattgcatttcaaagtagcattcttcgttgcctctctcgtatgcttgatgaggctatacatgctgacctaactatcatgacagccgatggaagcacgttgagagctcataaggcagttctctcagcaagttccccagtgttccagagcatgtttcatcacaacctgaaggaaaaagagtcctccacgatccatatagaagacatgccactcgagtcctgcacggctcttctaagttacttgtatggagcaatcaagcaagaagatttctggaaacaccggcttgcattgcttggagctgctaataaatatgacattggaagtctcaaagacatctgtgaggagagcctcctggaagatctcagcgcaggaaatgttcttgagatgctaaatgaggcttggctttatcaattgcacaagttaaagaaaggatgtttggtgttcttatttcaatttggtaagatacatgatattaaagatgaaataaataattttttccagcatgcagatagggagctaatgctggagatgtttcaggaggtgctttcaatttcgaacccgatataggttaactcatggatcctgtatatgatatatcgatgtgtataataaagtttgttgtttctaccgcaaaaaaaaaaaaaaaaaaaaaaaaaaaaagcggccgctctagaggatcca

SEQ ID NO: 15122 - DNA, 235 bp, Glycine max
  Clone ID: PAT_MRT3847_113661C.1
gaacgatggtttgaggatgagggctcatgtgctgctttaggagctgagccacatgatcgtaggactgaaccacttgacctaggcaaacgatgtgacactcctagcatttggactttctagataagcaccctggatattccttctttaccaaggaagccttcgttgtgccatgcatcatgtaatggcggaagaggctcatgagactatgcctcaactgatgtaccatgacttcatg

SEQ ID NO: 15123 - DNA, 1247 bp, Glycine max
  Clone ID: PAT_MRT3847_113662C.1
cccacgcgtccgtaatgagtgagtagatgttacaggagaatttataattgctcttcttcttatatactatggtatatgacataagtttggaagtcaaaatggtttagacacagtccaacgttgtaggtttggtgtttgtcatgtcataagacgaagaaaggcatgggtgatagggtggagacgcttgccagattagcccagtggaaaatcgacaactttggaccttgttcctacaaaaaatctgaccccttcaagctcggaatctggaactggttttgaaggataatccacccttttctcgattcgttcttcgagtctccgcagcttcatatttcccctgttcaagaaaagctgcttaggacacatgatgactttgtctggcctgtggatacgacttttgttggtcgcctcatcattgatgttgagtttctagacctgaagatatgccctccgaatggtggagaaactagttctgtatggccttctgatggaaattctcaatccattgcatttcaaaataacactcttggttgcctttctcggatgcttgatgaggctattcacgcttgcttacccatcatgactgctgatggcagcacattgagagctcataaggcagttctctcagctagttctccagtgttccagagcatgtatcatctcaacctgaaggaaaaatagtcctccacaattcatatagaagacatgtcacttgagtcctgcacggctcttctaagttacttgtatggaacaatcaagcaagaagatttctggaaacaccggcttgcattgcttggagctgcaaataaatgacattggaagtctcaaagacatctgtgaggaaagccttctggaagatctcagcacaagaaatgttcttgagaagctaaatgaggcttggctttatcaattgcataagttaaagaaaggatgtttggtgttcttatttcaatttggtaagatacatgatattaaagatgaaataaataattttttccagcatgcagataaggagctaatgctggagatgtttcaggaggtgccttcaatttcaaacccggtataggttaactcatggatcctgtaaatgatatatcgatgtgtataatcaagtttgttacttttttattgtacagtgtaacttttcgtaatacttaactgtcctctgcctaaaggcctggaggttaagggtaaatgaaagtgtatttgagtgatcatttacaaggtatattatttagtacttatgg

SEQ ID NO: 15124 - DNA, 435 bp, Glycine max
  Clone ID: PAT_MRT3847_113663C.1
ggaatgaagctacaatcttcattgaaatactctcagtcttacactaaatacatggacgcacacaaactataaactaacattggctgataaataaaacactatataacatggacccacaaaaggggaccccaaatgacagaaagttaacaaacatttacttaaaataattttaaaaactgtttctcattcatgaaaataaaaacctccccaccatgggccaaggttgaatccaaaaactccctaactttatcagtataaaaaaaaggttgaggggcagtaaggtcactgtccaagttataccaaaccccataaattttcctcaatgcaatccagggcctacttttccaaatcccagcaaaccttgtcactgccacattgatcacaaaccccataaaaacatcctgggggccataacaatcaatggaagatgccccc

SEQ ID NO: 15125 - DNA, 966 bp, Glycine max
  unsure (1)..(966): unsure at all n locations
  Clone ID: PAT_MRT3847_113664C.1
aaaaaaagtatccactttcccttcttcttcttccatttgggttttctcaaaagtgaaaagcaaattccgtgacttccacaatcaccactcggatcagtatgcacaccagtctcagaaaacccacaagaacaaaaatcagatttttccaagtctgttttttttttttttttttttatccaatcctttcttgccttttaggcgacccagttgaaaattttgagatttttttattgtttgatgtgtaccgattttaagattggatctcttttgatttagctgtttgagatttctttcttctttctctctctctctctctcttttggttggggactgtgttgaattatcttatgatgtttccaatccttgtttgttttgtaggtgacccagtttaaaatttgagatttttttcttgtttgatttgtacccatttgaagattggatctcttttgatttggctgtttgagatttctttcttcttctttttttctttgggggctggtgacagtgtgttgaattatcttatgatgtttccttttaagcacttgttgttggatttcaatcatttcactccatttattgatatatttggtttttatttttgcatatttttttgaaatgtatccagttccgttattctcaatttcctctgttcatatttttattacaacagnnnnnnnnnnnnnnnnnnnnnnnnnnnnnnnnnnnnnnnnnnnnnnnnnnnnnnnnnnnnnnnnnnnnnnnnnnnnnnnnnnnnnnnnnnnnnnnnnnnnnnnnnnnnnnnnnnnnnnnnnnnnnnnnnnnnnnnnnnnnnnnnnnnnnnnnnnnnnnnnnnnnnnnnnnnnnnnnnnnnnnnnnnnnnnnnnnnnnnnnnnnnnnnnnnnnnnnnnnnnnnnnnnnnnnnnnnnnnnnnnnnnnnnnnnnnnnnnnnnnnnnnnnnnnnnnnnnnnnnnnnnnnnnnnnnnnnnn

SEQ ID NO: 15126 - DNA, 462 bp, Glycine max
  Clone ID: PAT_MRT3847_113665C.1
tttggccgctgctatcatgtgtaggagtaccgccttcttggggggggggggggggggggggggggggggggggggggggggggggggggggggggggggggaaccaccaggcgtaggttatggcccagtacttttatagcgctagggggcagggatagggttaatagccgagtaaattattccttattaggggttaaagcatgccgaccacgacgaaaaagctgacgagctgattcatggggatttggggaatatgaaaaccggaagagatatggcaactagaccgagaccttgaaaaggccaaaaaaaggaaatggcatgccagcgacccgtatgccgctttgaaactaagcctcgaacggggttgttgagaccgcccctaaaggctctataagtagcgggcctagagatagtatggggtaaaaacaggttgagcaattaggggataccactaacaaacaa

SEQ ID NO: 15127 - DNA, 320 bp, Glycine max
  Clone ID: PAT_MRT3847_113666C.1
tttttgattttttttcttcataagggcgcacatgacacggctgaggaatggtttgcctgaggcgaagaggaggaaccctttgcggaagttttaactaacgcactatctaatggtgctggtggtccggactatacggatagaatcaactctcgccgcatccgagggattgcctcatgtgctcacactgcaagaatggagaaaaaggcaaacggagatttgatactatttatgccgctgagaggaccttgattccggaatccatcgctgaacagtcttacatcaagcatggattagaccatcggatagagcctactacattg

SEQ ID NO: 15128 - DNA, 1030 bp, Glycine max
  Clone ID: PAT_MRT3847_113667C.1
ctcgagccgcgtgtgttgaatgtgtttgaagacacatggcggcggctacagggttacttaataagcccctgttggtggatttttttatgaattggtccatatctcttaaattgagcatttgctgcgaaatttgaagattcaattattcaacgttccagaagagttctttgtttccatttatatatagcacctggaattggctttggagttcttatacttggttttgaattctggattttggattgtgttctgctcagttttgttaaggagaaagtgtgcttaggaatttctggtattatttattattagcgtgcttggttccacattccagacgccccagacgtggtttttggcgtctagtaagaagctaatagttataactttcacatctcagacgaggttgttgacgtttaataagaagctaattaattatagctttcacgtcccagtcgtgatttcttgcttctcaacagagaattgagttgatggggggtaacaattccaaggaggatagcaattggaggcagaattcacctgtgcgttcaagttcttctgcgtcttcttggggttcatatcctgaccccaactcgggttatggtcaggggggttacacttatgagcagcaacagccttcttatcctacacagcaacaatattatggccagtaccatgttttggtgatagttgcggacggccaggtaacaagaagtattgacactgagcatgggagactaagtccacaggagcagagcactgtggatgccattgttgaggccagtaaatttcctctttcaatcatattggttggtgttggagatggtccttgggacatgatgaaggagtttgatgacaatatcccagcccgggtctttgataattttcagtttgtgaatttcacagaaattatgtcaaagaatattcctccttctcgaaaagaggcagcatttgcgcttgcagcactgatggaaattccttctcagtataaggcaacaatagagcttaatctcttgggtggtcgaaatgcaaatgc

SEQ ID NO: 15129 - DNA, 447 bp, Glycine max
  unsure (1)..(447): unsure at all n locations
  Clone ID: PAT_MRT3847_113668C.1
tttgggctgactgtatgtgcttgtttgatctagactcgggcgtccctcgccccgatagtaccgcactaagagtcggacgaaagangaaacgaaaccgagaaccgggagcattagtggaaaaaagaagacgattcgtaaaaaagaacactcgaagcctatctaagtgcctactactccgagccgaccgagaaggtcaggactaaagcctagttatcgtacggatctgatactaaatgggtgactgtcggtatcctcctaagggtcgactccgacactttagaactcgccggctcgtttatcttactcgtggttaagacgctgaggccatgggaattcgaccttggtagatgcggcaagaggaaaactcagtcagttaaatacagaacctattccgcgcaatagctagccccagtcactagtcgcaaggcaccccctctatacgcatct

SEQ ID NO: 15130 - DNA, 361 bp, Glycine max
  Clone ID: PAT_MRT3847_113669C.1
tctatgaggtgtttgatgtctggggtatagatttcatgggccctttttcctgtcttttttgattatgtttacattctcctcacagttgactatgtttcaaaatgggtggaagccaagcccactagagctaatgatgctaaagttgttgcagattttgtcaggtctaatctattttgcagatttggagtacctaaagcaattgttagtgatcaaggaacccatttttgcaacagaacaatgcatgcccttcttaagaagtacggggtggtacacagggtatccacaccataccacccccagaccaatggacaggcagaaatttctaacagggagatcaagagaattttagagaagattgtgc

SEQ ID NO: 15131 - DNA, 270 bp, Glycine max
  unsure (1)..(270): unsure at all n locations
  Clone ID: PAT_MRT3847_11366C.1
angtaananaaaattgcgtacaggnatctgcagttctgggtggatatggtaaantgaggacatcaaggggtgangacttcatagagaaatcaagtagtngtgacattctngncgatganagagaaantgtctgctgcagagatggattggcnggtatatgtggttctctttcatccgaggctatgagttcctgnatagcangtcagttgattcctgtagaaggnaacagggatangaagttcctgaaagtatacccntgatgcnantccc

SEQ ID NO: 15132 - DNA, 1558 bp, Glycine max
  Clone ID: PAT_MRT3847_113670C.1
gttgtttattatttgaacatcctctctctctctcacaacaccgattccagaatattccgaacgtcatgttccatcgccgttcagatccagagaattgagttgatggggggtaacaattctaaggaggataataacaattggaggcagaattcatctgtgcgttcaagttcctctgcgtcttcttggggttcatatcctgacccccaatcaggttatggtcacgggggttacgcgtatgagccacaacagccttcttatcctacacagcagccgtattatgcccaaccgccgccgccgccgccaaactatggcaatgaacctcagcctcatgctagcggcagagtggccggccacagaaatgagaagcggttagacaggaaatactcgagaatcacagataactacaactccatagatgaggtgactgaggctcttgcacgtgcaggccttgagtcttcaaatcttattcttggtattgatttcactaagagcaatgagtggacaggaaagcattcatttaacagaaaaagtttgcatcacattgggaataagggttattgtataattctaggcttgtcaatatgagtggtaagttgaggtccatttggagtgggccttttgattccactaattggattcctggatgtacagttgaggtcaaaagcgactccacaaacttgagcttcaaggtcaacggacatcgacttaagccattcctcacgaacccttctttagtgtatatatggttgggagagtagttgctacagcatcattactctatatgcgatgaacatgagaagttgtactttcacgagcctttttgtttactttaacacttttcatttcttatcctggatcctttagtagcatgatctttttctgtctgagagctagcttctttttagccttctctatatccttctttgttccccatatagaagtagtctccgcaaacttctgctgctgagtcatctcttccaacgttgaatttgcaggctcattttcaaaagctcccacgcctttaaccttcggctccaatctgaatatcttattaccagcaatgggcacaaccttcagggtcccggcttccttgtcaagaccccaagtgcgtacttggcacggtgtctggccgcagcctcgccagcataactggttccaacaaattccactgaagaccggggagggcgaaccacaagctccagcctcttgggcatgctcctgtgccggtaaacttgaaaattggagggaccgccgccatgattcttgaccggatcaaatccggaagggaaataaccaacaacaggaggtgttttattggggtgctcacggacaacctcgacctcaacctcaatctgttcagattgaggttggacaacctcaacctctttcttcttgttcttctttttcttctccttcttgggatgcttgggttttgtttcttcagtgtccgaatccattattatactcaacgatgagatgagctcacgccgtgacagtgataacaccgatgtgatgagagaaccctaaaccccaactgaaccctagggcggacgcgtgg

SEQ ID NO: 15133 - DNA, 286 bp, Glycine max
  Clone ID: PAT_MRT3847_113671C.1
aagagcacagaacgacataggggctattccatttctattctgagcgtcatgtgcaaagataataggcgcctctgagcaagctagcgcggggggatccacctaaggccctcctttgtctacggaccggatgctcgggtcgacaatgacttccataactaaggctgatgagatgaagcaggtgcttacaagtttggttccaatacagatgggctaatttctcaacaggagttcaaagccaccatgaagggtctaggcatgggggattcaatttatttataacatgatg

SEQ ID NO: 15134 - DNA, 1983 bp, Glycine max
  Clone ID: PAT_MRT3847_113672C.1
gcgttcaccaagagttgattattatttgaacatcctctctctctctctcaacaccgattccagaatattccgaacgtcatgttccatcgccgttcagatccagagaattgagttgatggggggtaacaattctaaggaggataataacaattggaggcagaattcatctgtgcgttcaaggtcctctgcgtcttcttggggttcatatcctgacccccaatcaggttatggtcacgggggttacgcgtatgagccacaacagccttcttatgctacacagcagccgtattatgcccaaccggcggcggcgtcgacaaactatggcaatgaacctcagcctcatgctagcggcagagtggccggccacagaaatgagaagcgcttagacaggaaatactctcccgtcacagataactagtccgcttcgtatttttgggttttctgagaagtgcgtgtgttgatggggggtcaaaattctaaggaggaaagttggaggcagagttcatctgtcaggtcttcttcttcttcttggagtgcttacttggatccactatcgagttatggtttcaatgaaccgcaaccatcatattcttcttatggctatgaagcttatggtggcgatggaatggtacgctatgatagtacaaagctagagaggaggtactcaagaatttctgatcattacagttccatagatcaggttagtgaggctcttgcacttgcaggccttgagtcttctaatcttattgttggtgttgatttcaccaagagtaatgagtggacaggcaagaattcattcaataggcgaagcttgcatcacattgggagaggtctgaacccttatgagcaagcaatatcaattattgggaaaagcttggcagcattcgatgaggataacttgatcccctgctttggatttggagatgcatcaacacacgatcaagatgtcttcagtttctatccgagtgaaagattttgcgatggatttgaagatgtgttgagtcggtatagggaaattgttcctcatcttcgacttgcaggtcctacttcatttgcgccaataattgaaatggccatgagcattgttgaacagagtggaggccagtaccatgtgttggtgataatcgcagatggccaggtaacaaaaaatgttgacactaaacatgggagaccaagtccacaagaacagaagactgtggatgccatagttgcagctagtaaatttcctctttcaatcatattggttggcgttggagatggaccgtgggacatgatgaaggaatttgatgacaatatcccagctcgggcctttgataattttcagtttgtgaatttcacagagattatgtcaaaaagcatccctccttcacgaaaagaggcagcatttgcacttgctgcattgatggaaattccttctcagtacaaggcagcaatagagcttaagctactgggtagtcggcaagccaatgctcctcaaagacatgctcttccacctcccagatatagttctcatgctgcaaggtttgagccaagtatccctcctcaacatggcaacagccacccatttgccacagctccttctgccccaagttccacttctgacaatcaactttgtcccatttgtctaagcaatgcgaaagatatggccttcggatgcgggcatcagacatgctgtgaatgtggacaagatcttcagtcatgccccatgtgcaggagccccataaatacaagaattaagctttactaatcgtatgtggcttgggaattggtattattttttttcttatttttgtgttgtgccagtcacaattctttggttttttcttgattcgttaaattcatcaaaggttagaagtaggtgtggttgggtgcaacacttgatcagatgtatgtttccagatatgaaacggggaattctccatcaattattgtagatatattcatttgatgaattatattttttctttttttttcttcctaaaa

SEQ ID NO: 15135 - DNA, 140 bp, Glycine max
  Clone ID: PAT_MRT3847_113673C.1
cctgacgttcagtgcactcatccttgctgtttaagtatatctgcgcatgatatatgctgggatgaaacctgtccttcacattgacgtgaagttgttatctagaggacgtatctatcttgaagggtcttgtcatgacacaa

SEQ ID NO: 15136 - DNA, 390 bp, Glycine max
  Clone ID: PAT_MRT3847_113674C.1
aactccaaagataactcattctttggcaaaataggatttacaaagtctaattcacaacctaatgggttgagactttagtttggcctatgaaatccacccatagctccatctaaaacttcaggaccgggttaaatttagggtaatcttattccaaagactttgaaggggttttcaccatgggtcaggactttaattcacatttggcctttttcttccactgggaattttcaactgggctccagaaacttcccaccccccagggtaaaccgggaggaaaaaatccagatatttttttgggagactgttgaaaagcatctgttggctcttgttgggaccctgccacagctgcagttgctgctgctgtcatggcagctgcaactggccccattt

SEQ ID NO: 15137 - DNA, 4558 bp, Glycine max
  Clone ID: PAT_MRT3847_113675C.1
attggagtaccagaccggggtgaaagtgttctaccagtattgattcttggtgtttacaagaatcgttttatatttgttcattctctttccctctctctctctctctcaaccccgattccagagtattccgaacgccatgtttcatacgccgtccagatccagagaattgagttgatggggggtaactattccaaggaggatagcaattggaggcagaattcacctgtgcgttcaagttcttctgcgttttctttgggttcatatccagacctcttactcgggttatggtcaggggggtttacacttatgagcagcaacagctttcttatcctatacagcacatctatattgcacagccactacgtctactgtcacaaaactatggcgatgaaaatcagacttattctaatggaaagttgaccagccatagatatgaaaagtggttagagaggtagtactcgtgaattttgagtcaacacatatttttcgaagtgttgacttcaccaatagctcatggggggcatgagtcttctaattttatacatgatatttgcttcactttgagcattgactggacaccaaagcattactttaacagaaaaagtttgcataacattggtaaagttgaaaacccctattaacattcaatatcatttaatgggaaaaccttggctgcatttgatgaggataacttgatttctatttttggattcggggatgcattcaacacatgatcaagatgtcttcaagtttctatccagatgaacgattttgcaatggatttgaagaagtgttgagtcagtatagggaaattgttcctaatattctacttgcaggtcctacttcatttgcaccaattgttggaaatggccatcgacaatagttgagcagagtggaggccagaaccatgttttggtgatagttgcagacggccaggtaacaagaagcattgacactgagcgtgggaggctaagtccacaggagcagaggactgtggatgccattgttgaggccagtaaatttcctctttcaatcatattggtcccttgttggggatggtctttgggacttggtataccacatagatgataacaaaccatattgcgccttcgataacttttacagcgagcatttgaggtccattttagaattttccttgactgatttgcgagaaaaatgagtttaaacacttggcggtttaatagagacatggtcgcctgcaagctccagtctcttgcgcatgctgctgtgccggtaaacttgaaaattggagggaccgccgccatgattcttgaccggatcaaatccggaagggaaataaccaacaacaggaggtgttttattggggtgctcacggacaacctcgacctcaacctcaatctgttcagattgaggttggacaacctcaacctctttcttcttgttcttctttttcttctccttcttgggatgcttgggttttgtttcttcagtgtccgaatccattattatactcaacgatgagatgagcttcacgccgtgacagtgataacaccgatgtgatgagagaaccctaaaccccaactgaaccctagaggctgagctctgcgcttcgtttaacaaagtagaggtaaacatacctctgttggatgcaataaagcaaattccaagatatgccaaattcttgaaggagctgtgcactaataagcggaagcttaaaggaagtgaacgaattagcatgggcagaaatgtctccgcattgattggtaaatctgttcctcaaattcctgaaaaatgcaaagatccaggtacattcagcataccttgtattatagggaatagtaagtttgacaatgccatgctagatttaggagcctctgtgagtgttatgcctctgtcgatttttaattctctaactctaggtcccttgcagtcaactgatgtggtaattcatttagctaatagaagtgttgcctatcctgttggattcatagaagatgtcttagttagagttggtgaactgattttccctgttgatttttatatcttgaatatggaagatggattttctcaaggaccagttcccatcattctaggcagaccctttatgaaaactgctagaactaagatagatgtttatgcaagcacactgtctatggaatttggtgacataactgttcattttaatattctggatgctatgaaatacccatctgaagatctttctgtatttcgtgctgaaataattgaccatgttgttgatgaatacatgactgatctttattctaatctgcatgcctctcactcttcatgcattgagtctgaaattgtacttgatcatatgtctgaatttgatgctgagagtgaatctgagagtgatattgattgcatgcctggtggtggtgttttacctcttgagattgattttatagagtcagataggactaaccatgtttcaggaagtacacatacctctgactttctttatgaggtaaaggctgagaaaccatctccttctaccactgtccagccgaccacaccagaattgaagcctctgccatcaaatttaaaatacgcttacttggatgatagcaagagttttccagtgattatatctgcctcccttgctgatgagcaagaggagaagttgttgtcagttctcaagaagcataagaaggctataggctggaccctggcggacatttctggtattagcccatccacatgtatgcatcgaataaatttagaggatggagctaaaccagtaagacagccacaaagaagactcaacccggtgattcttgatgtagtgaagaaggagataaccaagcttttgcaagctggaatcatttatcctatctccgacagccaatgggtgagtcccgtccaggtagtcccgaagaagaccggcctcacagtgataaaaaatgagaaggaggagctaattcctactcgggtgcagaacagttggagagtctgcattgactataggaggctgaaccaggttaccaaaaaggaccattttgcccttccattcattgaccagatgcttgaacgcctggcaggattctacaggcgctttataagggattttagcaaagtagcccttccattgtccaacttgttgcaaaaggaggtggagtttgactttaatgacagatgcaaagaggcttttgattgcctcaaaagagcgctgactaccacccccatcatccaggcacccgactggacagccccttttgagcttatgtgtgatgcatcaaattatgcattgggggctgtccttgctcagaaaattgataaattgcccagggtgatatattatgcttctaggactttagatgctgcccaagccaattatactactactgagaaagagcttctagccatagtttttgctcttgaaaaatttcgatcttatttgcttggtacccgcattattgtttacactaaccatgcagctctaaatgatcaggtcattagacggtgcattccagatcatgagactgactcagtcctgcagttctgtcattcttccgcaccgggaggtcatctgggtgttcaaaagacagctcgcaaagtgcttgattgtcgtttttattggcccaccatctttaaagatgcgtggaagatctgcagcacttgtgagcagtgtcagagagcaggaaatacacttacatggcgacaacaaatgcctcagcaacctatgctattctgtgaggtgtttgatgtctggggtatagatttcatgggtccttttcctatctcttttggttatgtttacattctccttgcagttgactatgtttcaaaatgggtggaagccaagcccactagaactaatgatgctaaagttgtcgcagactttgtcaggtctaatctgttttgcaggtttggagtacctaaagcaattgttagtgatcaaggaacccatttttgcaacaggacaatgcattccctgcttaaaaagtacggggtggtacacagggtatccacaccataccacccccagaccaatggtcaggcagaaatttctaaccgagaaatcaagagaattctagagaagattgtgcagccaagcaggaaagattggagtaccaggcttgatgatgctctctgggcacatcggactgcctacaaagcacccataggaatgtctccttatcgggttgtctttggaaaggcatgtcatcttccagtggaaatttagcacaaagcatactgggcagtgaagacttgcaacttctctatggatcaagttggcgaggaaaggaagttgcaactgagtgagttagatgaaatccgcctagaagcgtacgagaatgccaagttctacaaagaaaagaccaagaagttccatgatagcatgatagttaaaaaagacttcatggttgggcaaaaagtgttattgtataattctaggcttggactcatgagtgttgagatcaaaagcgactccacaaacaagagcttcaaggtcaacggacatcgacttaagccattcctcacgaacccttctttagtggacgtagtggtggaagagacttccttactccaccctactcttcctccaccatga

SEQ ID NO: 15138 - DNA, 539 bp, Glycine max
  Clone ID: PAT_MRT3847_113676C.1
cccacgcgtccgcgcttcaaccccaattgttcatagcccgatctagtatatacctaaaggattggatccttttcttggttaattctgaaaggctaaaactggtagaataagagtttaacggaaaattgggatttgggtcaacagctataaaccctaatcaactaactacaatttgcgttgctaaatggaacatcggaacacagaatcagaagctggagatgtttcttcagccacagcagttctccttggagctttagctcctggtgttaatgtccgtattttcactcagcgatctctcccatttttaatttttatactcttttttcattagatttttgtgattttattgttttttgattcagggtcctacatggattactttaaagtcctcttttttaatgctgggtctctgtcttactgttatgctggccttagcattctcttccagtgattcatggttgattttccatgttgcattccttgttctaatttgcctcaccctcttcttgcttctcagctggtactttcattcttcccta

SEQ ID NO: 15139 - DNA, 345 bp, Glycine max
  Clone ID: PAT_MRT3847_113677C.1
ctttgggctgatttatgtgcttgcatggtcgtgagaagatgatagaagggcatggtcgtgagaagatgatagaggggaataaatatagcataaataaaaatgccggaagaggaaagcggtggcgaaaaacgaaagcgatccggaagaataagaagaagaaatgccgcccatttatgccgctatatcctatcgattcctttcccgagtacaactactaataatatcttaatattgatgtcgaagacggtgtgtacgcctttgatgttatataaccggtcaatgaaccctaagtctaaggagataagtccgtcacggacgggaagcattgggaagtatcaagcaaac

SEQ ID NO: 15140 - DNA, 881 bp, Glycine max
  Clone ID: PAT_MRT3847_113678C.1
aaaataagtttattattattataaaatttaaaataaaaaacccatgtgatcctagagtatgaaataaagtagttgcgacaaattattcgataacaaattgcaggcatagaatatgcactacatgtgctcagcaccagcgacagcattattagacagtaacttgacatgttcttgtagagtggagaggcctggattgctacggtaatggtacatcaaagggaccattctagcagcattgaggcagaaattggtaaatgatgatggcaattgattttgggtgaggatttctcgattgagacgtttccattcacatgaaattaagtgggcaacatgcctttgggcgtcttcagctgaaacatcttggtgttcattcatgtagcaatcaatgtatgacccatcaagtccattttgatcttcactcttagctccttccaaatcatcagaaagacgaagaattttagccaccgaatgtataatttgtggaacgttgtccacgatagcaacaatttcgttatttatagaataatccatgaggaagaatgaatggacaagcaccacatgcactcctgtgctcacaattccattgttcaagtactcccctgaccttggcaaatgaccagaattcaaccaatgtgcctcttccaagaaagcattcaacaatcgaacccacgatcttttcagggtctctatagggttgaatccatgcttcttgtagatcttttcggcaaagtcattggtaatttcgtaaagaactcttaaacacattttcatgaagtctggaagttgctctgtactagccaattcccacccacgcgtccgcccacgcgtccgcccacgcgtccgcccacgcgtccgcccacgcgtccgcccacgcgtacaca

SEQ ID NO: 15141 - DNA, 369 bp, Glycine max
  Clone ID: PAT_MRT3847_113679C.1
gcctcgcgtcccatttaagcactgtaaaacacaaccctattaccttgtatacatatcttgcaaaactcaatcatgggcagtgctactacccttatagctgcatttaaaacgcccgatgggaaggtggcgaataccactgtaggtgcgagtggtctaagcgcagacactgcgctactcttatctcatcaaggagcacatgctgccatagctgatattcacgaccacttgggcctatatgctgccaaagagacagaatctgcttactatgtccattgcgatgtgacaaatgaagatgacatcgataactgcccgaacacaccggattccaagtgtaggaaatcatatatcatgtttaacaatgcaggtgta

SEQ ID NO: 15142 - DNA, 337 bp, Glycine max
  Clone ID: PAT_MRT3847_11367C.1
ggaaaaccaggcgcgacccacgcgtgcgacaggaccaagaaggacccatagcgggctctactaacaaaatatcatactggtatcaaatgcactcattatgcgcgaaagacttaaataaagtgcatgataaacatacaaggtctagttaaaagctgagtctgcaagcaggtgaagatagcgtcctttgaggcttaccactaagcatagtgatcgctatgacacatatcatactcgactccgcgttaagaatacattacagtgccacatcgccagcaccggtacatcaaagactgtgctttgaagcttccaaaaacatctctttcagtgcaaaatgaga

SEQ ID NO: 15143 - DNA, 157 bp, Glycine max
  Clone ID: PAT_MRT3847_113680C.1
attcccggggtcgacgccacgctgtccgccaccacctacaggccctttggactcattgtgataaccgggtttctgtttgtctttgggttgttttttttaaaactcaattaactgtggactcgggttaatccttttgttgggattcaaaacagtgatg

SEQ ID NO: 15144 - DNA, 627 bp, Glycine max
  Clone ID: PAT_MRT3847_113681C.1
gaggcaatagccgaccccatactgaagtccaaggctgcccatatggggagacacgcaggaaccgggatcgggacagggatagagaacgagataggggtagggatagagacagagatagggacagggtcagaacaaaatccagagatagagatcgagtaagggattctgacaaagaacgtgaacgagaggaagctgagagggacaaactcaaggatcgtggtcaccgttctagggagagagcaaaggattcaggacattcagagaagtcaaaacgccattcgtcgcatgatcgggtttcttactcgtcaagggagaaagatcggcatagacatcattgacattagtttagaggatatttcaagatgaacctgcttcggtgtccatgacccctgtcaaagtcagtcaactgatcaagcactgcacgtcctttgatcttataatcagtaaacaatttagggtcttatttgagaagtacttatgtaaacattttatgtataacttttttttgtttatagtcgaagagagattgagttattctatttgtagaatagagtcaaaattatttttatgttattttgaagagttaattgaaatccgttaaaaataacatataggcatattataagt

SEQ ID NO: 15145 - DNA, 435 bp, Glycine max
  Clone ID: PAT_MRT3847_113682C.1
aatgcgtcatcattgatgcatattattacattattcagaaggtaaagaactaccttttgaatgtaatgtgtcatccggtttcatcgcagggaaaagcaagacttctttgatgttacttgaatctgttaagaacatggccaatcgatcaacacccataccccaaccacccgttggtggtaaaccgtaatctaaagcgtgacaaaagccttcatcgaccatttgtgcttcatcatcacccatttctttatcttttgcttgatgttcaaatcgtttccgttgatcaattggatcgtttaattccgtgtatgcattacacacttcttttgtcgccacaaaacattcaaagcgttcacaaagtccttttgtatctcgatgctttttggctaatggggacatcatttctggatgaccacagataaaagttggattaataca

SEQ ID NO: 15146 - DNA, 306 bp, Glycine max
  Clone ID: PAT_MRT3847_113683C.1
atgtatgaaaaggggatggataagtctgaggacgtggctactaatgagagggtcaatgttgaggcctcacacaatgataagttgaacctgttactcagaggaaacgactttagtctctttcacctccgttgttgtcgtaatgatgcctgcatgaaaccaaattgggttttcttagctaaggagaaaccccaaccgagtggagagaggccaagcactaggaatacatttgaggttgtcctagaatcggccgacgaacaaggcttggtcattatctttgattcaccaccaagagaggccattaattag

SEQ ID NO: 15147 - DNA, 104 bp, Glycine max
  Clone ID: PAT_MRT3847_113684C.1
agatacccatccaaagaaccccaagctaccaagtgatctcctccttacttaaacaaacgtgcgatcaaagtcccattgaacaaagaaatggatcgaactccatg

SEQ ID NO: 15148 - DNA, 797 bp, Glycine max
  Clone ID: PAT_MRT3847_113685C.1
ggctcgagccttgctgtatatgttttgcagcttagctgatatggcggccaatcctttccatgcactgttctatcttgtgtttatgctttcagcttgtgccttgttctcaaaaacatggattgaagtctctggttcatctgctagagatgttgccaagcagctgaaggtacgaactggcattcattttgcataccatttccctattgacgatatatatttcttaagtaaagcagcagaatattagctaggcttgggttttagccatctttagaagcaagtaatactgtgtctaaacaactattattttgagcttcgacccaactctttttgtaagctttaaaccaacataaattttaattgaactttaaatgaaaggttgtgtatggggccaatggactggaatatagatgactagttgcactttgtcattcttgctggatcttggacttgtatcatggtgtacttacgagtttgtaaatcttgaaatagtgattgtgaaatgctctgttctcttggaattacttccaaataatgattaatgaagcatatggattgattagaagtttaggacaggcacaaaatatagacttgtgcttttactgacttgagttctgtaccagaatttaattgggttccttttttgggatgggaacaaaacaaataagaaaccaatgtgtctatttatccattatatgtcaccaagtctcctctcgatcacttctttttaatgtccatttagtttacaaatttaggttagggttagggtcagggttagggccagtgtcaatgttttgggc

SEQ ID NO: 15149 - DNA, 2540 bp, Glycine max
  Clone ID: PAT_MRT3847_113686C.1
ggcctttccgggcacacgcgtccacccactgggagcatacatattgacctttgtgacttgccatgtgttccaagatataatctccaactccaaaaaaacctctttacatgacacatgtgtatgtttgtgcatgataaattctctttcatttttgggctgcaaatccaactgggtcattattactggttctgagtggtcttgcttcagatcaggtttttttgctaagaacaactcagattttcagtacagtgttactgccaagcagaagttgaattaacgtggataatgattaccgcgcttgaagagtagaagcaataattcagcagtgtttgtgtcaaaatattttgcagctcgagtatatcaaagaactggctagttctcaatgcaaacatctcagaatcataaaatttcttatggctctggcgggttctatgctgagcctgtgcaaaatttggagtcatattgcatgccatcaagtgagaacatagacaattactcttcctctgataacagcagccaaacaacctacccttcagtccaaactttagaacaatattgcacccttgaatctgcttccacaggcaacagtttccctaaccaaaattctccacctgctctcagtttctcatctaacaatagtccattgtcaaagctagagtcaaactcatatgtgttaaggccacagcattctcttgaaattgctagtggctcgcctgaggatgattcttatttgacgcatgaccttgatgacctgacacataagataagagagctggaaactgctatgctgggacctaatgcagatatgctagatatctatggtaccgtaattccagaacctgattcatttttgttagaggctgagaagtggaagaaaatgatggaaatatcatctagaggggatttgaaagagatgctttatatgtgtgcaaaagcaatggctgtgaatgatatggagacaactgattggctggtgtctgagttgcgtaagatggtgtccatttcgggcaatccgattcagcgactgggagcatacatattggagtcctttgttgcaaggatcggtgcttcaggaagcacaatctacaaatccttgaaatgtagtgagcctactggtaatgaactactttcttacatgaatgtgctttatgaaatttgtccatacttcaagtttggttacatgtcggcaaatggagcaattgctgaagctctgagggaggaaagtgaagtccacatagttgactttcagattggccagggaacccagtgggtgagcctgattcaagctcttgctcgccgccctgtaggccccccgaagatccgaatatcaggtgttgatgactcctattcggcctatgccaggagaggagggcttgatattgttgggaaaaggttatccgcacttgcacagtcatgtcatgtaccctttgagttcaatgctgtaagagtacctgctactgaggtgcaacttgaagaccttgaacttctcccttatgaagctgtggcagtgaacttcgccataagtctgcaccatgtgccagatgaaagtgtgaacagtcacaatcatcgtgaccaattgttgagattggcaaagcgattatctcctaaagtggtgactctggttgagcaggaatttaacaccaacaatgcgccattcttgcagcgctttgatgagacaatgaagtactacttggctgtttttgaatcgattgatactgttcttccaagggagcacaaagagaggattaatgtggagcagcattgtttggctcgcgaagttgtcaacttaatagcatgtgaaggagaagaaagagttgaacgtcacgagcttctgaataagtggagaatgcgtttcacaaaggctggatttacaccttatccattgagctccgttattaattcttcaatcaaggatcttctgcagagctaccatggacactacactctagaagagagagatggtgcactatttcttggttggatgaatcaagttcttattgcatcttgtgcttggagatgaaaatcctataacagttcattttttgttactccaggcttctagttaggttatgtatcatccttaacttcttcatacaatttctcctcacttcatagtcaaattactgttttgtaagagagcttccttaatcattatgtcagcaatgcaagtaatatcaagaaaaactatatatcctgaaattttctgaggtgtattttagaacatgtaatgcttaccaaaggtcagagtgatgccaatctataactgcaaagcatgtaagatgaaatctatagcaaaacaatgagtatgaaacttctatttcttagctcttaaaacaaaaaagttccgttttataagcttaattggatttctcctaaactgggttgggtcagagtcttcatattcaccagtaccactgcagcactagcaattatcctacaaaccctctcactgttccttatattgtttactcttctggtaactttatacacgaatctccatgctacttgaatttaattgaatatgggtatattctaatttg

SEQ ID NO: 15150 - DNA, 710 bp, Glycine max
  Clone ID: PAT_MRT3847_113687C.1
aaacaaggtcagaaatggaaatgttgataaaagggataacaagactacggctgcgagaagacgacagaaggggaggacaggggaatggcaaccatgtcccttacatttgcatttgcacttccttcaatcccctctctcagccaatgccatggccgtgctctttacgtcaagcccctccactgcactcccattcaacaacgccacgttggtgcagaggcaggtattgtttgtgagccttgcaatggaacggggtggttagtttgtgacttttgtaatggccaaaagaccaacgtcaaagccgaaaacaataaacgtatctaccgtagatgtccctcctgcaaagccgttggatatgtcttgtgttcaaagtgcaaggtcttcaaatgcgtcacttttcctaatttcaacgactctgagaactgaattcatcatcaactttcttttttcacattttcaatgccaaaattcagcaacaaacgttgtttctcttgtttactttgcattcttcacacctgctcttgagtcttgtctcctacttgtacgattttactactttttgaggaaccaattccatttacttgtcaaaaaagttgaagaaggagattaagagatgattccctgtttccctgtcatcttttttttttttgtatcttatggatacactttaactgatgccattcaaagaattgtaaatttggaagcttgtcatg

SEQ ID NO: 15151 - DNA, 692 bp, Glycine max
  unsure (1)..(692): unsure at all n locations
  Clone ID: PAT_MRT3847_113688C.1
cggccgcccttttcaaggggcccgggtttgggcaccattcctcattccttttacaacaaactgcttggaatcaaatggcaacacttgacaacaccattgaattttnattctaacaancaaanctttagacaannttctacagaccttttttncgnaagaatcnnancggacaaagggggagataggancacactcacacaaaaanctccaaccaanaacccgnaaaaagtagctgcccggaacaaaggcagacaaaaggccaagacagaaaagccaggaaacgcaccanccaaaaagacagattgcccctcattggtacaaccgnnnncaacaaacagcaacagcacaaaacacacncaagcccgcaaangcacaaaancaaaaccaccaacccggcaaccgaccnccccaaaacagcaagcggccccaacaaaggcnacgaaatgggacccccgagcgcccaaatcaaaccccaaaacattaaaacctccccatngacaaanccaaacanccaacaaaacccgacacccccccggcaacccccacaaaaacccaaaancgcgggaaaaaccccaaagccnaacaaataacagcgccaaaagcccccagccagaacccccggaaaacgcggaaaccccccgcaagacccnaaatccacaaacaacccccccctgcccccccgcncaaaccca

SEQ ID NO: 15152 - DNA, 256 bp, Glycine max
  Clone ID: PAT_MRT3847_113689C.1
gacagttgcaagctaggtattccacgcaccgtttccagctatttttgttcactcgtgtcgacgccccaaccggggctccttggaagcctagcgggtgccaaggcacaagacaccacttcaattacatgtaaatctgtcgacccactttatctgatcgagttgcctgaacacccatttgcaagaatcgtgacactgtccctacacccgtagaggagcaggacacatgtcttgaggacattgacgaagaccagcatga

SEQ ID NO: 15153 - DNA, 159 bp, Glycine max
  Clone ID: PAT_MRT3847_11368C.1
ttccgggtcgccccacgcgtccgggatgcaaaaagaccacaaaaggtggcaaaaatttttttacggatttcacttcctacttgcacactgtatgacacaaccctgacaagattccttttgttccgaactctggttttcagggacacaccctcattgaaa

SEQ ID NO: 15154 - DNA, 1005 bp, Glycine max
  Clone ID: PAT_MRT3847_113690C.1
acggctgcgagaagacgacagaaggggagtcttctccttatggaattaatgacacatctattctactataatgcctttgctaatagtgatttgtggaagcacttatctcctatggacgtgttcatcattggatatggcgtgttaaacttcatgtggctaaaatttttactgatctggcgctttttccgcttctggtcactgataaacggaattgagactccagagaatatgccaaaatgtattaataattgtcacaacttggaaggcttttggaaaaactggcatgcttccttcaacaagtggcttgtgaggtatatatacattcctcttgggggatctaagaaaaagctactaaatgtgtgggttgttttcacatttgttgcaatctggcatgatttagagtggaagcttctttcatgggcatggttgacgtgtttattcttcatccctgagttggttttaaaatcagcagcaaaagcatttcaggctcaaagttcttttggagaatgcatatttcgtgaactcaatgctgttgctggtgcagtgacaattacttgtcttatggtggctaatctggttggatttgtggttggaccaagtggcattaactggttgctttcttctttccttaacaaggaaggtttgcctgtccttggtggcatgcttatgacattttacgttggaacaaagattatgttccacatagatgaggcaaagcaaaggtccccctgaactgggacaaataattttatttatatcatactcatgtttagtgctaggagtttcaaatccagtacagaacaatgttcttgacttggaggtgtctgtgggtgccttttttttttgacagatttcctgatgggtgatgcattattgtacataaattgggaaccatgccttctaattttctacatcatctaatgtcacagaatacacggaaaaatgaaaaagtaaatctgttgaacttgaccccctataacaccgattttttggtttattgttctg

SEQ ID NO: 15155 - DNA, 168 bp, Glycine max
  unsure (1)..(168): unsure at all n locations
  Clone ID: PAT_MRT3847_113691C.1
ggcattacacacactgcacagcanttgnacntcactttcnnttgctcgcttaattncgtcaaatgtgcatttggacattncantanatgggcagcgagttcngaaggcttccccncnaangcaatttgggtttcaagccccnannganancngngtcaatgccggctc

SEQ ID NO: 15156 - DNA, 470 bp, Glycine max
  Clone ID: PAT_MRT3847_113692C.1
ctcagtgctgttgctggtgcagtgacaattacttgtcttatggtggctaatctggttggatttgtggttggaccaactggcattaactggttgctttcttctttccttaacaataatggtttgcctgtccttggtggcatgcttatgacattttacgttggaacaaagattatgttccacatagatgaggcaaagcaaaggtcgccctgaactgggacaaataattttttaccataatacttggtgcaaatattcatactcatgtttagtgctaggagtttcaaatccagtacagaacaatgttcttgacttggaggtgtctgtgggtgccctttttttttgacagatttcctgatgggtgatgcattattgtacataaattgggagccatgccttctaattttctacaccatctaatgtcgcagaatacacggaaaaatgaaaaagtaaatctgttgaacttgacaccc

SEQ ID NO: 15157 - DNA, 392 bp, Glycine max
  Clone ID: PAT_MRT3847_113693C.1
aggaagggttctaaaccggggattttttattcacttcaattcaacatatatgtaaagggcaccctcccagattaaatggcaaacatttaactttaaaggaagacattacaaaggggagggtacaaaaagattgggaagacaatgaaacccaaaaagggggcctgggtccttaataatgactgttgattttccacaaagcttactgtaacaaaaagtgtgttaacggaaaaatttcctccatttacttccctaagaatataaaacagggaaaccaacaccctttgccctatgtgccgtttgggcgtgctctaaacattttaccttttgtataccctatcacgggttgttgaccaccaagattttggttggagctctccaaaatttcaccggct

SEQ ID NO: 15158 - DNA, 253 bp, Glycine max
  Clone ID: PAT_MRT3847_113694C.1
gaaaataacttcacacaaattaacaaaagcaaatggcagctaatgtattctcagttagaggttctaaggttcggtcatgggagaggtgttccaaacaagttcggcagcagaggacaaggctttacataatttggagatgcactgtgttactcttgtgctggcacgagtaaagaaagtatcatcaatcagagcttggtccagtagttgaagaaatggcttgacctatgttcaagcagaatttggggttcgtttt

SEQ ID NO: 15159 - DNA, 658 bp, Glycine max
  Clone ID: PAT_MRT3847_113695C.1
caactttcatgcgcatagagccagacaagagcctggtgtgtgtgtttgcctgtatttattggacttcaagctgcaattctcctacttcagcactatcttgggtcacgttggttcattcctcgtcagattctccccgagaaatacagctattataggaggtttgatcaggatacacgacatgctactgactgtgttatttgcatgacagccattgatctgtcccagcgatctaatgattgcatggtgacaccttgtgatcatttcttccactctggctgtttgcaaagatggatggatataaagatggagtgcccaacttgccggcgcccactaccccctgcctaaagggctttcttcactgtttatgtcaataggattaactgaccctgctcagcttcatagttttagtatatgcttaaatgaccaagttttacattgtttttgcttttaatttcgagagaagtgaaatcacacgggctttggtggtcaaccttttcttctcatgaggactgaatgtttcttcttctcatagaaattttgtaatttgattttgccaccttataccatatgctgagggtatatttttgtacacaagttggaagggccatcaacattaaattgtacttttttctcaatacaaaatttatttttattcttc

SEQ ID NO: 15160 - DNA, 446 bp, Glycine max
  Clone ID: PAT_MRT3847_113696C.1
ctcactaacaaaaccttcttgctattccatgatttcattggctataaccacgttgtgcagcgtatgcctaccctccatgaaaacagtttgacgttcatctattatggttggcagcaccttcttatgtcttccagataacaactttgccacaattttataaatacaacctattaatgagataggtttgtattcattgaggctctaaggatcatggaccttagggattagagctaggaagaatgcattgcttcttttcaggaatactccattagcataaaattcatccagaaagcgaagcagatctgttttgagaatatcccaaaattccttgatgaacttgaaatttagtccatccggtccggggctcttcgcattcccacgatcccacattgtagccctcacttctttcttttcaaagcgcgccaccaaaagatcggacgcgtggg

SEQ ID NO: 15161 - DNA, 2151 bp, Glycine max
  Clone ID: PAT_MRT3847_113697C.1
tacgacgggtggaccgccggagtggcaggcggagggggttgcagagagcaagcaaagcgggggagaaagagaggcagcaaacaaaaacaatggcgacgtcgctctctgtttcgccatctctctctctcaacactctcttcatcgccaaagcgcttccactatctcgcccctcctttctctctctccctctccccaaatccctactctctctctccacgcgccgccgcaccttcatcgtccgcgccgaatcccaaaacggcgccgaccccgttcccgcccactacgacttcgacctcttcaccatcggcgcaggcagcggcggggtccgagccgctcgcttcgccgccaactacggcgcttctgtcgccatctgcgagcttcctttctccactatctcctccgaaaccaccggaggtgtcggcggaacctgtgtaatacgaggatgtgtgccgaagaagttgctggtttatgcatctaaattttctcatgaatttgaagaaagtaatggtttcggatggagatatgacagtgagcccaagcatgattggagtagtttcatagctaataaaaatgctgagttgcagcgtcttactggcatctacaagaatattttgaacaatgctggggtcaagctgattgaaggccatggaaagattatagatcctcacacggttgatgttaatgggaagctatattcagccaaacacattttagttgcagttggaggtcgccccttcattcctgatatccctgggaaggaatatgcaatagattcagatgctgcccttgatttaccaacaaaacctgtgaaaatagccattgttggtggtggttacattgccttggagtttgctggtatctttaatggtttgaaaagtgaggttcatgtatttatacggcaaaagaaggttttgcggggatttgatgaagagattagagattttgttgaagaacaaatgtctgtaagaggtattgaattccataccgaggagtctcctcaagctatcacgaagtcagcggatggctcattctctttaaagaccaacaaaggtacagtggacggtttctcacatattatgtttgctacaggacgcagacctaatactcagaacttaggcctggagtctgttggtgtgaaactagctaaagatggagctatagaggttgatgaatactctcaaacatcagtttcttcaatttgggcagttggagatgttacaaacaggataaatctcaccccagttgctttgatggagggaggagcattagtaaaaacgctgtttcaggataacccaacaaaacctgattatagagctgttccttctgctgtattttctcaaccaccaattggacaagttggtcttactgaggaacaggctgtacaacaatatggagatattgacatcttcactgcaaattttaggccgctgaaagctactctctctgggcttccagaccgggtttttatgaaattagtagtctgtgcaaaaacaaatgaagttctaggtttgcatatgtgtggagaagatgctcctgaaattgtgcaggggtttgcagttgctcttaaagctcgcttgaccaaggctgactttgatgccactgtaggcattcacccaagtgcagctgaggaatttgttaccatgaggacacctactaggaagatacgaaagagtgaatcgtctgagggtaagtcgggctctcaagcaaaagctgcagcaggggtttaacaatatgactctgcttcaattgttatacttgaagaaaccagccggtgcctcaagggaagaaattcagaacgatcttcagctactgagttttcagagcaatacatggaatatctcattaaggtcgtgtgtcatacttctctggtcttgcaatgtaattatgacagttgggagcctggaaggtcgagtgaaattcgtgccaatttttgccatttgtaatttaacttattttcccatgcatgtacaaaaaataaaaggaaattccgtgtgggaatttgatttttacataatctctgcatcgaatttgaactagttggaattgagaccaacggcaatggtcagcatgaaaaatatttttcttttctaatatatataacgttgttcatctctgtaaaaaaaaaaaaaaaaaaaaaaaaaaaaaaaaaaa

SEQ ID NO: 15162 - DNA, 282 bp, Glycine max
  Clone ID: PAT_MRT3847_113698C.1
gacttatcactagctaacgatgaaggaactagggttacacagaacactacttatacatatctctgtatatggcgtcagctgtcgctaacaagcttctactcactattatagaggaggcggcatccggtgggtacgtggactcagacgctggcctaggattatgtgacggcgcattcgggtgactaaaccatggcaagagacgaacttacgcatggtgcaatgcatacctcttacggtagcgctggagctgtgaaccattattatgagcgaaagacgtgcctc

SEQ ID NO: 15163 - DNA, 771 bp, Glycine max
  unsure (1)..(771): unsure at all n locations
  Clone ID: PAT_MRT3847_113699C.1
cccgcgtccgaaatttgcatattggccggcaaagcgggggtaaacaaaaacaatggcgacatcgctctccgtttcgccatctctctctctcaacactctcttcttcgccaaagcgcttcctctatctcgtccctcccttctctctctccctctccccaaatccctcctctctctctccacgcgccgccgcaccttcgccgtccgcgccgaatcccaaaacggcgccgatgccgtccccgcacactacgacttcgacctcttcaccatcggcgccggcagcggcggcgtccgagccgctcgcttcgctgccaactacggcgcttccgtcgccatctgcgagcttcctttctccactatctcctccgaaaccaccggaggcgtcggcggaacctgtgtaatacgaggatgtgtgccaaagaagttgctggtttatgcttctaaattttctcatgaatttgaagaaagtaatggttttggatggagatatgacagtgagcccaagcatgattggagtagtttgatagctaataaaaatgctgagttgcagcgtcttactggcatctacaagaatattttgaacaatgctggggtcaagctgattgaaggccatgggaagaatatagatcctcacacagtttgatgttaatggaaagctatattcagccaaacacantntagntaccgttgggaggtcgccccttcattcctgatattcctgggaatgaatatgcaatagattcagatgctgcccttgatttaccaacaaaacct

SEQ ID NO: 15164 - DNA, 149 bp, Glycine max
  Clone ID: PAT_MRT3847_11369C.1
cgacaaactaccggggctcgcatttttgtgaactagaaacatatgctaatttccaaacaaaattgaaaaagtaccttccggttaaataacattccaaaacaattccaatccatcaaatgaagaaatccttattcctagagcacaatttc

SEQ ID NO: 15165 - DNA, 166 bp, Glycine max
  Clone ID: PAT_MRT3847_1136C.1
aaatatattttaaagatttcctttccaattgtttacacaacctaagacagaatgtcttgtcctccacaatcatcctttttgcctattcccccgcaagctttaatattataccaagctatctgacttttttgagatgctggcccattcttaggatagagataggaaa

SEQ ID NO: 15166 - DNA, 730 bp, Glycine max
  Clone ID: PAT_MRT3847_113700C.1
tgcaaattttaggccgctgaaagctactctctctgggcttccagaccgggtttttatgaaattagtagtctgtgcaaaaacaaatgaagttctaggtttgcatatgtgtggagacgatgctcctgaaattgtgcaggggtttgcagttgctcttaaagctcgcttgaccaaggctgactttgatgccactgtaggcattcacccaagtgccgctgaggaatttgttaccatgaggacacctactaggaagattcgaaagagtgaatcgtctgagggaaagtcgggttctgaagcaaaaactgcagcaggggtttaaacagcattacactgcttcaattgttatacttgaagaaaccagctggtgcctcaagttacctggcgggttgtcactgaatttagcgtggttgtcaaattgttgggaagacattcagaacaatcttccgcaactgagttttcagagcaatacatggaatatctcattgaggtcgtgtgtcatacttctcaagtcttgcagtgtaattatcagagttggggagcctggtaagggcgagtggaatttttggtgccattgtttgccatttgtaatttaacttgccagtcctttcatgtacagaaataaaaggaaattccgtgtgggactttgattttaaaaaatctctatcgaatttgaactagttggaattgagacaaacagcaatggtcagcatgaaaaatatttttcttttctaat

SEQ ID NO: 15167 - DNA, 390 bp, Glycine max
  Clone ID: PAT_MRT3847_113701C.1
ctctttagaaatctgaagttcaaatttttcatcaggttaaaaattgatagtactttgaaatttctgtattgaccatttaagttttgaaatgtttcagctattacaatatttcagaaagggtgacccttggatcgaaaattcggttccattggattctagtgttaaaaagccaagtgaattttctcccgaggaactcgaggaagaactttttagactattcctcaaaactcggtttcaaccaagttacgcaatgggcatgtcagaaaatagctggatggcactcatggatcgtcttttgacactaaataactgcactaatgagaatgagaagggacgtgtgaaagaaaatatgctcaaatggattgatatatactatgaggcattagatgc

SEQ ID NO: 15168 - DNA, 929 bp, Glycine max
  Clone ID: PAT_MRT3847_113702C.1
tgttttccccacaaggagagaacctcttttcctttacatttacctttgattcatacaagctcataagtcaattttggtttatcattcctagaagaaggaacctttaaccattgacatggccatggcatatgttgctagatcatcggagtcatctcaagtgcttactttccattccactgctaaatggaatgctcactttgatgccttgaaacaaactaacaaactgatggtggttgatttcactgcatcatggtgtggaccttgcaaactcatggatccagttatccaagagtttgctacaaaatacagagatgttgagtttgtcaagattgatgtggatgagttaatggaggtatctcaacattaccaagtgcagggaatgccaactttcatgctgcttaagaaaggcaaagtggctgataaagtggtgggagtgagaaaggaggagctacaaaggttgattgaacaacacagaaaataaatgtgtgatcatgcactaattaaaataaaaatccgcaaggctcttcactcttcagcatattttacaggatcttcttgctagatataatctttcatcaaatctcaaccagagaatatttgagtttcctcctgattttatatccctagtgctcttcggggatgtttctcatcattttttgtgttccttcgtggattctagttttgtctatttccttttttaaaaaaaaaaaagaaaaggaaaaaccaacaactcatataggaagctgaataagttggtaccattattttcaactaaaaaacaagtgttattgtttaatactcaccatcacaaatttaatatttagacctatttgtaatgtgtcggtgctgattttaagccatgaatgaaaaacgacataaaaggggcactgatgcatccgatttctatataatatatgcattacaaggtc

SEQ ID NO: 15169 - DNA, 355 bp, Glycine max
  Clone ID: PAT_MRT3847_113703C.1
gctcatgaaaagttgtgacggaaaggactctcctgctgtccgctggtcgagcatgactggccatgagtagaaagatgtcaggagagttagatgaggaatcccctctggatgagcgctcacagctatctagcatagcagtataaatgagaggctcacttacatactagctagagaggaatagtctctgctcgaggctaaagctccaaggacgatcctacaatccttcaggacttatgacgatctgcgagagcatggtgaggagatctcaattagtgcgcatgaatatgtgcagcctgactttagtggcagtaagctgaccagcttcctagcaggtcactagtagcaccaacactag

SEQ ID NO: 15170 - DNA, 235 bp, Glycine max
  Clone ID: PAT_MRT3847_113704C.1
gaaatatgaataatgatggttggtcttttatcttaatgacctaactttttgagaggagatcacttgaatgacacatttcggggggggggggagtcgaacccatcacagatcttaaggactatcctattttcaccaatgaattgggccgggggaaccgtcccaaaatgcttaaatctcccttgaacaaatgggcagggctagtataagttcccacttgcttttttattaagcgcaa

SEQ ID NO: 15171 - DNA, 121 bp, Glycine max
  Clone ID: PAT_MRT3847_113705C.1
gtccaactcagtagtcaacactaggcactctctattcccattcattgcagaagaagatggaggcttaccccttacttccaacccgattggaactaacccggctaccctcccggtttccttt

SEQ ID NO: 15172 - DNA, 109 bp, Glycine max
  Clone ID: PAT_MRT3847_113706C.1
gatgacatcagagcagcatagtctatgttactgatagaagctgagcttcatcccaataagactgaatacaagggcatgtcagcccatgtcccaacctatatgcatatag

SEQ ID NO: 15173 - DNA, 626 bp, Glycine max
  unsure (1)..(626): unsure at all n locations
  Clone ID: PAT_MRT3847_113707C.1
ggcttatggaggtggagggtttgcaattagttaccctttggcagtggcattggagagaatgcaggataagtgccttcagaggtaccctgcattgtttggctcagatgataggatccaggcttgtatggcagagcttggtgtccctctcactaaggagattggctttcaccagtttgatgtatatggcaacgtgtttggactcctagcagcacatcccattacacccctagtttccatgcatcatttggacgtggttgagcccatatttccaaacgtggaccgtgttgaggccctaaagcggctgattgggcccatgaaactggactcatatgggctgatgcaacagtccatttgctacgacaaagcccggcattggaccatatccgtgtcttggggctatgcggttcaaatattccggggcattttcttggcccgggacatggagattccggccagaacctttttgaattggtaccggcggggagattataccagttttccgttcaacacgcgccctttcagtcgcaattcttgccagaaaccttttgttttttacctgtcaaatgcaacctttgntggaagntggtgatgaaactatgagtgagtatattcngntccagcccaac

SEQ ID NO: 15174 - DNA, 192 bp, Glycine max
  Clone ID: PAT_MRT3847_113708C.1
ttttttacaaaaaaaccagcctttaataaagtaaaataatgcacaacgcaactgtataaagggtaccaccaacagaggtaaggttattatttcattccacccaaaccttgaaggggtggtgttaaaatgggcaacccttttttaaaccttcagcagtaggttctaggcatgcaggggattctcaacccggtc

SEQ ID NO: 15175 - DNA, 1374 bp, Glycine max
  unsure (1)..(1374): unsure at all n locations
  Clone ID: PAT_MRT3847_113709C.1
ccggggtcgacccacgcgtccgcgaaaaacaaaagaaacctataacccttatggaagatggaaagggtagtgtatttgtgagaggccttgaagaagaatcagtatacagtttgaatgaaatttatactctgttggaacgaggagcatcaaaaaggcgcactgcagaaacgttgcttaacaagagaagcagtcgttcgcattcagtcttcaccattactgtgtatgtgaaagaaacagtgattggtgatgaggagttaattaaatgtggcaagctcaatcttgttgatttggcaggatccgaaaatatattgcgttcaggagcacgtgaggggcgtgctagagaagcaggggagataaacaagagcttactcaccttgggacgtgtcataaatgcgcttgtggaacattctcctcatgtgccttacagagacagtaagcttacaaggattttgcgagactccttatgagggaaaacaaagacatgcataattgctactatttccccatctgcttattgtatggaagaaacacttagtacactagactatgctagtcgtgcaaaaagcataaagaataagcctgaggcaaaccaaaaggtttcaaaggctgttttgttgaaggacttgtacatggaaattgataggatgaaagaagatattcgagcagctagggaaaagaatggtgtatatatttctcatgaaagatttgccaaggaagaagctgaaaagaaggcaaggaatgagaagatagagcaattagagaatgacctcagtcttagtgagaagcaagtggacagcttccgtgagctctatttaacagagcaagaacagaaactggaattagaaagcgagcttaaggattgcaaggtgaatttggaaaaaaccagcaacaacttgcatgatctccaagagaattacaagctattagtttcaaccttgaaggagaaggaacgcaccatttccaagctactgaaatcagaaaatgccttgattgtgcgtgcaaaggaaatgtgtactgatctgcagaatgcatcggatgatattaatttactgtcctcaaagttggatcacaaagaaagactggaggcagaaaatcaaaaaacaattttgaaattcggatctctcttaaatgagagcttaaaggacttgcatacaaccattatggngatctgtttctcaacaacataaagaacttagaagcatggaagatcatgtcagctcctatcttgccagtaaaaatgatgctgcacaaactctagagtcaaggatcaacaaaatgacaggaatttacacttcaagggtggagaccctgaangagctagctaatacattgcacatgaaagctgcatctgatatggaaacagattcatctaag

SEQ ID NO: 15176 - DNA, 714 bp, Glycine max
  Clone ID: PAT_MRT3847_11370C.1
atatcttagaagtactggtaagttttccaaaattcattttctaacttggactgagatatcatgctttccctaatagtttaaccttagcctgtacattgtcaatatggctcgagtggcaatgctacacattcaatttttgatagatataatgattcatatcttaggagaattggaaccaatgttctgtcttatgtcaatatggtctgtgcaagtctgcgtcattcaattcccaagtcaattgtctattgtcaagtgagggaagccaaacgaggcctacttgatcagtttttcaccgagctaggcaaaattgagcccaagcgtctgtcctcatttctgaatgaggatcctgcaatcatggaaagacgaagtgccctatcaaagagacttgagttataccggagtgcacaagctgagatcgatgcagttgcatggtctaagtagatatgatatagatgtgtatgctacatcgcgttattgttaatattgatcaagaaatctctctctctctctctcctatttttgttgggcttttttgtattgtaaaacgcatactgtcattgtcatctttacaagtctgtctggttgttgaagggaaaaaaagggagagagggtttttggtgagataatttgagtgtcttcatgccttttgtgtagatatttcatttttgtaattctgtcccaacttttcactcgtttccaaaaatgtttctcgcg

SEQ ID NO: 15177 - DNA, 476 bp, Glycine max
  Clone ID: PAT_MRT3847_113710C.1
tttcagcttatcggaagcttgcccggagttatcatcctgatgtgaacaagtgagtttttctttcttctttcatattgaacatcgtctactttctgattctgttcccttgccttgttccccactctcttttttttgcttttaaaatttttatttcttttatttcactgttgctgtggacaaagtggtttggatgtctttgattataaagcccgcggcttgttctttttaaaaagtatgttttgtatattccctgaacctgcttattagataaaaaaattaggccaagaacctctgcactcagaagtcaattttgctaggtgcataattttattgtcttcacaatcatttagttaatgtcgcttgaactattatggattttcactttctgctgcagagaacctgatgcagaacagaaatttaaagaacttagtaatgcatatgaggtcttgtcagatgatgagaaacgatccatatat

SEQ ID NO: 15178 - DNA, 416 bp, Glycine max
  Clone ID: PAT_MRT3847_113711C.1
aaaaaatccggaaaaaaaaaaaaaaggcctattattcaaaattgggagaacaaagcaacatttttccccccccttttcccacccaagaaacccttatctttgccttttccctgcaaagggaaaacaaaaccttgaaaagaaaaacctaaaacccccccctgcaaaaattggaaatcaaaaaccacatttggacccccccttatttaacaaaaacccaaaaccccccttgacatccttaaaaaaggggggccatcagtgggagggccccttgggtatgggggctttccatatgggggcttgaaaaccggaggcttctcaacagggggcttgaaaaaaggaggttcccccactgggggcttgaaaacgggaggtttctctacggggggcttgaaaacgggaggcttctctacgggggg

SEQ ID NO: 15179 - DNA, 117 bp, Glycine max
  unsure (1)..(117): unsure at all n locations
  Clone ID: PAT_MRT3847_113712C.1
gttgtgttcctnctcttacaaacccnattccctcttctccatgatnatncccaattagtactagtgnagaacngancacttcnctttcccaacagncnaattgcnagtgatcgnggg

SEQ ID NO: 15180 - DNA, 548 bp, Glycine max
  Clone ID: PAT_MRT3847_113713C.1
gcctttgaaaatgttttgtgaactatgatcataattttggtcataacgtcaaggtttttcaagtttttgcagccacagcgtaactatgaacatcagtcatatttgttttgtttagaatttttcataatattaataaatgtaacaaaacgggaaccgcaatcgcattccatacttaaaaccttgattataggataaaaagttttatactatcaactaattaaaaataattataataaatattacttttaacataattattataaaaatcaataaatttaataaatataaaaatttctagttggacgtcagtttttacattgtcgtgtagtatttattcataatataattataagagaaaacaatctacttactaccataacttatattgttttttaattacaaaatattatgtatatatgagaattttgttagtgatgctaacttttataatattattctaaaaatcataacaatgatgattaatttcttattgatggagagtaataaagtgcatatgagcattaaactttataattatgaagtgatta

SEQ ID NO: 15181 - DNA, 1048 bp, Glycine max
  Clone ID: PAT_MRT3847_113714C.1
caggtaataggccgccgagagatgaaatccattgttctaaagttcctcagggagaacaacagccttccaagctatgcgcgatcaaccgacatatgcaatgacacgatctacagatcatgccgaagctgcttggattcattactgtctctattcaagcaggctgcagaaccagacaaaccgagtgaggaccgtgatcctatagcaaagtgcatagctctcgaagctgataacttatcatggttgctggagattttagttgacaaacaagccgctgatgagtttgcattgatgtgggcaaaccaacaggaactggcgttgctacacacgaagctgccaaccatgttgcgctaccatgttagctgcctttctgggaggctgtatgttggcatctacggctgcgagaagacgacagaagggggaagaggggagttgttgccatcaaaggatgtgcgccggttgttgttacagacatggctgcagcctctgatgaatgactacaactggctgcagcatggatgcaggtcatttgataggaaacttgtggaggaaggaattgggaggactattctcaccttgcctcttgaggatcaacaaagcattttgctttcatggttggggagtttcttgaaaactggtgatagctgtcccaatcttcaaagggcatttgaggtgtggtggaggagaaccttcattaggccatatgtggagaaccaaggtaatgttgctgtgtcagatagtagttcaatgttgccaaagcagcgtgagtgaataaagggttcagggttgaatatgtttcattggtactggagttcaagtttttatattaacgagtttgaggaattgtaaagatatgtgttgattgcagaatgtggattaatctccagcagctaacaagtagtcaagtcctgagaagtgtcatgtgtcttgcatgagttgactctggattaatcccttgaggaagacctcattgaattgataaatttcagtaattggtttttgtattatgtcttcaaagaaagaaatggattggtgtttagcttttagtttt

SEQ ID NO: 15182 - DNA, 456 bp, Glycine max
  Clone ID: PAT_MRT3847_113715C.1
tgaaaatggtgggggcgcggaagaaaacacaaacttctcagttcagtgtgactcaaactttctctccaaattcatcatgtggccgaaatttgagaaagaaccaacttggtggcatcatcttcggatgcaagaatgccacaatgaaagaatgtctatctaagcaactgtttggcttaccagctcatcacttctgttatgtgaagaatattgatccagggttgcctctgtttctgttcaattatactgacaggaaacttcatggaatttttgaggcagccagcagtgggagaatgtttatagacccctatggatggactacagatggttcagagagaacacagtatcctgcgcatgtgcaaatttgtgtccgactaaagtgccacccattgcctgaagataaattcaaagaagtaattgcagacaactactacactcataatcgtttctattttgagc

SEQ ID NO: 15183 - DNA, 292 bp, Glycine max
  Clone ID: PAT_MRT3847_113716C.1
aaaaatcaaatctctaatataaggacgggttttaattaaaaggtgggctggccaatattccatgcattatgttcgagtgactgacgggcctatatcactgttgtgataaaccctatttcaccccgttacgttttatttacacatacacatactgtacttatttataatacattattaactctctcttctccttgaattttaacatccatataggtttatctctactatatcatttcccatttattaatcaaatgtactcacataaccctaacactgtcttttatatttatat

SEQ ID NO: 15184 - DNA, 827 bp, Glycine max
  Clone ID: PAT_MRT3847_113717C.1
ccacgcgtccgaacgatcctctctctgtatatactgcctacgtgttattgaccttactgacgagacgtctctcgagtaggtggatatcgggacctcccgaagcaccgatagacatcacaaatacgaactatgcgatccctgagaaccttggatggctcggatagcacgtataccacctgtatatgctatgattgactgtgctgaccgtatatacgcacagcgaggctcttctcgagcaccgaaaggtaagacaggatgcagggaagcgctgcctcacgactctaaatgtggaagcggagcccgcggaggacgtgctggacgggataaatcgaaaagtcacgaacgaggagaccctgcttatctggcccgggactgcccaacgcgtgacggactgggaagacgccggaaacgtatggcgaccacacagctctagaacggctcgagctgtcctataacaaacttgagggtccagtaccctcaaatgggatgttggtgaccataaatcctaatgatcttatcggcaatgagggtctttgtggaggcattctccctccatgttctccaagtttggctgtgacaagccatcgaaggagctcacatatcagacacgtcattattggttttgtgactggcgtttcagtgattttagctcttggtgcagtatattttggtggtagatgtttatacaagagatggcacttgtataacaatttcttccatgattggttccagagcaatgaggattggccctggaggttagtagcattccagaagatcagcatcactagtagtgacatcctcgcatgtataaaggaatcaaatgtcat

SEQ ID NO: 15185 - DNA, 443 bp, Glycine max
  Clone ID: PAT_MRT3847_113718C.1
ggcagcgaaaaagggggaaaaaaggagatgataccttattaacactccctgaatggcttagaattcatacaagcacaaaattttcgattgaaagcttatttcaatattacaacaatttagtgttagagttgagcaatctagcttctgaataggaaacattgtcacaaattttgagagataccttcgaagtcgtcatatagctagcactgcttagtatgggataaacaaaacgtataaatatcctgtgaggtcttaagatagtgtgatgaagtgctgcagagaactgatcaaacttggaggccagtgctttgtgtctctgacatatgaaaggtctgtaaaatggggatcaagaagagttgcaatggcaaactggttttcagcaagcaaagtggcgtgcttatctgcatataaggctgctgcaagagctgcatgtatttctggat

SEQ ID NO: 15186 - DNA, 1261 bp, Glycine max
  Clone ID: PAT_MRT3847_113719C.1
gaatatttgatccacgcgtccgaaatatctcatctaaatcgctcgagatcccttacaaaacacatgagaatgtgaggtagctgaactctgaactgaaatcctcagcagttagttcagttatggttgcagagattcctttcaaacacaaaagaacctcagattttggttcctaattgacaaccatggcgggtgcgtgcagagcacccatttgccatcttcctccgcagaagcccaaaaccagaatccagaattctcacagcagaagagctcaacttccaaataggcgtttgttcctcttctctctgcctctctctagtttccttctccttcctgttccaagctttggtgatggtaacaatgcaatcattattgataaacttcaaagtgggccatcttcatttgctgccacaatgtatgacccagtaagtgcggctgaaagagaagcaagtgctttggtttcagagagagtgtctcaggcagtggagttgctggagaaagggagggaattgcagactcagggtgactttagtggtgctcttgattacttttctaaggttattgaaagctacaaagacttagcattctcagaatatgcaagggtaggaagagcattggccctatatgaagttggtgacagagaagaagcaattgcagagatggaagacgtttcaatatctctaaaagggtatccagaaatacatgcagctcttgcagcagccttatatgcagataagcacgccactttgcttgctgaaaaccagtttgccattgcaactcttcttgatccccattttacagacctttcatatgtcagagacacaaagcactggcctccaagtttgatcagttctctgcagcacttcatcacactatcttaagacctcacaggatatttatacgttttgtttatcccatactaagcagtgctagctatatgacgacttcgtaagtttatgacttcaaatatttaactttgtttatttgttcaagtttttcaattttaactcttttggttatgaaatgtaaattaacagcgatataaattctctctctttgtctttcaatgttttgcacaggaaggtatctctcaaaatttgtgacaatgtttcctattcagaagctagattgctcaactctaacactaaattgttgtaatattgaaataagctttcaatcgaaaattttgtgcttgtatgaattgtaagccattcagggagtgttaataaggtatcatctccttttttcccccgttttagctgcc

SEQ ID NO: 15187 - DNA, 821 bp, Glycine max
  Clone ID: PAT_MRT3847_11371C.1
ggcgtacggctgcgagaagacgacagaagggcattgctgcacatttcagatgctgcagcaacctttaaggagctcttgacaagacgtaaatctactgtggctgaattcctttccaagaattatgaatggtttttcgcagaatataacactaagctgttggaatcttccaattatattacaaggcgtcaagctgtcaagttgttgggagatatgttacttgatcgttcaaattcagccgtaatgacaagatatgtgagctcaagagacaacttaaggattttaatgaatcttctacgagagtcaagcaagagcatacagattgaagcatttcatgttttcaagctgtttgctgctaaccaaaagaaaccagctgatatcatcagcatatttgttgcaaacagaagcaagcttcttagacttttgggtgacttaaaaaccgataaagaggatgaacagttcgaagctgataaagctcaagttataaaagaaattgcggctcttgaacctagggacctcgcttgagcttcagtttgtgtcgagtaacaagttgcattgtggcattttaccttatttaattgtctattgttatagttcttttagtcttcatcaagatgagactaacattcaacacaaattccagtgttttctttctgaattttcatttcggttctgtaattcctagatgaataaattgctgaaagagctacatgcagtggcagtattcggctttcatggtgttagaaagctttgcttgcctagcagttagtttataaattatacgatgccaagttatattcttacggtctacaatttgtatgtcg

SEQ ID NO: 15188 - DNA, 149 bp, Glycine max
  unsure (1)..(149): unsure at all n locations
  Clone ID: PAT_MRT3847_113720C.1
aaaaaaaaataataatttaaatatttttttacnntaaaagggtctaacgttctagggggttcttatttacgatcgcgtgcactcagcatcctcgctcttgctatattgacacttaactttcctgggccgcgccgctaaaaacaacaact

SEQ ID NO: 15189 - DNA, 694 bp, Glycine max
  Clone ID: PAT_MRT3847_113721C.1
cggctcgagctttttcaccccaaactctttgtattgtggtgaatgtttgagtgcagaaggtataaaaaatggtggtgaagattcgattggcaaggctcgggtgcaggaaccacccattctatcgcgtggttgttactgatagcaaaacaacaagagatggcaagcaacttgaagttttaggtttctacaatcccgtcgcaggcaaggatgatgagaaaagaatgagcctcaaactggaaagagtcaagtattggctttctgtcggagctaagccttcagagcctgttgagcatcttctgtttcgagcaggtttaggacaatctcatcaattccctgttgctgctctaaatggacatttcctcaaccaagaccaaccaaccaatgctgatcacaatggtgtatctccagaagctatattttctattggcctacaagtttgaagagaatagctaccatacatttggagaaggtgggtggtgttgtgatcaattttttgcaccctgttcaataccacctagaaacaaattgataggttatcttgctgtctagaaactggttagatttgtttcctgggaagatgttatcacagtagcaaaagtagcttcatttgattttggcttatgtatgcatttctgacattgttgtcaacacaccagttggtttttatgcttatgcaatttttcttgattctgac

SEQ ID NO: 15190 - DNA, 738 bp, Glycine max
  Clone ID: PAT_MRT3847_113722C.1
cggctcgagcttcttcttcttctcccaaaagccattgcattgtggtgaatgtttgagtgcagaaggtaaaaaagaaaatggtggtgaagattcgattggcaaggctcgggtgccggaaccacccattctatcgtgtggttgttacggatagcaaaacaacaagagatggcaagcaacttgaagttttaggtttctacaatcccgtcgcaggcaaggatgatgacaaaagaatgagcctcaaactggagagaatcaagtattggctttccgttggagctaagccttcagagcctgttgagcatcttctatttagagcaggtttaggacaatctcatcaattccctgttgctgctctaaatggacatatcctcaaccaagaccaaccaaccattgctgctgatcacaatggtatatctccagaagctatattttctattgccctacaagtttgaagataatagctaccatacatttggagaaggtgggtggttgcaccctcttctgttcaataccacctagaaataaattgataggttatcttgctgtcgacaaactggttagatttgtttcctgggaagtagcaaaagtagctcatctgattttggtttatgtatgcatgtctcacattcttgtcaacacaccacttggtttttatgcttatgcaattcttcttgattctgacaatttattttgaaatattatcctgtttttttaaaaaacaaaaaacaataaaacaaa

SEQ ID NO: 15191 - DNA, 129 bp, Glycine max
  Clone ID: PAT_MRT3847_113723C.1
caagacgaaggttgtgtacacgatatgcgagttcatttaatttctttgtgacttctaacatgttattggctcccagtttgttagcttgtggaccaagaggtcgacaaaaacaaaaagaaaacaatttgc

SEQ ID NO: 15192 - DNA, 764 bp, Glycine max
  Clone ID: PAT_MRT3847_113724C.1
gttcaaaagaaacaaaacgaatgcgcgtgtagaacaggtgttttactagaaatgagttttgggtttagctaatggctatttatacataaatacacatttggaagaggcacggattaattggaattgaaacaaaaacaagtggcattgagaagaacagaaacatcatcaacacaaacacaacaaaaaacagccaaagaggaatacctcaacggaacttcctcgtttggctttcagtgtctgtctcactccttaccacaaaaccctacgcctttaccccttgcttttatttatccttcaacaacgcccgttccttgttgcttctcgccagaagaggatttggatcggagcgagtgtttttcactatcgatctggtttccttggatttggatttggattgaactctaataatgtggtgtgcggtgagagattccggtggccattactgccctaagaagaccgatgatttatgcggcgacgtttgtggccaggagtcaagtcaagtatcgggcatgtcaagagtgcgctgcattttacgcggcgtggatgtaaaaacctgcatatttctttttgctgttgtgccaatgtgcatctttggaatatacttgcatggacagaaaatctcctacttcctgcggccactatgggagaaaccaccaagcctttccatgtcattccacattactacaatgatcttgcttaattattatcattccatacaagaaaaaaagttccatcttttttatgtgtgcgtgatttttgtgaga

SEQ ID NO: 15193 - DNA, 641 bp, Glycine max
  Clone ID: PAT_MRT3847_113725C.1
cctcttttttttttttttttttttttttttttttttttttttttttttttttttttttttttttttttttttggcccccccctcaaaaaaataaacttcatcaaaacaaaaacaaaaaagggggcaaaatctccaagcttacaaaaaaaacaaaaggggggggagaatccccacattaagggcccaggagctaagcgaagactttgggccagctagcaaacaaattttaaaaaaaaaaaccctcacacttaaaacccatcgggctggaaaaaggggggggggatcccattgggcccatcagggggggacccaagcatgacaggagttcctctacaaacaattaacccaaaatttcgggcctgaccgggagttttggggggaccatcaggaccccttaaaaaccctcccgcttcctctaggacaagggtaaacaacggaccaaaccctttaaaaggccctggcacttgggtgcccccaggaagcttaactggaacccctttggctacaaactttggaagggccaaaaccgtttcctttttgcccgacatgcttaattaacgtaggggcggccttcggagggcaccgattggggtccgccccacaatgaaaagaaaagccccgtgccaaagggaaaggaggga

SEQ ID NO: 15194 - DNA, 240 bp, Glycine max
  Clone ID: PAT_MRT3847_113726C.1
gctgattgcaattttaatggacttttctgagtgacaaagtattcaacttaaggtcaaaaaaaagaaagaaaaaaaaaaagggggggccaccggtgagtgagttcgtcgaccgggaatttaatccgggcagggtacctggggcgtaccagtttccccaaaagtgagccgtatatcagctggggctaatcaggttcaaggatgttccctgtgagaaattgattgccgctaaaatttccaacc

SEQ ID NO: 15195 - DNA, 480 bp, Glycine max
  Clone ID: PAT_MRT3847_113727C.1
caactcgaaattcacaacttccaaaatacccaaattacaaagagacccaatttagccagcatgccgaatacatagcccaatcgtatccaacaaattcttgatttaacccaaaaactgaatcgagtgacaatttttgggttatacaaataaatctaaactgcatggtaaagtactacatttaaatttctaggacttgaagctaatcggacatagctacagttatataactagaatctttcaatacgaatgtacaaacacgtacagccataggtgctgagcctgagatttgttacagaaatttttttccatgcaaaaatttgtgtcgacgtagcatatgtattacaagcatcttatagcataacttgtctacaaaaattgcagcggtcttttgtacgcttgcagaaccgctatagccgaaattttaaccagtggcatgcctattaaaagtttgactgcaaacgtgtgcacaagcttctacag

SEQ ID NO: 15196 - DNA, 299 bp, Glycine max
  Clone ID: PAT_MRT3847_113728C.1
gaagcagggcaccatcatacaaagcatggaatccaaaaacttacgtccacgtcaactgaacagactcattccgaaaccaaacatgggaacacacgcagaacagcgactgcgcgacagactgctgaccaaggaacagcatgggtattgaagacgagagagtacatcaaaccggtgcatggagttccagcgctgacatgagggaagtgcaagtgtggcactaactgcacttgcacggactgcacctgtggccattaaggaatatgtatgaaaatgtaaatgccatgtgtttggcaatacaa

SEQ ID NO: 15197 - DNA, 1424 bp, Glycine max
  Clone ID: PAT_MRT3847_113729C.1
ctcgagccgaccaaattatatatgatattttaagcgttgtttggggaagggtgatagaccccgactcaatcacaccacgcttctaaattctgagaatgaattcgtaagatcgaagcaatagcctttttctctgccgccactggtttcgatcccacacccacaaacgcaaaccctccatcctttgaatgctcttgcgtttgcctttgactacctcattcctaacttacacacacacaacggagtgtcctaatgagacatctactcatttacaccatgccaccttatctctacaatttcatcattctcatatcctcaatcaccccccctccgcacccgctactccattcctctcgtgactccgatgacgacatccgtaagatcgaagctgttgcctttctttctgccgtctctgcctttactcccttcccatatcctcaatcaccccccctcgcactcgcctcttcccttcctctggtggcgacaatgtcgactcctgctaggaagaggctgatgagagacttcaagaggctgcaacaagacccgcctgcagggatcagtggtgccccccaggataacaacataatgctgtggaatgctgtcatatttggtcctgatgatactccatgggatggaggcacgttcaagttgacactccaatttactgaggactatccaaataaaccaccgactgtacgatttgtgtctcgcatgtttcatccaaatatttatgctgatggaagtatttgtttggatatattacaaaatcagtggagtcctatttatgatgtggctgctatactcacatctatccagtcattgctttgtgatcccaacccaaattctcctgcaaactctgaagcagctcgaatgtttagtgagaacaagcgtgagtacaatcgaagagtgagggaaattgtggagcagagttggacagcagattaagttcatccttatatgcatgggaagctttgaaggcatgaatttggttgcagtgatggcaactataagaatgattgtgcaaactcatcacatttatattctctgctgatatgaatgatagcatcatcttatctttaatttattatagcttctgcattgcatatgtcagctaatgtaaaatagaattatgcgtgtcaatttactttcgattgttgtcagacattcaacatgaaaattatagtttgctgaactggttatgatttcatcaaggtttttgaaaaaattagcttcaatttggtttacaatgcaacatgtgtgctctgccctgaagtaccccctatgaatgagatgatttgatcaaactaaccaaaaacgaggcagtctaggccgggaaaaaaaaaaagagttagagaaattgtggagcaaagttggacagctgactaagcttggcttcatatgcttttgggcctttgaagtcaccaatt

SEQ ID NO: 15198 - DNA, 1752 bp, Glycine max
  Clone ID: PAT_MRT3847_11372C.1
ttagttggaggcattaaacttattccctctgatgaatgctctactctactctgactctcacacatcgttttatccgaaagcaagcattatcagaagcagaaagaaagaataagaggttgcagcaacaatggcagccatggctgcgcttcagagctcaatggtcggtctctccctctcctccaactctttcttaggccaacgcctttctcccatcaccctcccctctcttcttccgggtaagtcaacagagaagcaatgtcctattgtaatgaggcttaaacgatgggaacggaaggagtgtaaaccaaacagccttcctatcttgcacaaaatgcatgttaaacttggagatacggtgcaagtcatatctggacgtgaaaggggtaaagttggggagattactaaaatcttcaagcataacagcactgttatagtgaaagatttaaatttgaagacaaagcatgtgaagagtagagaagagggggaaccggggcaaattattaagattgaaggtcctatccacagctcaaatgtgatgctctactccaaagatcagaaggtagcaagccgtgtggggcataaagtccttgataatggtaaaaaagtccgctaccttataaaaactggtgaaataattgatagtgcagagaactggaagaaactgaaggaggctactaagcaaactgaagaagctactgctgctgctgcctagttttacctacgtaattcattcattcactagtaatgtaactctagcagtacttgttgtgatctctcttccattttgttatctaatgtatatttttggtctgtctattgatctccatataatgaaacctgggtgatcaaatttgtctattgcttgttgagcaattgagattttttgaagaactattgttcatgcaagtgacagagtggttgtttccttaatgactccctgctagattctacttctattgagtctctctggaataactatccctcaaaatttgcttcatacttccattactgccggtcactgaggtttgatgataaaccagattatgcttatttgaaaagacttctacgtgaccttttcattcgtgaaggattccagtttgattatgtctttgattggaccattttgaaatatcatcaatcttcaagtgccactgcccctgcccgtgctattgtaagtgatagcatgctatcttattgtattagctgattgattgttaagttttatctgatataagaaaggggaaatttgggggggattcctaaatcttcaagctcaggtgccctgttattggtgaagatttaaatttgaagacaaagcatgtgaagagtagagaagagggtgacccggggcaaattattaagattgaaggtcctatcctcagctcaaatgtgatgctctactccaaagatcagaaggtagcaagtcgtgtggggcataaagtcctagataatggtaaaaaagaccgctaccttataaaaactggagaaataattgatagttcagagaactggaagaaactgaaggaggctactaagaaatctgaagaagctgctgctgctgctgcctagttttacttatgtaattcaatcacacccatggctgccattgctgccgcaaccttttgttctttctgctccattttgtgatctaatgtatatttgtggtctgtctattgatctccataaaatgaaacctggctgatcaaatttgtatattgcttgttgagcaattgagtttttttgaagaaatat

SEQ ID NO: 15199 - DNA, 423 bp, Glycine max
  Clone ID: PAT_MRT3847_113730C.1
ctcctgctttggggggggggggggggggggggggggggggggggggggggggggggggggcgggggcgcgggggaaaaaaaccccccccctattgagtaatttttgggggaggggagcaatatggggcaactggggttatggaaacattggttagggtccggccattttgaaggtatagaagccgtaggttttccgggggcttaagtaaataatggctttgaaaggggaggccgaaaacccaaaggggaaggataaataatgcgtcaaacaaaaaaaacgccagccagggaaggtgaggacgcctaagcgcacccggaaaacggctcctaatgagaatgccgctttttgcaaaggggcccgctgaagggttgggataatttaggcacgggtttgcgttacggagctactgaaaggttaagggt

SEQ ID NO: 15200 - DNA, 1215 bp, Glycine max
  Clone ID: PAT_MRT3847_113731C.1
tttattccaacaaatcaaggccccctaatcctaacgctctttctttctcttccttttcatcattctcatatcctcaatcaccccccctcgcactcgctcttcccttcctctggtggcgacaatgtcgactcctgctaggaagaggctgatgagagacttcaagaggctgcaacaagacccgcctgcagggatcagtggtgccccccaggataacaacataatgctgtggaatgctgtcatatttgggtgagttgaattgaaattgaatatagatcccatgttgttttaacttatagtcaattagtctattcatttttttttatttcttatgttgtttaattattgatggataagtgatttttggattgcagtcctgatgatactccatgggatggaggcacgttcaagttgactctccaatttactgaggactatccaaataaaccaccgactgtacgatttgtgtctcgcatgtttcatccaaatatttatgctgatggaagtatttgtttggatatattacaaaatcagtggagtcctatttatgatgtggctgctatactcacatctatccagtcattgctttgtgatcccaacccaaattctcctgcaaactctgaagcagctcgaatgtttagtgagaacaagcgtgagtacaatcgaagagtgagggaaattgtggagcagagttggacagcagattaagttcatccttatatgcatgtgaagctttgaggcatgaattggttgcagtgatggcaactacaaatgatcagtcactcatcacatttatcctctctgctgatatgaatgatagcatcatcttatctgcagcattaatgtctagtggcatatgtagcgtgagaaatatcgatgcagtgagggaaattgtggagcagagttggacagcagattaagttcatccttatatgcatgggaagctttgaaggcatgaatttggttgcagtgatggcaactataagaatgattgtgcaaactcatcacatttatattctctgctgatatgaatgatagcatcatctcatctttaatttgctatagtggaccctgttcaaatgggtgtggtgaataaacagtgtgggccgtgacttggttcgctttggagtttgcagccttttctcataaataagatgtgtcgtgttgtgtaaaaaaaaaaaaaaaaaaaaaaaaaacgacgcgcccgctctagaggat

SEQ ID NO: 15201 - DNA, 1314 bp, Glycine max
  Clone ID: PAT_MRT3847_113732C.1
tcattctcatatcctcaatcaccccccctcgcactcgctcttcccttcctctggtggcgacaatgtcgactcctgctaggaagaggctgatgagagacttcaagaggctgcaacaagacccgcctgcagggatcagtggtgccccccaagataacaacataatgctgtggaatggcgtccggtcgactcctgctaggaagaggctgatgagagactcgttcaggctgcaacaagacccgcctgcagggatcagcggtgccccccaggataacaacataatgctgtggaatgctgtcatatttgggtgagttgaattcaaattcgataaaggtccaatgttgttttaatttatagtcaattggtcactattttttaatttcttatgttgtttaattactgatggataagtgatttttggtttcttgactgctttggattgcagtcctgatgatactccatgggatggaggtgagtggatttctttaccgaagatcttactagaaaacaattttgaaatgtttgtcaagtgtcaggttctttttccatcttgtgtgttacataactgtgtgtcatattttgagttattcaggcacgttcaagttgactctccagtttactgaggattatccaaataaaccaccaactgtgcgatttgtgtctcgcatgtttcatccaaatatttatgctgatggaagtatttgtttggatatactacaaaatcagtggagtcctatatatgatgtggctgctatactcacatctatccagtcattgctttgtgatcccaacccaaattctcctgcaaactctgaagcagctcgaatgtttagcgagaacaagcgtgaatacaatcgaagagtgagggaaatcgtggagcagagttggacagccgactaagttcatccttatatgcaggaagctttgagggcatgaattaggttgcagtggtggcacctatatataagaatgattgtgcaaactcatcaaatatatattctcttctgatatgaatgatagcatcatcttatctttaatttattatagcttctgcattgcatatgtcagctaatgtaaaatagaattatgcgtgtcaatttactttcgattgttgtcagacattcaacatgaaaattatagtttgctgaactggttatgatttcatcaaggtttttgaaaaaattagcttcaatttggtttacaatggatcatgagtgctttacccattataccccctctgcgacattgttttcagccatccttggtatttgtgtacttgtgtgcgccatatagtaattattaatttattatgccagt

SEQ ID NO: 15202 - DNA, 1667 bp, Glycine max
  unsure (1)..(1667): unsure at all n locations
  Clone ID: PAT_MRT3847_113733C.1
ccacgcgtccgctccagaagccatggtcgtaaatctctctccctctacacctttacattcaagttccataatcagattggcaaattcaaagtcacccatttcagaaccatggttgaggctcaaaacccacttcccaaaaccgctcctttccccttcttttgcctccccaagtgtgaacttcacttgcaagaagcaatttttgcatggtaacaacaggaacgtgttggatttcaggacttggtctattgctgggtttgattttgggaactttgagaggcctcagtctgtgcttgagagtgctgcagtgttgacagccatcattgttgtacatgagagtggccacttccttgctgcttctctccaaggaatccatgtgagtaagtttgctgtagggtttggtccaattttagcaaagtttaatgccaaaaatgttgaatattccatcatggcttttccccttggtggctttgtggggttccctgattatgatccatagagtgatattcctgttgatgatgaaaacctgcttaatagtcgaccaatattggtatagggggattgtggggtcagctggtgccgttggaagtggagcattcgctcatgtcttctggaattatgcttgttataattctggggttattccttatggttcctttcctggggtggttgtgcctgatgttagagccttttctgctgcttcaagtgagcgctagggttagcagtgggcttcaaaaaaagtacttcatgattcttatcttcaatgctgttgcacaccagtgtcttagccggtggtatatctgtactagaggaggcaagatcatcttcaacgatagaacagaaggggggagcagaattttgatataagggtcaccccagatgagaattttgatggaactgggaaaattggagttcagctagcccctaatgtgaagatagctaaggttaggccaaaaaatttggtgcaggctgtggagtttactgggcaagagttttggggtctggcctctaatgttttagatgggttaaagcagacttttttgaacttctcccagtcagctagtaaggtttcaggtcctgtagccattattgctgttggtgctgaagtggcacggtcgaatatcgatggtctcttccagtttgctgcgatactcaacattaaccttgcggttataaaccttctgcctttgcctgctttagatggtggcacattggcattgatcctaattgaggctgccaggggtgggagaaagctacctttggaagtggagcaaacgatcatgtcttctggaattatgcttgttataattctggggttattccttattgttcgtgataccctaaaccttgattttatcaaagacttgttgtaattattgagaattctagttagtagtgggcttcaaaaagtatttcatgattctcatctgcaatgctgttgcaccagtgtcttagccggggatattctgtatgaggaggcaagatcattttaaacgattgaggtaagtttctttctccaaggatgtcatgtgagaagcacccctttgttaccaattcattgatctgatccggattggatttgtgatcctagaatataaatttacgagttacaaatactagcttcgattatgaattttaatattttctcgcaaaaaattttaaaaaanaaa

SEQ ID NO: 15203 - DNA, 613 bp, Glycine max
  Clone ID: PAT_MRT3847_113734C.1
caaaccccatcgaaaagaaggaaaaattatttaaaggaatattttttttttaaaggacccaggctgacccccctgaatgatgggataaagggggggcaaggaaaactttttaaacctttaaaaggttttcaagggtggcagggggaggaatttgcaccccagggcttaagtaagcacctttttttccaaacccaattttaggggggacttttaccttcttttggcctccagccttaatagtttaaagaacatattttataccctaaaaaactcctttattatagggccttgaccccataattaaagccaagggttttttgcccccctaaaaggggttaaaaaacacttttccactattttaaattttccccaggatttcaatcacaaccaattttcccggccttggggaagccccaccaccaagtttaaactcatagacccttaggccattaggaagcaccaccttttccactttttaaaggttctttgtttttgccttttgttgaaacattaagggggagttttgatttgttttgaaatgaccccaaatgcaaaaaagccaaccctggcaaaaccagttcctatccaaaacttttgtgtaagggaaggggtt

SEQ ID NO: 15204 - DNA, 471 bp, Glycine max
  Clone ID: PAT_MRT3847_113735C.1
tacggctgcgagaagacgacagaagggcctcagaagccatggtcgtaaatctctctccctctccctctccacctttacattccagttccataatcagattggcaaattcaaagtcacccatttcagaaccatggttgagactcaaaacccacttcccaaaaccactcctttccccaacaagtgtgaacttcacttgcaacaagaatcaatttttgcacggtaaaaacaggaacaggttggatttcaggacttggtctattgctggttttgattatggaaactttgaagggcctcagtctgtgcttgaggctgctgcagtgttgacagcaatcattgttgtgcatgagagtggccacttccttgctgcttctctccaaggaatccatgtgagtaagtttgctgttggttttggtccagttttagcaaagtttaacgccaaaaatgttgaatattccatcagggctttccccc

SEQ ID NO: 15205 - DNA, 1044 bp, Glycine max
  Clone ID: PAT_MRT3847_113736C.1
ggcccgctcgaggggccgtcgagccgattcggctcgaccaaatcaagaaggaacagagaaagagagaggagaggcattgtaatcgtgacctctcaagcttctttcaaagacagagaagaaagaagaaaacaatctcaacaaacacaaacaaacaagcaaacatcaatggcaaactcgtatacgtggctcttcctcgcgatttctgccaccctcttgcttcttctgtcttcgtaatcgtaagctccgaagcttcatgatattccaacaaccttcaaagacagagaagaaagaggaaaacaaaagaaagaagacatttccttccgaattgaggaagggaaaggtgtcttggatggccaagtcatcttccttagctatcacgttgatctgcgccgccacggtattggtggcgatgagtcggtggccgacagccgtgggcggcggggagcaccacttgggaatgggatgggtttccagcacgtgcaaggggaccattgctgagtgcctgggaggggaggagtacgagttggattcggagatcaaccggcgcatcttagccaccaacaagtacatcagctacgttgcgctgcagaggaacactgccccctgctctcgccgcggcgcctcctactacaattgccgacctggagcacaggccaatccttacagccgtggctgcagcgccattacgaggtgcaggagctgaattttatatttttttaaaattttttttttcggatgtgaattggaatgtgttttgttgttttttttaaaaaaaaatttcatattcgggtttcgttgtatacatgaccaagattgaatgtttatgtattattgtcctgttgccgataaataattattgaatcaatgtcagtgattcatcattttttttttatttccttcttatccactggtttttttttctattttttatttcttattttggctttttaaaataaggaggtgtgtactcagaataaataaagtgcacttataatgttgattttctgatcaactgaatatgtatgcaacaaaatcttttgttct

SEQ ID NO: 15206 - DNA, 369 bp, Glycine max
  Clone ID: PAT_MRT3847_113737C.1
cataattttttaattttttctaacattaacacttctgctaaactgctaaaactgatatcaacattaataattttaacatataatctaataaatatgaactgaaccattacatcttacataatatattcatacatacgaagacttctaatttacacaactaaacatgcaatgcttcctatccactaatcttatctaaatatgatctcaaaatgcacattcaatttcttacaacttatactatatataaccatatttccccataactacaaccattctatacttttaatatgtatacaataccaaccatttatcaaactctttcactcattaaatattaggtggttcatatccttacctcatatccaatat

SEQ ID NO: 15207 - DNA, 242 bp, Glycine max
  Clone ID: PAT_MRT3847_113738C.1
ggtacgcctgcacgcaccggggttccgttccggaattgccggatggcgccagtcttcgcgttacgcgaagcatttggacacacggggatcactggatggcgagcgtgcgatccagaaactccaaccttacgtactcgatcatgagaatacataaactctcttatactgtcacgtagaacgatttttactgggcaagacaaacactctctgtgctgggtacagaccttctgaatcattttttt

SEQ ID NO: 15208 - DNA, 127 bp, Glycine max
  Clone ID: PAT_MRT3847_113739C.1
attcattcctatagctatagctacaacatatcatactactactgttgttgatgctgctacggctgtagctgctaccacatatcaatcactagcttaccataatgggtatggatagccatgaccccac

SEQ ID NO: 15209 - DNA, 590 bp, Glycine max
  Clone ID: PAT_MRT3847_11373C.1
tttttttaaaataatagtattcataatttaaatcatgcccaaaaaaaaactattgtgtaaaattgttaagggaagaatcccagttactttacaacaccagaatcatttgattactacgcaatatcgttccctctgcagaactggatcgtatccagaattatactctctgtagtactatagttcttcgttaacactagtaatacatcttacacctgtaacatgcggctattgctctaaagcttccgccgaaagaattgtaacctattgaagaaagaatgaacttaattggtgactttgcccgatacacaatctcctttcactacaactgccgccagtgagccaaaggcctcaccccactaacaaaacaatggatcccgccacaatcttacgctgatttttcttaaagagaaaagaactcaacaacacaccatgacaaagcgaaaggaagagtctactcgttgtaagagacataattgaattggcaggtttcacttgggtggatctgagcttattagattgacccacaagtttgctagcttgacgatgtaatgcttcccattccatgccaccaaatttaatccttgatcccc

SEQ ID NO: 15210 - DNA, 662 bp, Glycine max
  unsure (1)..(662): unsure at all n locations
  Clone ID: PAT_MRT3847_113740C.1
aaaaatatcagtattttaaatgtatctattcatcaaattgtattgcttgttaattattaaaaccatagggcatattggaagttcaaactaactgattcttacaacaacctttactacattcaaggagttgattgttggatttggttggaggattcttcactgaaattcatagttaaatctacatattcggcattacattttttgcatagtggaagcgaggagctggactttttcaaaagtttgtggaatatcaaaatcccgcccaaggagacatgttttctatggaggttatttcataacagactaccaactaaggtaaacctcaatagaagaaatattcaagtgcaggaaataacttatcatgccctttctgccnngggtcagaagaaatacatcacatttgtttttctcatgtaaagcatcgcaccttatttggaagagatggttcaatctttttggccttagctctgttctccaacagtctccgaaggatcacttttggcgaaatgcctatgcactgcaggacaacatcaaattctggtggccagttggatgtgctgcacttgtatggaagatctggcagctaagaaatgccattgctttttgaggataaaatgtttgatttggtgctcttggggccggcagatgatggtcttcatttg

SEQ ID NO: 15211 - DNA, 724 bp, Glycine max
  Clone ID: PAT_MRT3847_113741C.1
gttcttaatacagacctaagcacacaatctacctaaatttcagcaatatggtccactacaagctcagttacttcgacatccgaggtctcggtgaaatgagcaggatggttttgcattatgctggagagaagtttgaagatcatcgagtaactccagacgagtggccaaactacaaatcaaaaactccgtttggtcaaatgccagttcttgaagttgatggaaagcaactagcccaaagttttgccattgctcgatatttagctagaaaatatcatctggctggaaaagatgattgggaatcagctcaacttgattcaatcgccgatttccaaaaagatttcaacagcgaagtagcacaatatttccgcgttattgctggatttgcacagggagacaaggaacaactatacaaagatgtgtttcttccagcatccgagagacattttccaaaattggaaaaattgctcaaagaatccggctctggcttcttcggcaaaagtgggccatcttgggttgatttcttcatcgctgaaggtgtcaatactttgagtggatttgctccagatttctttaagaagtatcctgatcttttggctttcaaggaacgtgttcatagtctgcctcaactcaaggaatatatcaagacaaggaaacaaactcctttatagacatttttgcattggacgttttatttttagttaatgtggactactaaacctatttt

SEQ ID NO: 15212 - DNA, 253 bp, Glycine max
  unsure (1)..(253): unsure at all n locations
  Clone ID: PAT_MRT3847_113742C.1
atttatacgagagctattataacgcaaacaaatccaacctgaagttgtatgttagacgtgtgttcatttcagatgaatttaatgaactgttgcctaagtacctaaactttttgctggtaggaattgttgtgctttgttattgcagataaaatatattttatgatgatcagaataattttngctaataaatgtnacttttgacgttgggaacagggtctgttgattctgacacattgccacttaatgtatcgcg

SEQ ID NO: 15213 - DNA, 301 bp, Glycine max
  Clone ID: PAT_MRT3847_113743C.1
gtggcatgctaggacgcgagtgactatgtgggtagataccaataacacgactcataacaagccccacgattatgctaacgagcttgggagagggctcttggaaagttactatctccctcgagctagaacctattctaaacgttagacacaaagcgagagacacaatgacatggacaggctgagagagtggataacacagtggatcacacagtcagacagatgggaggaatgccaagagctctacccaggagatgccaagagagacgctctgactatctctcacgctctctatgaaaagtat

SEQ ID NO: 15214 - DNA, 260 bp, Glycine max
  Clone ID: PAT_MRT3847_113744C.1
cataattcaatgtgtcgtctacaaatgtcacagttgctggataaagccaagaacctcgtgtctgacaacgtcaatgataaggcaaagccggaggcgactgtcaccgaagtggacttcaagcacgtgagcaaatatcatgtcgagtacttggccaaggtcactgttcgtaacccttattcaacttctatacacatttgtgagatcaaccaccctttcaaaagcggatccagggagatatcatcatggaaaattccagaccc

SEQ ID NO: 15215 - DNA, 430 bp, Glycine max
  Clone ID: PAT_MRT3847_113745C.1
aaactcccaagtgataaacagaagaggtttcactttttcaattgctttttctttcctaagcttgttgatttaagcacagataatcgttcaattgcttgtgatggtaaagcagcatttcagcgtgtaagcaattggacaagaaaagtgaacctttttgaaaaggattatatcttcattcccataaactatagtcttcattggagtttgattgtcatttgtcaccctgctgaagtcatgacatgctacagagatgaagaaactaagggatctcccaaagaagcttgcatcttgcacatggattcccgaaaaggaattcatcaagatctccacaatgttttccaaagttatctatgtgaagaatggaaagagaggcacaacaatgtgagggatgatgcttcttctaaatttttagatcttccattcgtgccac

SEQ ID NO: 15216 - DNA, 801 bp, Glycine max
  Clone ID: PAT_MRT3847_113746C.1
gcacgcgtgcacgcgtatctaaatctcgggggtcgagaagacgacagaagggggaagaacatgggaccgattggcgtgtggctataatgcaggtaatgatatggagaatgcagttcaggcaatgaagaaagcagtctcgacaaatctagcaggaaggaggccagacccctttactctggttgcatgtgttaaatacctgaaagaaaaaggagacttggatttagcccttgagattcttaagttatgcatagagaacagccatatctcagtcacttcctatgatggactggtaagttatgttcgtagtgaaactgaaaccccggatacagaaccccttgatcttatcaaaggagattatcaaatgtttgagaatgaaaacactcaacttcttggtggggagaactgatggtagcatctaataggtgggcaaagctgcattatttgttacggatttgttaaattgttcccaggaaaataatttatctaactctagcactagccatagctgatagctctgttttcttttccttttaagtgtttttagaggctcggatgctactttcatcattacgttccagtgattgaattagcatcctaatatattcactgtcataatattatcatttaaccaacttagattgtggctcaataggaggattatatttgttagcttgtagaattatttcattaatctatgcaagctctctacctcttcctcttcctcttgtgaactctattttctcatgcaaattagatttcattaagcattaggaaatttaatttcttataaataaaaaagtt

SEQ ID NO: 15217 - DNA, 311 bp, Glycine max
  Clone ID: PAT_MRT3847_113747C.1
gcaaatgatggtattgaatggattgagaacaagaggcaattgcccaaggcagagcactggaatgtcgaaccctactaattaatatcacttgcacttgctcacatatcattccctactttgtgcaacagcaaatatatgttgctgacatgcgctgagtatatagatcacggccctgtaatttttctatgatgggattttttaacttccttaccaacgtacaagcttaattgcaacagccttgcgtgaaataatatttatgatctatcaatataaatgaagtcaacttgtgtttacacaaaaaaattagaaac

SEQ ID NO: 15218 - DNA, 200 bp, Glycine max
  Clone ID: PAT_MRT3847_113748C.1
tttatctttacattttaagtttatactcctcacatttattatatgacgggcaacatgcctcggatgcgaacgcccattggcttagaatccgtaccttgaaaatttgatctaacagctcatgttttccatgctgcacctccctatcggaggacctctcatcaaaccagtccccatcccactagccgtcacccatctcttcg

SEQ ID NO: 15219 - DNA, 530 bp, Glycine max
  Clone ID: PAT_MRT3847_113749C.1
cagctgcttttgttgcagtaatattatttttaagctaaatttcagtttgttataagttctccagtctgtcataaataagcttcttttttcaccagcacaaactcaagattttgtttgcttgtaaagagttgaaataagaaatgttaaatatttgtaaattgcttgaggcatgggcaatgcactgggcttatgtttgatgctaaacagcttaagcttttggaacagttttggttcatgacattgacattgaaagattggttatatatcaactactttcaatcatcaggtatcaaaaccaaatgcatgcctcatctttaaaaacagggaaaggtggccacaggacttcaaaactttaagagttgcatagttagattaagtcttctttttttcttcatcacatattataaatattccttttaactgcttgatttttatttccataataactagatatcgtttctaaattgatgtcatctttgcataattttgcagtttgagttttaattttgaccttaactgtcaattctgaa

SEQ ID NO: 15220 - DNA, 527 bp, Glycine max
  Clone ID: PAT_MRT3847_11374C.1
gcaacctaaattaatttcctcttccgtaacgttcccattgccgacccatggaaacaatgcgtgcgtcagatactggaaattcctcattttgctctcagtcttgcggttcttggccgagtgtaattgttcctgaaatggacaaaacagatgatggcgaggacagacaggataaagggtgtaagaacaagagaaaattaactcatccttctatactgcctgctagttttccatcatctctgattgagttccctcggtatcaattaccggttccacaaagtggcttaaacggatttagtccatctgagttgtgggcagagttgtttagagaagacgaacctgaactttatatgcatgagcttgtggattggaatgatcctattgcaagccagcttgaggaactactgttgtctaatttgcaagcgattttcagtggtgcactcaagcgggttgttgaattaagctgtgatgcaagattgggtgaaatgtccctttcaaggaaggccctttacattgaggaaggagaccct

SEQ ID NO: 15221 - DNA, 123 bp, Glycine max
  Clone ID: PAT_MRT3847_113750C.1
actgtattcaggaagaaaagatgaaccctactttcctctgactctgaactcggaagatctggcttccattatctcctccatcttcacgtgccgaaattgtagatagaatatcacactcgctca

SEQ ID NO: 15222 - DNA, 605 bp, Glycine max
  unsure (1)..(605): unsure at all n locations
  Clone ID: PAT_MRT3847_113751C.1
tgtggctgaagataatgtaggtgaagagggtgatacaggtgaggaagaagtcgaagatgttcacgatgaacttgagggtgaagaggagcatgagcatgagcatgagcatccagactttgctgatgttgaggaagaggaacaccgagaagttgtgaaggagaggcgaaagcggaaagaatttgaagtttttgttgggggcttggacaaggatgctactgagagtgatctgaggaaggtttttggtgaagttggggtggttacagaggtcaggttgatgatgaaccctcaaactaaaaagaacaagggatttgcattcttgcgttttgaaactgtggaacaagcaaaacgagctgtagcagagctcaaaaatccagtgattaatggcaaacaatgtggtgtgactcctagtcaggacagtgataccctctatttgggaaacatatgcaagacatggacaaaggaagctttaaaagagaangttgnannagcattnaatggagtcaccaatgttgaggatttaactttggtagaagatactaatgatgaaggaaagaaccgtggatttgcgttnttggaatttccttctcgttctgaagctatggatg

SEQ ID NO: 15223 - DNA, 610 bp, Glycine max
  Clone ID: PAT_MRT3847_113752C.1
ttgccgtgctacatgtgtggagtgctgcctgcttggggggggggggggggggggggggatctgccttagccattaccgccaatacggctacacgggggaataggaagctagttaatcggtgtaattacaaacgaaaaaagcgatagttgtggctttggggttttggaggaaagaatataatggaaaaatacccccctacgggccttatacataggcattcgacggtagtgtatacgtcctaataggaaaagccaaccaaccaagaattgcagataggggtagatttaaaaaagccaaaaggggcggcgggcctaggcttaacacggttgaaaggaggaaagggactaaggataaaaaaaaaacccaggaaaagcacaataccctgcgcgcgcaggaacatctgctacaggttggactaaggggtgtccttgggctaagcattgttgtaagattcttaattagcgaaaatcatgctgtgccaaccgtagtcgaggggttagttaatatatttgccaactgcctaatcggtgttggtaatgtaatagaggggttgcccctattacgcaacatggtactaatagccaaacctgcctggaacaagtctgcaagt

SEQ ID NO: 15224 - DNA, 337 bp, Glycine max
  Clone ID: PAT_MRT3847_113753C.1
gctaactaacatagtattaaaagctcaatacattggtacaaacaccgttgattaatattgaacgcaaaaaaaaaagggctaaacaaaacaacaatgacgtacaaaaaacaaaaaaaaacgaaacaaaaacaacaaaaaaaaaaaaaaaacagggaactcgatcaagacaacccagaattactacaccgacatgccagtgatgcagctgatcaacaccaacaccatcatcaataaaatcaacaccaacgtacagctatctgactcatgaaacccgcggatcaccaaacctactagaactccaaaacatccgcctttggccagatcgactcttctcaaa

SEQ ID NO: 15225 - DNA, 457 bp, Glycine max
  unsure (1)..(457): unsure at all n locations
  Clone ID: PAT_MRT3847_113754C.1
aaaataacacacaccttcacacattcatntacgaacaattaaaaagagggtgtggaaaattnttaaaatagggcagagccatactcaaccaagaagggtccatgccnctaatttcccttttattgaaacttaaaccaaacgaaacaanngccgaaagaaaaacaccaaatgtccagaaatcatgcnnaggaggattccngctnattttcaagaaagaatctnnggcagantagccttgtgagaaccaangaaaanagcntgngcactaaagaagtatttacccanngcaattctcaaaatttcttgagaagattccccaagaagaatattcaaaaactgtagaactggtttgggaattgtcaataaaggaaactcaaatgccatggaagtttgantttgcccactcangaactccacatttcaaaaccattattaggaccacatacctctattggga

SEQ ID NO: 15226 - DNA, 491 bp, Glycine max
  Clone ID: PAT_MRT3847_113755C.1
ggctcgagaacgtctctctcacaacggttttccattcgaaaatctgcgttcagaactccaatcacgaggagcacttgttgctgcaactgcatgcaataatgtcgttatccgattctgaaacgccgtacggcggtggaacggagtacaagcctttccgccatatcagccgcgatcggttattaattgaaatgcttagatcggcaaagtcacctgattcgaaagcttggaaggtgctaataatggataaagtcacggtgaaagttatgtcacattcatgtaaaatggcagatattacagaccaagaaatttccttggtggaagacctattccggagaaggcaaccattaccatctttggatgctgtttatttcatgcagccttctaaagagaatgtggtcatgttcctgtctgatatgtcttggagggagcccctgtataagacagcctatgtatttttcagttcaccaatcccaaaggaacctgtaaccaca

SEQ ID NO: 15227 - DNA, 399 bp, Glycine max
  unsure (1)..(399): unsure at all n locations
  Clone ID: PAT_MRT3847_113756C.1
gnagnacnnanaaacagaaacacagagaggaaccagaaacatttttgttttttaaaaaaaagatttaattccttatcttttataaaaggggaaagggaaacccccccctttgcaacattgtgggaaaacaaaaatttttgaaaccttttgaaataaagggcccacaaaatcaaatgaggcgtcctttttgggttaaaaagatcctttaaaaaaccatttgtaccattttgaaaaaagtttggggtatttttttggctttggatcatccctataaacatatgataggccaaaatttattttgtttcccccccgctttttaaataaatccaaaaaagaccatgcaaaatccccctttttgttggaaccatttctaaggggataaagcccccccccaatttt

SEQ ID NO: 15228 - DNA, 287 bp, Glycine max
  Clone ID: PAT_MRT3847_113757C.1
acgccactaaagaacagaatatgagtgtaaatgtacaaataaattcagcggtttatagacataatacactctggatacaccatgcatacttgtcagatacgactctagagaggtttatatgatgggatcatacttactatattggccgatcgcccacgtgtgaactgtctaatctatgagccaaggcttcagtgtcatatcttgcgttgatgataaatatgggcttgacccatccacacggactatgggaatgcttcactctgattcaacaccttggaccggatgta

SEQ ID NO: 15229 - DNA, 476 bp, Glycine max
  Clone ID: PAT_MRT3847_113758C.1
ccacgcgccgttaagaccctgaaacaacgaggatcaggcggagatggttacaaactagacccaattgactcctgatgatgatgaaactcctaaaggagccatgacggaccttaaaaacccccaatctaaaagcgcaccacccaaaaacacaggcggaggaaccactcagcgcagcgatctattggcaaatctcttgacagagggcaatctcagagcaagagttgatttgcagcgcacccatcgcaataaaggaatgatcaaaaccggtggccacagctggtatccctgagaatacagggatatcattggcctgtgctatgaatagtccttatagggggcgggccagttctgaaataaacaccatctggtctcaagactggcgaaccacggaatcctgcgtgcacaaaagcaacgactatgccatttaatccaaacccgagctctgatgcatggagtctggaatctttgaaccgacc

SEQ ID NO: 15230 - DNA, 684 bp, Glycine max
  Clone ID: PAT_MRT3847_113759C.1
ccacgcgtccgctcacagacactcacgaacacaacgcttcttcgtcttttctgattttcgctccaaaacccattgcttctatcactcacactccactttcagatcggtgtgtgtctctctccccgacagacaaaaaaagaagaaaaggatttgaagatttggaaaagttgctttcagtcttgaagtactaaaaaagttgagtgtgagatgtgaagtgaattttgaacagtgaaaattggtaaatggggacccaaaggcaaaactcaatgtacagtctcacactggatgaggttcagaatcaattgggtgatttggggaagccgctaactagtatgaaccttgatgagcttctaaaaaatgtgtggactgctgaggcaagccagaccattggtatggacaatgagggcacatcacaagctagtcaagctgctctgcagcatcaggctagtctgtcattaactggagcactaagcaagatgactgtagatgaggtttggagagatatccaagaaaacaaaatcattgcggagaagaagttcgaagacagacatcctactttgggagaaatgacattggaggatttcttggtgaaagcaggtgttgttgcagatgcatcttctaatagaacaaatactggtactatagctggagttgattcaaacgtggcagtaccgcagtttcctt

SEQ ID NO: 15231 - DNA, 406 bp, Glycine max
  unsure (1)..(406): unsure at all n locations
  Clone ID: PAT_MRT3847_11375C.1
cgaannagggagcatgttttgctgctggcnncgcgtacgtcaggagggcttacttacgtacgcgttgtctgcctaagacaatgttccctctttttaatttatccctaaaaaaaaaaaaaaagagagagtgtcgcgaggagaccaaattactcttcccgagacagaactagggagctgctaataggatcgttccacgtgtctcccagagtggttttgcttttgtgttacaccatataattcatcacaaaaaacggccgatttgggcgggtgtcacaacaccagagaagcgggtaccaccaccctttaacaaacccggcacttccgggtacgctttcccgctnntccgcctgtgctttccgattaggtttcgccgccgctgccnnnncgcnnntcgcgaccggttctt

SEQ ID NO: 15232 - DNA, 490 bp, Glycine max
  Clone ID: PAT_MRT3847_113760C.1
atcggttttgggaagaaccgatattgtttttgcattttttaacattttgtttatttattaaatgaacccaaacctgcaaattaaaaacaaaaccaatccaggcgaaaactaaatcaatctatgcattatatattacattaaaattattattaaataaatattaataaatacaataatgtcaatacctaactatcatctataatctaagatttacttaagtctaacatttgcaaaatttcttaaacactacttaatgcttcatttttaacttttgggaaacatcttgcccattgaatgcgaattgcatttattctctctggttcccatgtttgtggatcattcaataattgtctcgaataataaaatataacctaatcatggcaaataataacaactataacaaatgaaattaggtttgaaaaaaaacaactatcattttcttattatcattgaaagctgtggaaactatgggtgatattttatgcatgat

SEQ ID NO: 15233 - DNA, 1573 bp, Glycine max
  Clone ID: PAT_MRT3847_113761C.1
tgacgacagaaggggtactaaaaaagttgagtgtgaggtgtgaagtgaattttaacagtcgttttcgggtcacggccccccttgctttgcggtctcgcgctcgcggcccgaacggcaacacaaaaagactcccacttcggccgtgaaaacctttgtgcattacccgacgcttcttcttttcttgttttcgctccaaaacccattgcttcaatcactaatactccactttcagatcggggtgtgtctctctccaacacgcacaaaaaaaggatttgaagatttggataagttgctttcagtcttggggtactaaaaaagttgagtgtgaggtgtgaagtgaattttaacagtgataattggtaaatggggacccaaactatggggactcatggtggtggtggagacagtaatgggaaacagtcaccactccagcctctggtgcggcaaaactcaatgtacagtctcacacttgatgaggttcagaatcaattgggcgatttggggaagccgctaactagtatgaacattgatgagcttctaaaaaatgtgtggaccgctgaggcaagtcagaccattggtatggacaatgagggcacagcacaagctagtcaagcttctctgcagcgtcaggctagtctgtcattaaccggtgcactaagcaagaagactgtagatgaggtttggagagatatccaacaaaacaaaatcgtaggggagaagaagttccaagacagacatcctactttgggagaaatgacattggaggatttcttggtgaaagcaggtgttgttgcaggtgcatcttctaatagaacaaataccagtactatagctggagttgattcaaacgtggcagtaccacagtttccttcacaagcacagtggatacaatatccacaagcacaatatcagcatccaccacaaagtttaatggggatgtatatgcctagccaaggtatggtccagccattacacttgggggctggagcttcattagatgttttgtttgcagataatcagatggcaatgccatcgtctctgatgggaacaatgtcagatacgcagactcctggaagaaaaaagagcacttctgaggacatgatagagaagactgttgagaggagacagaaaaggatgataaaaaatcgggaatctgctgcccgttcaagagcaaggaaacaggcatacacaaatgaattggagaataaagtctcgcgcctggaaaaggaaaatgaaaggctgaggaaacgaaaggagctagagcagatgttgtcatgtgcaccccctcctgaacctaaatatcaacttcgccgaatagcatcagctccattctgagatctgtacctagttgtagcggtttgtatatttgagtatcagggaattctccttgtggattactgtgtggttgaatccagtatgtcaagaatagctatgtgatgcatttgcatccaatgacttgcttttaattgttaagttctttataactcctctgtgaaggttctttagaaaaaaatgtaaaatattgtagttttaccattcacaatatagcccttttaatcatgccttgagaggt

SEQ ID NO: 15234 - DNA, 1272 bp, Glycine max
  Clone ID: PAT_MRT3847_113762C.1
ggctcgaggcaccgacgatattttctttcttatttggttttttaagtgaaatgtgcggcaaacctttagatgcagaatcaattcaaagttcaaacgataggagaagaagggagtagcgacgaactcaaacggcgtcgtatcgactcgttgttcatcgattggattgaagggagagagagatctggtagcggtagcggaagatggataagggtaagatcgaagaggtgatcgagaagcaagtcctgacggtggcgcaagccgtggaggacaagatcgacgacgagatcgccgccctggagcgtctggacgccgatgacatcgaggccctccgcgagcgccgcctccagcagatgaagaagatggcggagaagcgctcccgctggatctccctcggccactccgaatattccgagattccctccgagaaagacttcttccccgtcgtcaaggccagcgaacgcgtcgtctgccacttctaccgcgaaaactggccttgcaaggttatggacaaacacttaaatattttggcaaagcagcatatcgagactcgctttgtgaaactcaacgctgagaaaagtccgtttctggcggagaagctcaaaatcgtcgttcttccaactcttgccctcatcaaaaatgccaaagtcgatgattatgtggtggggtatgatgaacttggtgggactgatgagtttagcacagaggagctggaagaaagattggctaaagctcaagtgatcttttatgagggcgaatcatcgttcaatcatgcaaggtccagtgccaaaaccacaagaagtgttcgacagagctccagagcagactcctcagattctgagtaacctgcatttcctgatgagtttgttttatttacctgcaccctgagcgaccgggttatacactctaaacttggtctcagtgactgctttgtggtgtgtctctatctgtaagaatttatcaggattctagatctagtagatcttcttgaggtcatcctttttttacagtgcctatttttgagttagcgccctcccccctgattatagtaacttcattaatctttgttaatagttttattttatgagttttgagattgatacaatgcttaattattgtgttttgctaatgcattggtattactatgagtattaccgtgctttctggagtgtctagtgtgtacccataaagtaaacgctggctgaagatgtttcttcggtgggaacatatatatggctatataaattgtggtttgaatttggatcatttttaagg

SEQ ID NO: 15235 - DNA, 507 bp, Glycine max
  Clone ID: PAT_MRT3847_113763C.1
acggctgcgagaagacgacagaagggtacggctgcgagaagacgacagaaggggatcgtaaatcaattcaaacaataggagaagaagggactagcggcgaactcaaacggcgtcgtatcgactcgttgttcatccatttgagaggcatctggtagcggaagatggataagggtaagatccaagaggtgatcgagaaccaagtcctgacggtggcgcaagccgtcgaggacaagatcgacgatgagatcgccgccctggaacgcctcgatgccgacgacatcgaagccctccgcgagcgccgcctccagcagatgaagaagatggcggagaagcgctcccgctggatctccctcggccactccgaatattccgagattccctccgagaaagacttcttctccgtcgtcaaggccagcgaacgcgtcgtctgccacttcttccgcgaaaactggccctgcaaggttatggacaaacacttaaatattttggcaaagcagcatatcgaga

SEQ ID NO: 15236 - DNA, 175 bp, Glycine max
  Clone ID: PAT_MRT3847_113764C.1
gtcgtatcgcccaagcgggaacttcaggaccgaggtccgccgcaaccggtacaaagtggcgggggacgccgaccaaggttggagaccacgagaggacaccatggtggagatccgcaagaaccgcaaagaagaaagtttgcagaagaaaaagggcgaagggatccaacctctagaa

SEQ ID NO: 15237 - DNA, 368 bp, Glycine max
  Clone ID: PAT_MRT3847_113765C.1
aaacaacaacaaaggggaaacaatttttttgttaaaaaaaaaatgtaaaccttattttttttacagaccctgaagatttaatccctcattggataaatgatggttccccctggtttatctaatttcccccctaaaaagttaaaaactaactgaattttataaaaaaaaaaatcctacctacttttggaagctgtataaaaataaggctccctacgtaaatttaccccatttttttcctaataactcaacccttaaaagggggaaacgccacccagaaattaaaaagggggattttcccatttggaaggtttaaaaatgaccgcgaggaccccctaaaaaatctttggaatcatttaagggccccaaga

SEQ ID NO: 15238 - DNA, 391 bp, Glycine max
  Clone ID: PAT_MRT3847_113766C.1
ttccaatgcagggatgcccgtcatcactgtatgatgttgctccctccttggttgggggggggggggggaggtgggggcagcacgataccatatgtaattggcaggctagattagagagttaaaaggctggttagacatagcccttaggagctaaagcatgcaggaaccaccacgcaccagtaaaccatagtcttattgtggggataagagtgggagttccaatctgaatggcggattgagatatggaatgggattcagctgctggacttgtcgagtaggcatgcatgaaattaaatacaggcccaaaatatgtgagccccgtgacactacaagagtggtggtggagatgtgggagtgcgacagagatttcccctgcagggaggagaaagtt

SEQ ID NO: 15239 - DNA, 276 bp, Glycine max
  unsure (1)..(276): unsure at all n locations
  Clone ID: PAT_MRT3847_113767C.1
acaatnttcttcatcgtcgtcgccgcaatgggacgtgtgatccgtgcgcacgtacncngnanccaggttcggtnttcaagtccgcacacgcaccacggcaagggccctgcccgcttccggagcctggatttctgnnagcgcaaaggctaacctgaagggtgtcgtcatgangtgcanccangatccctgncccgtggcgcgntctcgataaggtcgccttccgccaccgttccgtacaagaagcagaacngctcttnatggccgcncanttctgta

SEQ ID NO: 15240 - DNA, 440 bp, Glycine max
  Clone ID: PAT_MRT3847_113768C.1
cccacgcgtccgcaggcgtcaaggtggaatccagcagttgctagctgcggagcaagaagctcagcaaatcgtcaatgctgcaaggaatgcaaaaactgcgaggctaaagcaggcaaaagaagaggcggaaaaggagatagcagaatatcgtgctaagatggaagctgaatttcagcggaaggttgatgagagcagcggcgactcgggtgctaatgtcaagcgtcttgaacatgaaactgatgcaaagatcgaacacttgaagaccgaggcgtcaatcatatctcacgatgttgttcatatgcttttgaagcatgtgaccactgtgaagaattagagcgtccaacatgttgtgaggatgagacatgcatcaaaaagtattttcgataaatttgtgtgtttccgagtattaaaaccaatggacaaaactggtctttggttgg

SEQ ID NO: 15241 - DNA, 364 bp, Glycine max
  Clone ID: PAT_MRT3847_113769C.1
tgttaatcagaacgattcggattgagcctacctcctttatgagtcgacacctaaacatcaaactggcaacttccaccgcatcgcgggataagaccactcctaacacgttatgatgacctgaaaataactataaacttcctatacgcacacagacggtagcttcacgggcgtaccaatggctactctgatcaagaccctgtgagaaatattaaagacgggccactggcaaaagccaccatggcatccactatgaaagatgctggggccaagtttggaggaagaatagaatggaaatctcgaccaacccagagtgtggtggatgagagaaacaagctggcagaagactttaaaaaggaagaaacag

SEQ ID NO: 15242 - DNA, 3008 bp, Glycine max
  Clone ID: PAT_MRT3847_11376C.1
gacaaacagattgaatctgtaaactttttcctatgtttcattcatataaccgacaatcaaatacattgacaaagaaagaaatgtgcacgacccacttccatgaaaaataaaaaactaaaacttcaaagatagacgatacaaaaaattacattatttttttataagaacgaactacttctgaccacccctttgaaagagaaagcaaaatatatactgcaagtgcaaggagaaatataaaagaaatccagtaaaggaaaaaaaaaaggttgaatataaaattaaataaattgttaagaaagattgttttgactttgattggtttgactgtgtacctcatcttttctttcctggttccacataatggatgcaaagcatcttccatcagagaagtatctctgaccttctccattagatttaggagtgtgcaaagaagaattctgaccagtttgcacttcattattaaagtttcttaggccattttggttcataaattcccctactgtatggtttgttgctggttcaagatgactagacatgttaagtccagtggtttccacttgcatgtcttcgcggttgggatgagaattcagatctatctgtccagcactggactcacccacctgatgttgacttttgtttagtcccacctctttctccaaccgacttgtatcgtccctcggtgctccgttggtatccggctcatctttcaggagagtttggtctttttgggcagtatctgcttcgcgttcagattgccgtttcttcttccttagcatgagggttttgaaccggcgcttcacggtcatgcacacgttgcacgtacaggttggcttatgcctcccctttccacttggtggctgaatacatacgatgcaagagcagccgggacggtgtctaggatgtttggtggtggctccagctgatgactcggcagtgtcaacaagattttctccaaggacagctgcactggcaagggcatccaggccagaagcctcgtgttcttggattgacttgctgctttctgcaattcgccgctttttaaaatctttgttggttttcagaagattttctaattcctttgaacttaactcctccggcacagagcatgaacacctgcttgaatcccaaacattttcagaacatgtccacttgggaggaagaagagcatcaacgggcagctttcgccatttagagcaatcatcacactgagcccattgttccttccccccagatgaacaggcactgaatatagttctctttacaaaaacagtggttacttcatattcttcaaatacttggtcctcagttgttataatttgtggcttgacaaccggagaaggacgaaacaaatattgtgcttcttgatatgtaagttccaaatgagtttcattagagttaaaatgtagctacatgtaagttttacttccatcattgtaagtcgtagcagcagcagcttcttcagttttcttagtagcctccttcagtttcttccagttctctgaactatcaattatttctccagtttttataaggtagcggacttttttaccattatctaggactttatgccccacacgacttgctaccttaagacatttggagtagagcatcgcatttgagctgtggatagaaccttcaatcttaataatttgtccccgttcctcctttgctctactcgtcacatactttttctaaatatttgaaatattttattctaaccgtgatgccatatatgaagatcaacctttttgtctacaattaattccttcattatcaagagatcaatagttccttctctgtatggtaactgttacaccctccaatgtatacatcctacttttgttataaggccaaaacctctactcaaatgtccactcaatccccttcacatcttgcattcgtaaagcaacaccttcagattgtgaaataagaggaaaatgtgcatcaggttaggcttagggaaaaacaggacggccaataagacctgcgacagtggccctcaacaccttctcaaataatggtagaagtagacactttaaaccgacagactatcactccatacttttttctctcatctattgacagaatcctgcatctaattccctgttaccaataccatctaaagatggcttagaatcaaaaaattcattaccaacagttttatccattttcaattttatggtacgccctctcctaactagacttgaacgtaaattacaactacactaaaaaagacatatttatttaggttaatgtcttcctgctagtgcttttttggttgacgtcagtaccatcacgttcaattagtccagacttcattaccttcgcaaggatggatgtttagataccattaggcctccgctttatcaaaactttctctctttcttattttgcagcagatgttcaatgccacgatcattgtcagtatgcttccccacgatggcgaccatcagatatatcaagttgagaatctgaatagatctacatacaacaacctcagtcataatcattctcccatgatccccttctactctactctcaaaatgctcttttcttcaaatttaaatcttttactatgttagatgctgttatgcttgaagattttagtaatctccccaactttacccctttcacgtccagatatgacttgcaccgtatctccaagtttaacatgcattttgtgcaagataggaaggctgtttggtttacactccttccgttcccatcgtttaagcctcattacaataggacattgcttctctgttgacttacccggaagaagagaggggagggtgatgggagaaaggcgttggcctaagaaagagttggaggagagggagagaccgaccattgagctctgaagcgcagccatggctgccattgttgctgcaacctcttattctttctttctgcttctgataatgcttgctttcggataatacgatgtatgggagacgcggagggctgtagagaaaaaaagtgaagagagagaaaaagagagagaggaa

SEQ ID NO: 15243 - DNA, 516 bp, Glycine max
  Clone ID: PAT_MRT3847_113770C.1
aaaaaatatactaaccattcatataaattcaacaacaatagaaatgtaacttaatagataactgaggtgtgtcactgcatatccaatgtggaatgacaaaaacatcagcagcagtgaggccactgcataaccaactcctctgatcaaacaaacacaaaatttacaaaccattcatgtaaagtcaacaacaatagatatgcaatttgatatggaaatgaggtgtgtgacctttatcttttcagcaagcctctagcgatcatttcacaaagaagtttctctgccttatcagtctcacccttttccaagagagcacagataattattttgaatgttatagcattaggggagcaaccactgtcttccatttttgactgcaaagcatatgcctcatcaagcaacccctctttacaatgcccatatattataatattatatgtgtaaacatttggatgatagcctttatccaaaagatcttgaaaagcccttgacatcttaagtcttttgcctttgcctata

SEQ ID NO: 15244 - DNA, 527 bp, Glycine max
  Clone ID: PAT_MRT3847_113771C.1
ctctttctttgccgtcgcggttgagccggggcagtggagcccagagaagaggaagtgctacaacattcttgatgctgtcagcaggcacaccatccaggtgttcccaaagtcttgggccgcaatcatgttgacttttgacaacgctggaatgtggaacttgaggtcggagatggcagagaatcgttacctgggacagcaattgtacgtgagtgtcttgtctcccaacaggtcccttagggatgagtacaacctcccagagacccagcttgtctgcggaatcgtcaaggatatgcctaagccaccaccttactccagttaagagatttttcttctgcgatcatcatcagtgccaccacgtcgtagctccaaaattgttccatcatgagattgagacgaggggttaattaattagctctagttcatttctcatgtttcttgcgtggtcactgatgtacaaccctttcctattcattttctatatcaatatcacataaatatatatatgaaagtctccttccttttcctat

SEQ ID NO: 15245 - DNA, 330 bp, Glycine max
  Clone ID: PAT_MRT3847_113772C.1
acgcccacgcgtccgcaagattctcacaaacaactcttgataaagaaagaatggctgccaacagattgaggagttctgccatctcagccttcccatctctcctttccttctcaaaatccaaatttgccccaacaattcctctttccaactttggtgtcaccaatgcctcttcttctcgcttttccattaatgcttattggatgccctggccagcctaaacccccttacctagatggttaaacacctggacactttatattacacctcttgcctctgggaaaaaccccagaaaatctttagaggtccaaagagtcagaactcattcactgc

SEQ ID NO: 15246 - DNA, 315 bp, Glycine max
  Clone ID: PAT_MRT3847_113773C.1
cttactcgttcggggccgcatggggttgaaatgatgttccaagataatgaatgctgcttgtacctggtattttgactctctcttgatatttcggtttgcttctgtattgtcaaggagacagggtacaagtcttgctcaacatttattcgaatggcaagaagaataagatggtgaggcacctaggggaatgcagcactacacagctgaaaaacttgcatgctctggagaacttgctctaatggccaataaacccctccaggcttgtgaatgtgctgtgacaaaaggaactcttaggcctttaaaacgagaagattt

SEQ ID NO: 15247 - DNA, 510 bp, Glycine max
  Clone ID: PAT_MRT3847_113774C.1
accaggagcaacctaaggactaaggaggagttgaacgctgtttatttgttgagttgatatggtaattgggcagtgacggttgttcagtaattttagcaaaatgggtcaagaattgtggtcaatatttcagctggaaagaaagagattgttttggctaatcggcattacagttgcaatcatattagcattccaatatttggaacttccttatggtggcgttcaacccattgtattctctgccgaaaacacaccaacatcggatagcattagattccaagctgcagatctaccatctgagtctgaaacgttcaacaacatgacattttttaacaaagcaaattctactgatgaaaatgcctttgagattggtaatgaaactaggacttctgaggaaaagggtactgtttcaaacactggtttaatcacagcccgggaagggaatcaagcagatctttaggatttgatgaaactaatgaaagttccactgtggaaaggttttgggatattaaa

SEQ ID NO: 15248 - DNA, 360 bp, Glycine max
  Clone ID: PAT_MRT3847_113775C.1
cggctcgagcaatcaatgaaaaaacccattaaaaaatgtgttgaaattgaaaaaacccattaaatgatctttgggaggaatatagcagcatgatccattggagtatttgctggttgaatttggtattgctgagaagctcttctaagacaattttatgttgtcgatatttatttattatgacaatcactagtacatatacttttactacccaactcatacccaattaggacaatagtacaagacttgtgttggccttgtgtctgttgcattagtgaacccatatcaggtgaactgaaactgatcaacgaagcactgcaggttcagcatattataaagtcaaggtgtcactattttttcttc

SEQ ID NO: 15249 - DNA, 317 bp, Glycine max
  Clone ID: PAT_MRT3847_113776C.1
gggggggcataaattatttactcattaaatttaattacattttggggcctgtttactggaaaggtgatgttacctaacatacatgaatttccgggggatgcaacgtttttttaattagctttttcacattccggattaaaaatttttgtccattttaagggcaaaatttggtttagcaaagtcatttttttcccactggttttgggcatatttccactcggtactcctcaggggggtgaacatatgtggggggtttcacctttggaggccccataaactgggagggtcttggttctgattttttatttgaaaaaggg

SEQ ID NO: 15250 - DNA, 613 bp, Glycine max
  Clone ID: PAT_MRT3847_113777C.1
tacggctgcgagaagacgacagaagggggggagtggaattttcattggaggagaccatggttccaatggggataagccatggtcactagtttcatgaacaaattggaaggggcgagtttggtggcggataggcaagattcattggtgtggaaattggccttaacagagtgttacttcgttagagatccgtatttgtttctaattgaaaatacaaatcccgtttatgtccttttctacaggtcaatttggatgcttgccatcccccacaatgttgctatcttcgagtggaaactatcaaaggataaattacccactaggaaaaatctgcaatgtaggaacatcttgttagaagaacaacaccagctttgtccgttctgctcagggaaagaggaggatagcagtcatttaatattcacatgttcgttttcatatcagatttggcaaaactgttataaatggattggggttcagattgctcaacacagggatcccaaataacatttctttatgcataactgtttttggctcgaaaggaataaaactattatgtggagagctatttggtgtgcaatggcttggtccatttagtgtcacagaaataaaattgcctttg

SEQ ID NO: 15251 - DNA, 396 bp, Glycine max
  Clone ID: PAT_MRT3847_113778C.1
ttattttttacttttttgtaacgaaaaacctgggatgctctgctgtgacctccatacatacatccatgtaaattttattttacaccacatgaagcattgccttaactaattatatttgctttccttccaaccaacgaatataaaaatccaacccttacctcatcttattttccaccacgatgatcccaccttctttgattgcgaggaaggtaaagttgttctcaaactcttgcaaatcccccacaacttggttatttcctttacaccgcctacattcatccacaatcttatatgtcaaaaatcgagtacaatcctcactttcttttaatgtcacgcacatatcactggaccctctgataataatacccttatagcccagcctggttattttcttgt

SEQ ID NO: 15252 - DNA, 136 bp, Glycine max
  unsure (1)..(136): unsure at all n locations
  Clone ID: PAT_MRT3847_113779C.1
ttacggtgacatcttggccangcctatctcgctgatggttactngggangtcaatagtntanactgaggnaaatgggaatnacttcccctaaaagganaagnccccnttnnaaaanggcantttttcgcaacnncc

SEQ ID NO: 15253 - DNA, 425 bp, Glycine max
  Clone ID: PAT_MRT3847_11377C.1
aattcggctcgagaagacgacagaagggcaacatgcatgatgcctttcaactaagtgcctgtttggtttaagtttattttgaagtaatatattttcaaacattaatgttcttaagtctgggtttagtctaactcaaccgaaaaagttggcttgtgaggtgaggattgttcaagccttaagtagctctactagcaatatctataatgatgtgccataattgtttgattcctctcgagaagagtgttaatattatttaacacactctttttaacatactctcttctattaactaaaatttattaaaaaatattaaattaagaattagactcattaaataagaagtgagacagacaattttgtgattttaaataaagttcagcttataataagtagccaaagaaaattcattcaagaactacatgagt

SEQ ID NO: 15254 - DNA, 214 bp, Glycine max
  Clone ID: PAT_MRT3847_113780C.1
ttcatcagtcttctaattttccagtcaagtgccctacactacatcacatcaaaatagtagtaatattcaagaaagatgatggaaattgggaaccactactacttggctgaacttggaattggggatccaaccttggttggtcaatacccgagggattcatttggatgtccactcgatgactttgacttcgagagtttctccgggtccccagaga

SEQ ID NO: 15255 - DNA, 422 bp, Glycine max
  Clone ID: PAT_MRT3847_113781C.1
cttaatgtcgtgcatgcttgcattgccttctgctctaagtggcacaataaccgagaattttgaattagcgtctctaccacggtgcctccataaaattggactattcatggtacgtagagtaagagccggttttgtatattttgtggcgcacaataaactagtctattcggcacctatagttctgggactcaatttcttatcatgctggcttttgggccctaagcttagcggcgcacaccagggtgacctggtcgcgtctcactccgtcggtggcgcttggcgtatcactgccgatgactcgaactcctatggctggtctgcgaaaagcatctaggtatggtgactaatgagaatgctactcaagagggcggggtacgttacatgcataaataggttttggagaaccgatgacgatatctgtt

SEQ ID NO: 15256 - DNA, 2790 bp, Glycine max
  Clone ID: PAT_MRT3847_113782C.1
gggtttggtccgtcagcggcattgattggtccgaccaagcgtccgcggacgcgtggggggagggagaagcacttttagcataagcgaaagaaagaaaacgtggtgcgtttctcgccggagaggaatgtggttttgctaaccttcctaacttaaccccacacaggcagaggctccttccaacccaagaaaaccactaaacgacgatgctttaaggcactattggctgcagctgcaaccactacatacacatacactttatctgacgaaaagaaaagtcagtgtgagctctgcgattcctaattcgcaaatcgcaaccgatttatgatctatctctccgattccaaataaagagagagagagagagagagatgtgggtgttttacctgatttcgctgcctctaacaacaggcatggtgcttttcacgcttaggtacttcgctggccccgatgtccctcgctacgtgctcttcaccgttggatatacctggttctgttctctctccatcatcatcctcgtccccgctgacatttgggcggaaattgcggttgtgatgtggttgcggagtgtggactgttttttaaaacctcaggcactgccagagaaacaatgtttagttggacgtgtgaatacaatgtcttctaaccaagagaatggagctatttcattcttctggagctggtcctattggagtacatttttacttacttggaagggaagtcttttgggatttgccatggcctgctcaaatacttttggacttgttactggtgcatttcttcttggctttggtttaagtgaaattcctaaaagcatttggagaaatgctgactggactatccgccagaaagttcttacgcacaaaattgcccaaatggctgttagactggatgatgctcaccaagaactttcaaatgctattgttgttgctcaagcaacatccaaccaaatgtccaggcgtgattctttgagatcttacatggatgtaattgatgatatgctaactcaaatgtttagggaagatccttccttcaaaccacaaggtggccgattaggagaaaatgatattgattatgatacagatgagaagtcaatggcaacactaaggcgtcatcttcggggagctcgtgaggagtattatagatataaaagtgaatatatgacttatgtattggaggcacttgaattggaagatacaataaagaattatgaacgccgcaactcaactggatgggaatataattcaagcattagacctgctcggactggcaagtttgggtccttatgtgatactttagaatttttatggaaatgcattttaaggaaacaagttgagaaaggcttggctgttatacttggtatcatgtctgtagcaattcttttagctgaggcaactcttctgcctagcattgatctatcgcttttttccattcttataaaatcggttggaacacaggaggtccttgtgcaggtgtttgcttttgttcctctcatgtacatgtgcatctgcacatactattcattgttcaaaattggaatgttgatgttttactcactgacacccagacagactagctcagttaacttgcttatgatatgctcgatggttgctcgttatgctcctcctgtctcatacaactttctcaatctcattcgccttggcaagaataaaacaactatatttgaacagcgaatggggaacattgacaatgctgttcctttctttggggatgaatttaacaaaatctatccacttattatggttatatacaccattttagttgcaagcaacttctttgataaagtatttgattttctgggaagttggaagagatatattttcaaaactgaagctgaagatatggatggttttgatccatctggattaattattttacaaaaagagcggtcttggcttgagcaaggatgcaaagtaggggagcaagttgttccacttgcaagaaatttcaataacattgatattgaatccagcaacaattttatggagaggaatggtgctgaaatgaagccaacttccaatttaattactgatgaaataaatggccgtctgtccaaaacttcgaaggaagacacaagcagaagcagggaagccatcaccaagaagtatgctgtcgttagagagcagggtcggccagcatctaagttgaagtcagaagagaaaaacgcagcctagggctgcgagaagaccacagaagggaatactaattcttgcaattcatctggaggatcatcttcaggtttgacttcgacgtggcaatcgatgaagactggctttcagagtttcaaggtgaacataggggccaaaaagtttttacctctacggcaaatacaggaaaataccggctctagtcattcctcgtctgagtcccttgatgacatatttcaaaaactcaaacggccaactttaaaccaatctatatacaatgacgacgattagtatggaggccaatacttttggttcttcttgttgatgtatccataatttggaaaggacttgcaattgtaaaagcgttctaggattgggaatgcaggtccatattatcatgtacagtaatgagaaaatttaaatgctgtacttagaaaatgacaatcatacttaaatcccccaaggcaaaccaaagagggaaagatagtgtgctatacggaaactcctatacgtttgcaaatcaatctcacacaaaatcttgatgtaccagtggacggtgtcaccgacgtttaaaactcctatacttggatcaaattgcattagttttatgcgatgtctttgaaaa

SEQ ID NO: 15257 - DNA, 387 bp, Glycine max
  Clone ID: PAT_MRT3847_113783C.1
tttccgctccaatgaaatgctgagagggtcccagaaagcagagacagagagcctccgttggagcgtgaacaccaagctctgaagttgaagtgatgtggtgtactcgggaaagcaatcaaagctcagaaaatttaaactaaatagagtgagtgtcagtgaactgcgaacgtgcactattgttattgttgtatttgaagcacggatctggatccgttggaacaagcacacaacacagcataaggaaaggggacactacttctactacagtaccactctcgcgcttgaaggagggaaggatggaagggtctacatagagtaagtgggggcatggtgattgaagccaatataataattgagacttgagagggataaaactaaactaaaggg

SEQ ID NO: 15258 - DNA, 506 bp, Glycine max
  Clone ID: PAT_MRT3847_113784C.1
tcggaacgagatgtgtgttaaaggcagagtgccggcgctcatttattttctacgctaccctattctttccatttcaaccgtgactcgtgattgagtcaccaagaccaaagcctctcttgtctgccttcctggcagacgacggcgacttcccttcctgcggcggcactctttgtcagttttcattttcactactcacttacagattgacgctcacatttctatttgcacttgctcttcagtcaccgactggtttccctcgccttaaacagagacatctcccctcatcttagaaccttcttgattttacaagaatcgcaaaatataaagcagacacattagaaaattataataatatccaccttcaaacatgtgcttcattcgtatatcttgatctctacaattattacgtgttatatcttgtgtacatacatacaatatcatcgtacacttcgtatatggatgaaataattacgtgagcactcagcattaaaaaaaatcattttcac

SEQ ID NO: 15259 - DNA, 341 bp, Glycine max
  Clone ID: PAT_MRT3847_113785C.1
aaacaaagaaaaaactcggcgattggtagaaaaagatgattaaatccttcaaaactggattttcaaaggcaaaacatcaaatgggggggggtctcaaaataggttttcagaaaatggagcaaaaataagatgaccgcgaaattaacgggagcgggggaaaaacaggggggggtttttcttccacgttgccctgggggatggacgggctttgggatataaatgtcccctgccacgtaaacccctgttgtttttcccggcagaggtaatcccacccaactttctgtgcttgggcactggattggcgagccaattgattctgggatcattttttatggcggggt

SEQ ID NO: 15260 - DNA, 423 bp, Glycine max
  Clone ID: PAT_MRT3847_113786C.1
ggggaataaatctgttatctgtcataatatatatgtacaaagaatggtcagggtaatactaaaaactaaacaatggtttaataaaatgtctacaatatttacaactcagtcgcaggctagcagacaattaattctacatgcatattcaacggatacagttcacgttagcaaagggctcaacgttagttttgggtgctggtttggaagcctgtggagttccaaagacattccaaaatctcagtgtctcatcccctgctgcagaggccacagtacacccatttggactttgcgccatatacagcaccctggaggtatgacccttgagctctgccttcttcagcattgaaggatatttccaaagagcaagctggttctgggtgaaaccatgcgagctaagtaattcacgctcattcttgttccaca

SEQ ID NO: 15261 - DNA, 424 bp, Glycine max
  unsure (1)..(424): unsure at all n locations
  Clone ID: PAT_MRT3847_113787C.1
atgccttgcggcggtagtttaatttccaacaaagaatatatgtacagccctttcattacaaataaaataaatctatcacatacaacaattaagtacacgaatgataatcctattcattttgaaaggggccgggggcgccggacgcacaagcgcttagaagcacttgcggaggacaatagaaggtccagactcgtcgtactcctccttagagatccacatctgtaggaaggtagagagggaggcaagaatggatccaccaatccacacggagtatttgcgctcagggggggcaatgatcttgatcttcatggttgaaggagcaagggcagtcaactccttttgcatacgatcagcaattccggggaacatggntgcacctccagagagaacgacgtttccgtacaagtccttacggatatcaaca

SEQ ID NO: 15262 - DNA, 317 bp, Glycine max
  Clone ID: PAT_MRT3847_113788C.1
gagaagaaggagttctagcagtggactcgcttttttcaaattaggcgtcccttattaagaaaaggtaacaaaggttaaatccgagcttgtttcataccatttgttatcaatcgggaggagtttcaaggtcaatctattcacgcctctggataatatctcccctctggaaccaataattccaccaatgaaacccatggttttattatcatttcggccccccatttggatcgggggcctacgcccccgaaaagagcgcttggacttcataaaaaggcgcttaaatctttccaaggattatttatccctatgccaaaatc

SEQ ID NO: 15263 - DNA, 163 bp, Glycine max
  Clone ID: PAT_MRT3847_113789C.1
cgcatacacatctccccaggctttcacgctcgtctctcagttttattcgaatcccactctcaatcacctttccaaatggccagcgcagtggttgcacaggagaccccaacaacagttccagaagatgagacaactcaggcaatcaagacccaggaaacaaccc

SEQ ID NO: 15264 - DNA, 246 bp, Glycine max
  Clone ID: PAT_MRT3847_11378C.1
tcggttgatggggacttcaacgaccatgccttcggatcggagtgttcaaactcgtggttgcagccctactacaaataccaggacggatgaatacgccatgacgtaaaagcagagcgtctcgtgcagagaatacaactcgaatgaggatggtttggacccaaagactgggagcagtcataatcaccattgtctgaatccggaataccgacagactgtgactgaccggaagagcaagagaacctgcta

SEQ ID NO: 15265 - DNA, 481 bp, Glycine max
  Clone ID: PAT_MRT3847_113790C.1
tgcatttgcagcacttgacgaagtggagagacaaatgaaatagttcaaattttagctttgagaattttcctagaatattaagcaggagagtttggtccaatttttattttggtttgcatttcctctcgtgaagttgttgtttattttttcttacaaattttagtgagaccaatgcagtaacaatagtctctgttaagttctaactggtaagggtcttgaagttgattttctaatttatttggtaaggtgatgttgcggattttgcttgctattttctctgaggagcaagatttgctccttgctttgttgtccttacctataatatctgaataaaatatttaaattgattcacactaaaaatatcaagtcacaaaaaattaaaacgtgatcataattgattgaattgcacttttcctgttttcctgcactatagatgcctcataaaaaggagtaaaggacacatgactgctggatgctggaa

SEQ ID NO: 15266 - DNA, 152 bp, Glycine max
  Clone ID: PAT_MRT3847_113791C.1
caggaggataagtctgcatggataactgatgaaaaatcatgctagatattctttcgctggtgtcaatccaaacgggatgggtattcttgaggagcgtccaccgtgaagtaaagtacatacacaagcctacattgaacatacctagttcacaa

SEQ ID NO: 15267 - DNA, 278 bp, Glycine max
  unsure (1)..(278): unsure at all n locations
  Clone ID: PAT_MRT3847_113792C.1
aaacacaaacaggggcagcnacaaaaanancaacagggnaaangcaccnccacgcagcnncaagaacaaagaacaaaggacggaccaacgggagaaaannnnagaaaagaaaacggccaacccccacaaaaaaaaaagccncaaggctcaagagggaagacaaanncgggcaaccgcggcaacaaacccggagcaagggccggccccggcacaacagggggcnacnncacaaaaagcacccgagaggcagggaccacagcccagcccngccgcaaaac

SEQ ID NO: 15268 - DNA, 391 bp, Glycine max
  Clone ID: PAT_MRT3847_113793C.1
ctttcaactaaataatatctgtgtcataagaaagcatgaagtttcgcacattcgagtggcgttgtataactcgtatatgattgactggagtgcgggtgctcaagaactgcgtggctaggcttatggagatccatcgtggtgactcatcgaaggcgaagctcgtgactaatatcgaaggtgcttgatcataccatgtgctgctcaggaataacctattatgcactgtttgagcgtaaactgtattcacttgagtgggaacgtctctatgactactgtgatcttctgcagttgcacaaactctcatccgcgcaccttattttcctatcaagagactattgcaagttcaagcccatgctcatgtatgacatagtggtgaaaaacatgtacgctt

SEQ ID NO: 15269 - DNA, 401 bp, Glycine max
  Clone ID: PAT_MRT3847_113794C.1
gctcggaattcggctcgagataacatcaaaccaatgtattttatcttaaagacaccagacaggcagaacaaaggaataaggattttttgttcctaagctggaactatacccagccttttctgcgtttgcccatatattgaggcgatgctgttgactacatcaataactcaatgacctgccatatgagttggtgcgccgatactctgaaatgcaccgtcaaatgccatattcattctgccggatgagagaaaagcttttgagaatctctgatgtttaacatacactctaaccactcaatgctttaaacatacagtagcacgcgatattatgacatgtgactactacgatgcagaccatagagactcaacccactgaaatgccgatgtgccatacagcaccca

SEQ ID NO: 15270 - DNA, 253 bp, Glycine max
  Clone ID: PAT_MRT3847_113795C.1
tcaccataataatccttacatttatgacattaaatcttattatcagcaatttcccacagctcttaacttctcattaatatcatcttttatccttcttccaattcttcttttcttctatatatattatagaaatttacatatacacataaattacactactcaaatcattataaccagtacatttcttcaccattagcatatattaaatcttaaaccattatccaacatattacacattctatcttattcacct

SEQ ID NO: 15271 - DNA, 259 bp, Glycine max
  unsure (1)..(259): unsure at all n locations
  Clone ID: PAT_MRT3847_113796C.1
gctaacctgatactactgcctatagttagctcaatatgagattgaggtggtcgggtagagcagaaacgatcaggcctgtcagatgctagnntgggnganacacggatattgacagctaggcacatgcgcgttgaaagagggtcttctatgtagtgggtgggatgagctagaaccgagtgcggatgtgtctgttgtggcctagcgctctgactatctgaccaagactagtaggcggagagattcacttgaaggggacgct

SEQ ID NO: 15272 - DNA, 1444 bp, Glycine max
  Clone ID: PAT_MRT3847_113797C.1
cttatgttggtgcagcaccatatgtctataaatccttaattagacactactttacttggagcctatttacaaggacattaaacatgttcagtgagaagagcacacatttggaatcatgatgaggatagcaaacttggtgatgtctctgaccagatgacaagtcaaatacaagaaaagaaacttgaagcatatcaagtattggtttcaagtttataccgcagtattttcatgcctttacagcaaattactgacaacttcagtgagaagagcagaaatttggaatcagatgaggatagtaaactttttaacgtctgtgaccagacaataacgacaagtcaaatagaagaaaagaaacttgaagcatatcaggagacagatgatatcgctggttgtgacaagacagaaagcagttacacaaggctaactattaaaaatctagtccagaaggaatggagttgtgcattatgtcagattagtacaaccagtgaaaattgcttaagggcacatcttaaagggaggaaacacaaggataaggaaaatgagcttagagttgagttttcctctactcagaaaagaatcaaagggatgggctcgctaaggaatctcaaccaaattgcaagcattctcaatccagtttccagatccataagatggtgtgaatggacaaagccagagtttggatggacaaaattaaatactgatggttctattcatagtaacactgttagttttggtgggctgcttcgagattacaggggtgaaccaatatgtgcttttgtctccaaagctcctcaaggagatgttttcttggctgagctgtgggccatatggagaggccttgttctttccttgggtcttgggattaaagcaatatgggtggaatcagactccatgagtgttgtgaggacggttaatagaaagcaactttgtccaaaagctgttggctatttgaaccagatatggaaactgttaaagaagtttgataaatatcaaatttctcactcgtggcgcgaaactaatagggcagcagatcatcttgctaagatggatcttttggcaaatgatgtggttttgtcgccagttgattttccacctagcctttccagaatcattgaagatgatgccaaaggaacgaaatatcgtagacgatgatatctaactctcaaggttagtttcagattgcgaatgggttgatgggaaggtaagtacagataaaagaaacaaaattagaaagccctgagtggaaacttatgctccagcttccatttggaggagttaacatcactgttttaggctccactaaattcaagatgaatatagagttgctgccaccagcaagtgacgttaattacgttgtagatagcatatttagacttttactgcttagtgatattgttatgatcctacattgtctgaggaaatggccaaagtatccttataagtt

SEQ ID NO: 15273 - DNA, 1126 bp, Glycine max
  Clone ID: PAT_MRT3847_113798C.1
cccgcgtccgtctaaacttaaaatgatctcccccttactctaacctttcaacctccaaaatattgactcccatctccatatctgggcttctcctcaagaggcttcggaattcccttatgctcccggacaagagccccctgtaccaggaaatcttcattttttgctccagaatatggaggaggcaggagtagatggcgttctcattgtgcagccaatatttcataaatttgatcatagttatgtcacaagtgctttgaagaaatacccgaccaaatttgttggttgttgccttgctaatccaactgatgatggaagtggactgaagcagtttgaagatcttgtcttaaaggatggttatcgtgctgttcgattcaacccagaattgtggccagctggggaaaagatgacaaataaagttgggaaggcaattttccaaagggctggagaactgaatgtaccagtgggattcttgtgcatgaaggggattggtctatatatgtctgagattgagcagttgtgcacagaatttccatcaacagttgtattgattgatcacttgggcttcatcaaaccaccattgaatgaagaagaaggtcttgtcttttctcagcttttgaatctatctagattcccaaaagtatatgtgaaatttagttctctttttcaagtgtcaagagagaagtttccttatctggatttggctcctcttttgtcccaagttgtcgctagctttggtgctaaccgtgttatgtggggcagtgattttccatatgctgctgctgaatgtggctacaaagcagccaaagaagcagtgcttcttattgccaaccagatctctttgcctccgtctgatttagagtggatcatggggagaactgttgcacaactcttcccaaaccaatggactgatgctaagcaaggttttcatagagagcgggagtgatgtctctcagattgagtcttataaagcactttcacatgttgtattcttaaattatatgttgaatgtaacatgtaaaattgtctctgcactgatgacatttgttcttgtctttggtaaattcgtacaccaatatttttgttggttgccctgctgttctaggtgaataaccagcattgaataagc

SEQ ID NO: 15274 - DNA, 636 bp, Glycine max
  Clone ID: PAT_MRT3847_113799C.1
tcattcaacttcttgttggctagaaccctcaataggtacccctttttgagttctcggcaatttgcttcgactgttttcaaaatcaatgagattcttcagcgtgttttattttcattcacacgctttctgaaaaacttttcaaaaggtcattcatcccataattactacaagccaaacatgtttaattatggagtttttaagtgatgcgctatcaaaaagtagatgcatcttgttggtatatgtagtattaattaagtcccataagtcatccttagttatacattctcatacctacacagcttctagatctctctcattccggtgtgattcgatctggttgttacaaaccacaaactcgagaactaagctaaggcaaatgaaaatatgtttgaataccctatatatgcttgatatttgacttggataaattctttttgacttctgccctgcatatcgagggtaaattccttgtcttttgctctttaagtatgcagaccatgtttagtgtgtggagtaatttgtacttgtttcactgcagtgcatcagttaagaaaaactcgtagagatcataaattcaaatgcatggcttcaatttgtgtttctgcatgcatgtggatttattaaaatgattggtag

SEQ ID NO: 15275 - DNA, 161 bp, Glycine max
  Clone ID: PAT_MRT3847_11379C.1
tccatgcatcacgttggaccctgcgtcacatttttgcttaccatttaatgtcatctcttcttgcaccgggtacctcatcaccggcaccgtgacctatccgtcatctactgattccttatttgctccttactcacgcacacgggattgtggaccttacttca

SEQ ID NO: 15276 - DNA, 994 bp, Glycine max
  Clone ID: PAT_MRT3847_1137C.1
aaggggatagatataagggttttaatttatcgcagctttggttttattatgatcgccgtcccgtcccttgaacaatgagcagaaggagcgatgaaactgcggtgactgaagaagcaccacccaaacagtccctaccgaacctcttctctttgtttcctaaaatcaattttcaactccctttcctcccacccaaacctaaacccaaacctcaagaacccaaccctcaggctcagcaagagggtccgaagcctagccgtgtacagtttccgaaaacccaagtggcggtggttgcttcttcgcctctgcaagctgaacctgatgctgaccactctcccgctgctaagacaaccaatcctcttatactctggcagatttatgcaataggagcgattgcgatttcatcatgggtttgggcaagatggaatgagaggaagggccgaggtggggggtctcccaatgatgagaggggtgaaggaaggcattctgatgatggaaatcagtgatcttcaggcgatgaatagaaatttccattagctgtatacagtgctatgccaatactctcacattctaagtatgaatgaaaaattgtttcattaccaagagtcgccgaattggtcatattttcattttagtgtcaaatgatggcatcgattctttctcgtttctgttctcaaaacctctgcagccacaggtgatcaattagcagattaaccttaacaattgaagataattataaacgtttttttttttcatcaagcacggacactccagtcccttgtcgtgtctggtgtccgacacgcgtccgtgtcagtgtccgacaccgacacgacacccgtattacgttctatattttggacattacaggtatccacgtgtccgtatctgtgtcgtgtccggtgtccgtgtcggtgttggtgcttcataggtatacagtgctatgtcaatactctcacattctcaggatgaatgaaaatttgtttcattaaccagagtg

SEQ ID NO: 15277 - DNA, 1573 bp, Glycine max
  Clone ID: PAT_MRT3847_113800C.1
caaccaaacacattttcattaccattttctattttcagtgaaaatgaaaacagaaaacagtcaaaccaaacatcccttattaaccccaaatccagtttaacactaattcagacatttttttaaaagataagcaatgataccaaatccaaacacacaaatgcaccatccttaattgccacatcatccattagtaggatattactaatagaattgcaccaatgacatgctttctgaattgcaaaggtaatttcagattttattctgaagttgttggcaatgtagttcctaagatgatggtatttacgcagatgatctcactcaagccatgaatgtaataattggtctatctcaattctcaattatcaattgcatctgcgcctcacgcattgaaagactaaagccgactagtcatgtttagagtcttcatgatgtatgcataagtgaaggcatcttcctggagcttctcaaatcttcccgacttggaaaaatgtccagcaccaagctcgcatttaaacagcagtatgttatcatcagtcttcatatccctcagttttgccacaaacttcgcaggttctgaatacaaaacccgggggtcatttaatcctgctgtaacaagaatgtgtggataattctgtgccttcacgttatcaacgggggaatatgatttcatgtagaagtagaattcctcctttctaggatcaccccattcctcccattctgaggtagtgagaggaatagttggatcaagcattgttgttacaacatccacaaaaggtactccagcaacagcagccttgaataaatctggtctcatattaagaactgcaccaattagcaaaccaccagcacttcttccttcgatgcacagtttttccttagaacagaattttttttcaatcaaatactcagcacatgcaatgaaatcagtgaaagtgttctttttcttcaacagcttcccattttcataccactgccttcccatttcaccacctccacgtatatgagctattgcatatataaaaccccgatctaacaatgaaagccttgctgatttgaaactaggatctatgcatatctcatacgatccatatccatagagtagtaatggatctgatccatctagtttcacaagatcttttcggtaaacaattgatatgggaatcaaagttccatccgaagaaggtgcccactgcctttcggtgacataacgtgttgcatcaaaacctcccagaaccgagtcaatcttcttcaaaacagaaatgcctgccttcatatcataatcatagactgaggaaggagtcctcaatgagctatacgaaaaccgtaaaatacttgatgaaaactctgaatctgaggattctgctgagtatacaggatcaacaaaactgaccgcctgaccactttcaaggctccttagtggttcaccaattggtggaaggtgataaactattatttttggtagaccattttctctctcatatgctactagatgatcactaaaaagttgtatctcctgaattttaacactttccctgtgaggaataagaactgtagttgaagaggtgttattgac

SEQ ID NO: 15278 - DNA, 578 bp, Glycine max
  Clone ID: PAT_MRT3847_113801C.1
tttgaaaccatctttcttacaaataaagacagccttgataagtagatcaccaagaaagatggacaaacctcccatttccaacatgccaagcgcccacccgacagccaataattagcatttgtcagagttaaagaatattgacaaatgctacccaagtttctcattattggacctcaatagatacacatctgacaagtattgttgcatcatcatagccacatgctgggttgtcaatctgaaattaaactctcttcactgctgttaaatgtttatgctcttgcagttactacagatgagtgatgaaatgaataattagacatgacaagcatgaacctggctcatctagtgcatatgatatatgaagcaccgctgattgaatgttggttattacagttgagtggccccggctagcaagtaattagttaaagggcatctatcaaaacaattggtcttggaggttgactactacgtttgtaattacaaattacaaactacaaactacatactgccgtgtacaaatttacttatggccataacattatgtacatttcctctatgtccaccataattctttcctc

SEQ ID NO: 15279 - DNA, 239 bp, Glycine max
  Clone ID: PAT_MRT3847_113802C.1
ataagacacttctaaagaatgaaaatttttcctttaacttttttaccaacaccctatttagccggccagggggcgtctttttaattgacaagcgctccggcccacaatcaattcttgcacagaaccgccacaagttcttgtcatgtattaggtggccctacctgcctacccaaatttacagccttttccccacctatatcatccttttaacttgcactattcctaaaaccttggcccca

SEQ ID NO: 15280 - DNA, 447 bp, Glycine max
  Clone ID: PAT_MRT3847_113803C.1
aaaaaaaaaaggacttttgcacccccccaacctttttaattttcaccaaattaaacggtttgtgccccctttccaaattattttaaaaaaaaaaaaaaaaagctttaaggggggggaaaaaaaaaggggggggtttaaaaaaaaaaaaaaagcaaaacctgtttttcctcttttttttttcaaaaaactttttttccaaggggcctggcttgaataaaaaaaaaaatcactggaaaaaggggcttgggcaaaacaaataaaaaaatttccctaaataagggcccccaaaccccccccaattaaagggccccccccataaaccccggtgttttgggagtccccactaaaaacggggggcccaaaggggggggccgggttaattaaccccccaaaaaatggcccctctgccaaaatttttgccccaacaataaaaccaaagggatttgg

SEQ ID NO: 15281 - DNA, 362 bp, Glycine max
  Clone ID: PAT_MRT3847_113804C.1
cggctcgagccagtcctttgtaaggataggattagagccagcactagctggtgttgcctcagctccccctcattcatgttcccatctttcataagcttcaaccaacatgctccactccaactcacttgtgagagccatgtccatttcatttttagctcacattcccaacactgattcacgccttctcttgaccaacaacatgatggattgcacttgcacttgtccattttaccctccaacaactctggccaaggctacaacccgcaagttaacctttgtttgttcctcccaaagggttctccccattgagaagcttcttcaactaagtgttgttgatgtgggcccctcaaatgctagtactg

SEQ ID NO: 15282 - DNA, 723 bp, Glycine max
  Clone ID: PAT_MRT3847_113805C.1
cccacgcgtccggtcagtgatttacatatcagtgaaagaaatcatgaatactccatcaataagcaacctgagtctgtgataccattacatagacctggtctttttgcagctgctccttcctctgatttttctaagtcttggtctcattcggcttcttcttgggaaatggccaatagcagcctaagccagaagttgatatcaattcagacacctccatgtataaatgcatctggtgctttgcgagggagttcccagtcacatcaaagtaatgggatattggaagaatgctggcctctaaatatcaattccaagcctaacccaggttttcgaagtgacgcacctatacagaatggattttaccctgggtcttcatctgggcccaaggaaccatcgatgaacatctcttcaattagctatgactatctcaatcataaaaatgattgtaagataattcctgatcacttcatcaacaatgtttcgtcaaaatcctgtaagggttcagattcaaattgcaatgacatgaagtctggaaaagatattgacttgaatgtgctgcttccgaatggtttatccaataacttagttccccggtcaggtgctgggataatggatggacaacagaacaatgaggagcgtcatgcagtgttgccttggcttagagagaagacaacttgtaagaatggagtacaaaacactgcaggagagtcgagtttattccatgct

SEQ ID NO: 15283 - DNA, 1180 bp, Glycine max
  Clone ID: PAT_MRT3847_113806C.1
ggctcgagcggctcgagcccaaacccaaacccaaacctaaacgaagaaacagaaagaaaaaaaatgaacaaacaaattggggtttgaaaagaagccggtgctgtctccttgttctccatcgtaagatataactaattatttttatatcttcatccgtttgagaagatgcccgagctgtctctttgttctccaacgtaagttattacaacgtgatcatgtatcgtcgtcgaggtgcgccgagggagaaccgccgccgccgctgccgccgttgtggatcccacgccggaccaggccaaggagacgacgcggttccgtggcgtgaggaagcggccgtgggggcgattcgcggcggagattcgagatccgtggaagaagcagcgcgtttgaggccgaaaccaatttcccccccttccccggccccgcagaggcggaccaccactcgcagatttccgctctaccaggcccatgggctttccaccaagttcgagcccgtcgtccaggtgaaccggcccacgagcagcggcatgagcagcaccgtggagtccttcagcgggcctagggttccctcctcctcctctcgcgctaagccccttgttgtggttgttaaccctatcatccctctcaacgacgacgaagacgattgccacagcgattgcgactcttcttcctccgtcgtcgacgacggccaggactgcgtcctcatctcctccttccggcaaccgctgcccttcgatctaaacctcccaccatccgatgccgacgacgacaacgacgacgacctgccggccaccgcgctgtgcctctgatgatgaagaagaagaagaagaagaagaacctcttctcggtataatcatcattttcttcttgttgttgttattgttgttgttgttgttcaccatctctggtttaattaattaattaaaagttgttagattgtgttgtggtgttgtagagtaatattataataggcatgaatgtgttgttgtaagttatttggatccattactgtgtcatagcattggacctgatctcaaaaactggttggtgcttatgctttcttcatggatctgcttcttacccttacccccaattagaacttactcttttcttttttttttgttgttgttgttctgtacaaaaattatggctatcagatcatagaataaattacattctaatc

SEQ ID NO: 15284 - DNA, 734 bp, Glycine max
  Clone ID: PAT_MRT3847_113807C.1
ccacgcgtccggattgatgttgatcacaccagatcggatattgtgcttgatcatcatcaggaggaaaaggagaatgaagaaaacaagggaagccacatggtgtttgaggttgatcggggtttggatagaaaagatgaggaggtagagaagagttgtgattgttctgtgtgtgatggcgtggagattctgtgtgatgaaatttgcaatttggatttgggtgtggagaaagggaaagaaacaattgaagaggaaagtttgaatgtccctaagcctaaggataatgatggtgatgatgttgttgctgctgctgatgatgaagatcaagcttgtgagaaatccactgctcaagttgattgcactagagagataactgtggagactccatccatacatctggaatttttcattcatggtgatgattgcagattgattcctattgaattggttgactcccctgccctagaaaacaggaaacaaagcaaatataaggtgggaggtgaagggatcaacagcaatgaagattttattctggactttgataagagtgctgatgcagaagccgaaccggttgtggagaattggcacatttctggggatattgtggcagaattttcagcacaagggaatgaaaatgtttctaagtccaatgggggtgaatcagttcaattaaggaccagacgccagtcctcagagttgttacaagtagaagaagaaaatttggagcagaattgtga

SEQ ID NO: 15285 - DNA, 1104 bp, Glycine max
  Clone ID: PAT_MRT3847_113808C.1
attggggtttgaaaagaagccggtgctgtctccttgttctccatcgtaagatataactaattatttttatatcttcatcaagatgcgccgagggagaaccgccgccgccgctgccgccgttgtggatcccacgccggaccaggccaaggagacgacgcggttccgtggcgtgaggaagcggccgtgggggcgattcgcggcggagattcgagatccgtggaagaagcagcgcgtttggctggggaccttcgattccgccgaggatgccgcgcgggcctacgacaaggctgcccgatccttccgcgggcccaaggccaaaaccaatttcccccccttccccggcccggcagaggcggaccaccactcgcagattccgctctaccaggcccatgggctttccaccaagttcgagcccgtcgtccaggtgaaccggcccacgagcagcggcatgagcagcaccgtggagtccttcagcgggcctagggttccctcctcctcctctcgcgctaagccccttgttgtggttgttaaccctatcatccctctcaacgacgacgaagacgattgccacagcgattgcgactcttcttcctccgtcgtcgacgacggccaggactgcgtcctcatctcctccttccggcaaccgctgcccttcgatctaaacctcccaccatccgatgccgacgacgacaacgacgacgacctgccggccaccgcgctgtgcctctgatgatgaagaagaagaagaagaagaagaacctcttctcggtataatcatcattttcttcttgttgttgttattgttgttgttgttgttcaccatctctggtttaattaattaattaaaagttgttagattgtgttgtggtgttgtagagtaatattataataggcatgaatgtgttgttgtaagttatttggatccattactgtgtcatagcattggacctgatctcaaaaactggttggtgcttatgctttcttcatggatctgcttcttacccttacccccaattagaacttactcttttcttttttttttgttgttgttgttctgtacaaaaattatggctatcagatcatagaataaattacattctaatc

SEQ ID NO: 15286 - DNA, 466 bp, Glycine max
  Clone ID: PAT_MRT3847_113809C.1
tttgttcattttacttggggggaaaagcgggttgagcaaggtcagcagctagcacctgatcagaagagtgaaggaaattcttcaagccagggaccagctgctggaaacttaatgcctggaaatattataagacctgtgcaagctctggcaactcagaagagcatcccgaacactatgaacaaccagattgcaatggttgctcagttgcaggctatgcaagcatgggcacatgaacgaaatattgatctgtcacatactgcaaatgctaacttaatggctcagctcattccactgatgcaatcaaggatagttcaacaaccaaaggcaaacgatactaacttaggtgcaatgtcatcacctgtccctgtttcaaaccaacatgttacttgtccggcagtcgcaagtgagagatcagcacatgctaattcatctagtgatgtgtctgcacaatctggctctgcaaaag

SEQ ID NO: 15287 - DNA, 599 bp, Glycine max
  unsure (1)..(599): unsure at all n locations
  Clone ID: PAT_MRT3847_11380C.1
gctgcaaatgcttcatgacagtggtcatcatngtcagaggtttctcttctgcattctggcttatcaacagcttataagaaatgtaacattgctaagccaccatccattttaaaaaggatttttcattggtatgctcagatatccaaaaaacctgcaacttgggcaagccatacatcccggaacataaacatctcgtgctagtgaacctcattacttctttgaacggattggctgggttcattttgattcgagtcattctttctacatggaacaaaactttagtcagtggccgggctataattgtatcaagttatgaaatacctctcgaggctggcaacatttttgagagaaaactagtctttgttcttggtgtacatcacctgtttgaatttgttgatggatgtgagtatagtgtatacatatacggcagaaggtcctgtttgggctattttctaccagattctctagtgagttttgttttgttttgtttacatttgtagtcatgctttacagcatgtatatattaagaaattaagaaattgtgtctgattttaattagaaattgagaaaagttataaaatactactgttcataactct

SEQ ID NO: 15288 - DNA, 627 bp, Glycine max
  Clone ID: PAT_MRT3847_113810C.1
ctccccacacaatctagccgacttcgagccttggctcggatataccaccgaagggcaagcagttggtggtatacccctacaaaaccctttggagggccctcagtatcacccacaactgcacctcttgcattccacagcggttaaaaaccctcatgactatggcaggaatgggaaagttggatcatctagaggaaaggctcagggccattgaaggaggtgaagattatgcctttgctaacctagaagagttgttcctaatacccaaacatggtcattcccaagttcaaggtgccggactttggcaagtacaaggggactactcgctccaagaaccatctaaagatgtactgtcggaagatgggggcatacgcaaaagatgagaaactgctgatacatttttcctgagaaagtcttactaggacaactgttgcctggtatactaacttaggaaccttcttgagtccattcttggaaggacctaatggttgccttcattaagcagtgtcagtacaattctgatatggctccggataggatgcaactacaaaaagtgtgcaaaaagggggcacgaatctttcaaagaatacgcccaaagatggagagacttggcaactcaagtagcacccc

SEQ ID NO: 15289 - DNA, 322 bp, Glycine max
  Clone ID: PAT_MRT3847_113811C.1
agaaatgccacctgaaacttaatcattcacttaattattacttaaatttaccacaaccaaaaaaccttattccacattccggttggtaatggcaggcacttagaaaatttggcaatttccatgctttatgaccgcccaactcttccttccaccccccttgggttattttctattaccttccttatggcaggttctggttttggctggagggaataaaggaccaacttttgggggaccagaaccttttaatattggcgcgtggcaccaaagaatcttttacctggacctttttattctaaggagatggggttccctttggttt

SEQ ID NO: 15290 - DNA, 222 bp, Glycine max
  Clone ID: PAT_MRT3847_113812C.1
ggatggtttatggctcgaggaatccacacacgcatcggcattcccagctcgcatacttgtctcagtcatatgcctattgttgttaacacaaagtaaattatgtatgaatttaaaacaataagttaggtaattaacaataatgtaaattgacttgcagaatctacaactgtataacaaagatgctgagacattgacctaaaaaaaaaaaaaaaaaaaaaaaaa

SEQ ID NO: 15291 - DNA, 287 bp, Glycine max
  Clone ID: PAT_MRT3847_113813C.1
cccacgcgtccgtgcaaagatgggaaaattaaaaagctatatttcagtacttgctgtgacatttgtattggtgataggagtagctgaatgcagaaaaataaaagaaaatgagttagttgacggttttggaggaggtggattaggtggtggtggcggtggaggttttggtggaagagctggtgcatgatgaggggtaggaggcggacatgatggaagcattggatgacgtttaagtggatgtggttgtgttgcaggtggatgattggaacattatgcaggagtttaca

SEQ ID NO: 15292 - DNA, 193 bp, Glycine max
  unsure (1)..(193): unsure at all n locations
  Clone ID: PAT_MRT3847_113814C.1
agggttgactggcaagaccatcaccatcgaggtcgaatcctcggacgccattgataatgggaaggccaagatccaggagaaggaggggatccctccagatcagcagaggttgatatttgctggtatacaagttgaggatggaagaacgcttggtgattacaatattcagaaggagtctaccanaacacttgtt

SEQ ID NO: 15293 - DNA, 157 bp, Glycine max
  Clone ID: PAT_MRT3847_113815C.1
caaggggaaaatcaccttcagtgtcaccaataccaagcctgataccggtgaggttatctgtgtgtttcatagtcttcaaccgtccgacactgatttgggagcaaaggctccaaaagatgtctagagccatgtgttctggtatgctcatcttgagtca

SEQ ID NO: 15294 - DNA, 232 bp, Glycine max
  Clone ID: PAT_MRT3847_113816C.1
cttgtgcccacataccttggcaaaatggttttgccaagaggacaatcatcactttgttgaaacaactcctaccatactacttcattgcaatgttcctcttcaattttggagtagttctcttcttttagggtgttaattgaccattcacatgccttccttcatcctttaggacaaattcctcattctttattgttccctcacgaagaactctattttgtccctcttctaatct

SEQ ID NO: 15295 - DNA, 480 bp, Glycine max
  unsure (1)..(480): unsure at all n locations
  Clone ID: PAT_MRT3847_113817C.1
tagtttccatacaagatattttatggaattggttannacggaaatatgaaatgtgcagaattcgtggagtagtggattcatcacgtgggaattaagctgaaaggatcttctagaatgacgccaaggattcactcgaaatcattcaagtaagtgggttttcgggtcaccattttgggcctgctattgttgccattgatgctgttgtggggttctctgttctgcatattgctatcaacacccgcgcctccgaaaacaacctcgtcctcgaggttgtaggactgttgtaaatcgtcccaaagttcccaagaagtatcctcaggaggaagacccatccattgaacgaggaccaggcgccggggaggggtaacggaagaatctaatttccagtccaaaatggtcaaaggtgtgaccacggggtgatgatccacggccaaaggaggaaggggaatgatatcggacggaggggctccttgctcgtgc

SEQ ID NO: 15296 - DNA, 1362 bp, Glycine max
  unsure (1)..(1362): unsure at all n locations
  Clone ID: PAT_MRT3847_113818C.1
cattacccccggccttatgttgttggccttacaaaaggtagcaatattggtagtgctaagaccagtagaaaatgggcaaggcagggtttagatcttaatgcgggacctggaggttcaaacatggaggggagagacgacaattctcctcttccatctaggcaactttctgttgctagttcacaggccctagctgaggagcaagcaaggatccagttggctggtagtgtttgtaaaaggaaggagcctgatggtgggtgggatggctacaatcaatcctcatggcaatagcaatttataatcatacaatctaatgaccccaaatgcttttgtgttgttggaggccaaaattttcttagaaggggaaggcagaagcagacttgggtcaagtgctaatttatcggcttgagaaagattatcaccaatatagcatgctctagagaaaagagacccgattgaaaagccagtagtaatttatctgaataaaaccatttgctaatgaggacgatggcctcgaatctctgataatggctcctcatgtatgtacattcaaactggatcacttccgaacaaaataaatggtagctagcaaacaactctgctttatttacttacaagctattgggtgcaactgttttatagtttactcaatacattaaaacctatcagaaattaaattaaattaaatacaaccaaatgtaagtagctatactgcaaactccagccaagtgcttttaggttaagtttaaaatttctacacggcggtatcagtcttcaaccccgtagcacgtgaaagctttggatgagatactgatcaagtgtttcatttaaggcgaacaatgttccttcgacagaggacgtttaggaaacagccacgtggttttttctttcttttctcgttttgcttttgtggaggcttgatgaccatattattagcagcttcaaaaagtttacgcaattccttaccttgtttttgagtcacaggcaccagaccaggatgatcagccaaatagtgcttgtcttctcggagatccaattggtgccaactacaccatggaatgccgggagcaaaatgtcagttcaggacccacttctcaacacattttcaagcttgcatgactgactaagagaaacctagacaaagactctgcccccctgaggtcaaaggctcagtctgtgtatcctcttgtccagcagtgtcccacggcttaaatgcagttgtccttccctanaaccagccagtgaattatcaactccgttggaatatagtccgtggggaatttgttgctatatagcaatagcatgcaatttgctacagtccatccccactgtcacacacttataccttaagtgtgcagccggagc

SEQ ID NO: 15297 - DNA, 412 bp, Glycine max
  Clone ID: PAT_MRT3847_113819C.1
ggcagatacattcctatcaacctcatagacggagaacaagggacaccctgacaagctctgcgaccaaaaacacgatgcggaccgacgagctgggactgaacaagacccaaacagcaaagttgcctgcgaaacatgcaccaagaccaacttggtcatggtcttcggagagatcaccaccaaggccaacgttgactacaagaatatcgtgcgtgacacctgcaggaacatcggcgtcgactcaaacaatatgagacttgatgctgacaactgcagggtgcttgtaaacatagaacagcagagccctgatattgcccagagagagcacggacacctgaccaaaagacccgaggagatcggtgctggagaccagagtcacgtagtaggctatgccacggacgataccgcagacgta

SEQ ID NO: 15298 - DNA, 637 bp, Glycine max
  Clone ID: PAT_MRT3847_11381C.1
cccacgcgtccgtacggctgcgagaagacgacagaagggaatgcaggtggtgaatgtttgagcaactgggcattgtcccaaccggcctcactgcagtgtagtaagcttttagtttgtttttgttattattatatgcttaataatttgcaatgatgggactcaatgattaattaattaacaaacgaattttgttggagtctttttatttaacatttttttgttgccttgttttcttcattaacacggggatgtggaagagactacagcttcatattaagtttgattcagaatagaagacaaaaagggtctgcacatagctaggggcattggggaacacgaatgacatgatcgatatcacagcgctcaatgctcatacagcactacttttctttatcaccattcttgttcacgtattcatattacttgcacccaaattcactttattattttcaacgcaacccatgtatccattccaaactatcttactataatatggtcataaaaaaaactatgcttgtaacaaaatacaaattatgacctcgtgaattgtcataaaatacaaaagaccatactatgcttgtaatacattgtcctttttttttatcaaatttctcggggtaaaagctttcattttgcc

SEQ ID NO: 15299 - DNA, 325 bp, Glycine max
  unsure (1)..(325): unsure at all n locations
  Clone ID: PAT_MRT3847_113820C.1
annncncangcacgcgtacgtaagctcggaattnggctcgagncttgggatntgaancgctgctctggagncnaaaggngatgtgtgattngcnnntgtgtanacttnggaaanntgttnctattaagantaggatactgancatncgnnangagataaannnagagcaccagcgncgttntacaccatctgnnatnganccatcatgnngaattggncgnngaagngatgaccnctttgtgngtantttttttnnttngggnnnngntaaactnggggtttnncgggtantggggtnntgtgtncttgnngtttgggnncccnt

SEQ ID NO: 15300 - DNA, 231 bp, Glycine max
  Clone ID: PAT_MRT3847_113821C.1
aggggtgcccacagtgcaacgtgacggggcctgacataatatcgatgcatatccaccaagacgctcgtcatcccaagatccccatccatgacgagaaagttgtcaatcgtcattcaatcagcatcgttccctagtcctccatacctcgcatcggtgttcgcggaaacccctcgaagtgatcacaatcgatcgtcggaatctttatgaccccaccttcattcgtagatcgca

SEQ ID NO: 15301 - DNA, 505 bp, Glycine max
  unsure (1)..(505): unsure at all n locations
  Clone ID: PAT_MRT3847_113822C.1
ctgcttgggggggggggggggggggggggggagcacgtatccgaggcaatcggacataataaggccaatgaatccgatagacaaacaaacaagctacagcacaggcagaccagaccagctagataaatcccatttagtatggttgtgtaagttgcgaagctagctcgaaataggaaaatgcacggcaccgatagcgctggcgcatgtaacgaagtgtatgcttttgggtttagcaaggcaactggggtgtgtgtgtagcggtgtgagagtgccggcacaagtggtagagaggtagctagtttgacattattaaaagctagatatagggtaggcaaagcggggaaaagcgatataagggaacgaaagatatggggccgctgacgtgtggaggaaaagggcaaggggaggttaagtgtagtaaagatgagacngaacggggagagagcctagggcagagagcggagacgacgatggaacggacgcacaatccacaacagtaggctag

SEQ ID NO: 15302 - DNA, 228 bp, Glycine max
  Clone ID: PAT_MRT3847_113823C.1
ttttttttttttttttttttttttaggtattcattaaaaaaataacctaattgggtggggtatatatctttatgaaaaagaagggaaaaaataaaaaaatggtgaaacaacaacggcatataatgggaaatgcagggaacaatgatacacgacaccgaggattcatataaacataaacgtggactggcacggataaaattacgaccgaattgagaaggtattggcttg

SEQ ID NO: 15303 - DNA, 275 bp, Glycine max
  Clone ID: PAT_MRT3847_113824C.1
aatatttgttatacaaaacaataattgaatccttaattttcattaactaagatgttgcgtggcatctaattgagcgaagatggagtaaaacggacaggtatgtattggatgagactgccacagcgatatactaatcttgccggcgcgccttgaggttgtcgcgcatgtggtgtctgagatctatctatatacatgtgtcttgaggcaactgaaaaatagaatcatcacccgcataggagaaattatacaggcacttcagcagtcagtgtgcctgt

SEQ ID NO: 15304 - DNA, 273 bp, Glycine max
  Clone ID: PAT_MRT3847_113825C.1
tcacttcaggttacacatttacgaacttggccatcgaagtagcaagattgctcgtggcaacaatttctggcacacgaaatgcgaatctagtcttatgccgttgctctggtgctaatgccgatgctcctagggatgtcgtttccatgggatctgggaagtgcagaatgggcaatgatttgtaggatgtactagacataatgaaatacgtgtgaccctttatcaggacatagtgcttcatatatgactggagaattcccattggatcaatgctgc

SEQ ID NO: 15305 - DNA, 269 bp, Glycine max
  Clone ID: PAT_MRT3847_113826C.1
attagattcatacatttaactaagaactttattatccttatctagctttatctatgatatgaagcattcgcgctatacactgtattttcggaagtgagactgcacgattgtttttgtgaatactccatttgccatcgtagtctggattcacgtttgtttgatcactcagtctcacaactcgaatatgaggactctctcaagttcgtatcgcagtggcagcgatgtcgcatcatctgccggtgacattcactgggtttcaacttaagcag

SEQ ID NO: 15306 - DNA, 471 bp, Glycine max
  Clone ID: PAT_MRT3847_113827C.1
atttgtgcctgatccacctcactctagacctctaaaccttgtatctccctttccctgtcaaaagctctaaaaccctatgcgcctcccaacagcgacgtcgctttttgtttcgccatctttctctctcaagactcttcatcaccaaagcgcttccactatctcacccctcctttctctctttccctctcccgaaatccctactctctctctccacgtgccaccgcaccttcactgcccgttccgaatcccagattgacgttgacctcgttcccgcccactaggacttcaacctcttgaccatcgacgcaggcagcggtagggtccgagccgcttgcttcgctgccaactacgacgcttctgtcgccatctgcgaacttcctttctccattatctccttcgaaaccactggaggtgtcggcgaaacgcaatgcatgctggtccaatgtacattgcggagacaacaagataaat

SEQ ID NO: 15307 - DNA, 249 bp, Glycine max
  Clone ID: PAT_MRT3847_113828C.1
attcgaggcgaatcggctcgtggattataattcatatcaaatccttaactattgtgtcaagtgtcaaaccatattctcatacactatttttgtcatgcttaaatatatccctaagttaataattgtgtcaagagtgacccaatagcatatgctcccagttccttgttgattccttgaacgcccgccaatgtaaaagagaatatccagtgctggagtccccttgcatgtgtcttagattcctctctttgc

SEQ ID NO: 15308 - DNA, 301 bp, Glycine max
  Clone ID: PAT_MRT3847_113829C.1
gccgtccggaattccggtcgcccaccgtcgttttctcccaccctgccagatgatttagccctggggtgtgttctttcaaccctaaaacgggtgtctgcatctcggctcactcctggtctttcatgttctcgcttattgggcaccattcctgaaccaatgctacaggaaactgtctgtaatctatcggcatcccacagaacaccattgattttcgattctagcaagcagagctgatcgctattcactatggaccttgtcggaggaggaaatttaagcggacaaaactggtcattggatcaca

SEQ ID NO: 15309 - DNA, 645 bp, Glycine max
  Clone ID: PAT_MRT3847_11382C.1
gcaaggtgagattttgatgcgtgttgaggagcttgggggaagaataatggaggacgtgggtgagttgaacgagttggtggggtatttggggagattggaggagactcgtgaaaagttggtgcttttgtttgtgaataggggaaagaacaatgagttctgggattcggttaagaagaccgaggagaagggtgtggcgaggaagaaggagattgaaaggaagtggctcgcggcggtggtggtggcagggaacgccgccgagtttactcggtccaccaacccgtttcttgacccggggcaactcagtccggtcccacggttaagttttgcaacggtaaggtgacatatggccaacggtcattttcagggacaatttgtgaaaaatcaacatacacattctttttcttttttctttttttttttgttgcttttgaattttttgattttttttttcccgtttattttgagggaatccgcaatctgtgcctttcagtactttttttttattatttttctttgattgtggggctcgatgtctgccttggtgtgcatgattaaagtgtaaaacagatcatataatgtagtatattaaaataacaagagatttctgtagaaaaaaaaaataaaggagagaattagtggaaaaac

SEQ ID NO: 15310 - DNA, 227 bp, Glycine max
  Clone ID: PAT_MRT3847_113830C.1
ggctcgagctggtctataagaaagaagaaaatgaattggggctaacttttctttatttggttttgggttggtaaccgagtcttatgacgtgaatgggtgatctatctaactaatctcacctcatgaagaaaggctattgttatttatttatttggttaatttttgtatggacaccctaccctcatcttgaatacctcacctaatgagagaaaactattgctttcttt

SEQ ID NO: 15311 - DNA, 482 bp, Glycine max
  unsure (1)..(482): unsure at all n locations
  Clone ID: PAT_MRT3847_113831C.1
gaaatagaaaatccttggaatntacaatctcgccacatgatggattcgcgcaatcgttttgttctgatgcagaattgcttatttcatttccaatgttgccatcaccctgaagtccagtgcagagcaggcacatgttatttcgctatagacaatagtgataagagggctatgcgaataatcgagggtttgacagatgaattaagaataacgcgtaaaccacctgctccaaagaaatagacggttattatcatcattgtgcattaactagttggaaaaagacggtcagtgcatatttgtgctaatgagttatgttagtgaataagtcatttaaaaatcgcctcaaaaggcattgctgcttacagctctttgtttaacgggcgtacgtctgtcttccaccccgaaagtttacaacccaaatgaaaacatcagcgcagtgccgtgactcgcccggaatgtccacaagaattatttaactttttgtt

SEQ ID NO: 15312 - DNA, 171 bp, Glycine max
  unsure (1)..(171): unsure at all n locations
  Clone ID: PAT_MRT3847_113832C.1
gtcatgggaaacaaaactacccttttgcttttgctctttgttctttgccatggagtggccacaacaacaatggccttgcatggtgatgagggtggtgataaaaagtcaccaaaaagtttgtttttgatgagcaacttcacgagggntttcaagactgattcatgggaaatg

SEQ ID NO: 15313 - DNA, 300 bp, Glycine max
  Clone ID: PAT_MRT3847_113833C.1
ctaataccaaattcatttaataataccatcaatataaaaagggaggacccacaaacaaatagacaagatagactacattcaactaaaaaattatattgacccttttactaatatgcattccttacccttcgttcaactcatgtgcacttctgcaacatctctgttatctgttgcgtgtccatatttttttgcaatgcctcatcataattctctttcttcaccactctctcatttcttcctccccgtcatttttacatccatatcccatatttcctcattttggctcattccttgtttttt

SEQ ID NO: 15314 - DNA, 456 bp, Glycine max
  Clone ID: PAT_MRT3847_113834C.1
gaaagaataaaatttctgatttaatttttcaatatgtaaaaaatacaataatttcatcttatattaaatttgtgaaaatattttgtcataatgttgaagagttaattcaatattaagttataaagttgtatacaaaaaagtgattgttacactttttaacatattcaataactaaattaaaatttttattctagaacaaattaattgtaacttatttacatcctggtaccaaatgattatttatccatttttaaataaataaataaaaagcaatcttattttttattcttaaccttattttacaatttctttctgcccattttttaaactagtatatcattaaatataggagaattcataataattaaataaataataagcttaattacaattttaatatatatatatatatatatatatatatatatatatatatatatatatatatatatatat

SEQ ID NO: 15315 - DNA, 432 bp, Glycine max
  Clone ID: PAT_MRT3847_113835C.1
atcttgatacgtattcatagtttatttgtacttgcaattatatattttaaatcaaattaaaaataaaaaatttaacacatagacccgtaacaaataatttattagaaggataaaaggtcttgaagagaaaaattattctcttccttaaatatagtacttatgagattatgtttattaataaaaagcatcacaaaatttactgttaacacttacaatatgattaagtgtaaaaagagtatgagatgaaacttagttatcaataataaaaagacttttctaatacattgtaaagagaaagaagatttttggggtgctgccacaccttatatgtgtactgatttatagtttatgcagataatttaatggtggccactaataaaagtactgctaaaaggttggggaaacctttcaaagcactgtttatattgatgc

SEQ ID NO: 15316 - DNA, 225 bp, Glycine max
  Clone ID: PAT_MRT3847_113836C.1
gtgggatgacaaaactattaggaaacagtggtttattaaatagcggggtgagaaaacaagcaagatacatacagcgaggattggattggttatcttcttcctttactctaaagagacatctaatctcaatcctcattacacatttcttcattcctctctcaagctttactcttttcccccttccacatcctcgatccctccactacaaaaacaactaatattttt

SEQ ID NO: 15317 - DNA, 1279 bp, Glycine max
  Clone ID: PAT_MRT3847_113837C.1
cggccgctcaggcggcgggcgggaagatccttctttctatactacattctctagagcacacacaaaccctcccctcacactctccaaaccctagcggcactacacacgttatctctctctctctctctctctctccctctctccttccccaagatgtcgagcgccgatcccgagcaccgagaagaggaggaggcacccgccgtcggcgacgacgaggacaccggagcacacgtcgctcccatcgtcaagctcgaggaggttgctgtcaccaccggcgaggaggacgaagatgcaatcctagatctcaaatcgaagctttaccggttcgacaaggatgggaaccagtggaaggagcgaggcgcgggcaccgtgaagttcctgaagcataaggctacgggcaaggttaggcttctcatgaggcaatccaagacgctcaagatctgcgccaatcatctcattttgcctactatgagtgtgcaagagcacgctgggaacgagaaatcttgcgtttggcacgctagggattttgctgatggtgaactcaaggacgagcttttctgcatccgttttccttctattgaaaattgcaaaagcttcatggaaacattccaagaagttgctgaatcccagaaggcagaggatgagaaggaatcagctgatgcagctggtcttattgagaaattaagtgttgaagaaaaggctgatgcagagaagaaggatgaagagaagtctgaggacaaaactgtggagaaagaatctgcatcagggaaggaaagcaaggcggttgaagataagaaagccgaagagcctgcatcctcagcttgagtgtttcttattcatattctatacttggcaatctgacaaggttaggtggttgatgtttttgccgcccatatcttgggatattctcatacttaatagttgccggattgtgtcactgaattgagctgtttgtgtcctcttgagtttatttcagctggcaaagttagggttgggtttgaattttgaggcatgactggttgagctttcggggtctgggagtttgttattattgttatttttcattctacatatgtatttgttgcgagtaatgggtcatgttggttggagggtgcagtccagaaagtcaaaaattataaacgaaggttttggtaccgacttgtttgagttccaaaaaaaaaaaaaaaaaaaaaaaaaaaaagggggcccccgattagtgacctcgtcgcccggggattaattccgggccgggaacctgagggaacaagtttcccctatg

SEQ ID NO: 15318 - DNA, 1278 bp, Glycine max
  Clone ID: PAT_MRT3847_113838C.1
cccacgcgtccggctatctattctacaacgttctgtagagcacacacaaacccgtccctcacactctccaaaccctagcggcactacacactagttctatcgctatctccccaagatgtcgagcgccgatcccgagcacagagaagaggaggaggcacccgccgttggcgacgacgaggacaccggagctcacgtcgctccaatcgtcaagctcgaggaggttgctgtcaccaccggcgaggaggacgaagatgcaatcctggatctcaaatcgaagctttaccggttcgacaaggacgggaaccagtggaaggagcgtggcgccggcactgtgaagttcctgaagcataaggcttccggcaaggttaggcttctcatgaggcaatccaagacgctcaagatctgcgctaatcatctcattttgcctacgatgagtgtgcaagagcacgctgggaacgagaaatcctgcgtttggcatgctagggattttgctgatggtgaactcaaggacgagctcttctgcatccgttttccttctattgaaaattgcaaaagcttcatggaaacattccaagaagttgctgaaacacaaaaggcagaggatgagaaggaatcatctgatgcagctggtcttattgagaaattaagtgttgaagagaaggctgatgcagagaagaaagatgaagagaagtctgaggacaaaactgtggagaaagaatctgcatcaggaaaggaaagcaaggcagttgaagagcctgcgtcctcagcttgagtatttcttattcatattctatacttggctatctgacaaggttaggtggttgatgtttttgccgcccatatcttgggatattctcatacttgatggttgccggattgtgtcactgaattgagctgtttgtgtcctcttgagtttttgtcagcttgcaaagttagggttgggtttgaattttgaggcttgaatggttgagctttcggggtctgggagtctattattattgttattttcattctacatatgtatttgttgcgagtaatgggtcattttggttgggagggtgcagtccagaaatagtaaaaattatagacgaaggttttggtaaaaaaaaaaaaaaaaaactcgagtaaaaccaaagcctttcttcaaaaagcctattattcctaagctaccacttcaccccaaattcaagaaaccacttctaccaccattgccaattcacaagccaattccaactccataagagtataatactctatctcaaactataaagttatcgg

SEQ ID NO: 15319 - DNA, 399 bp, Glycine max
  unsure (1)..(399): unsure at all n locations
  Clone ID: PAT_MRT3847_113839C.1
caccggaatagccggaacgacctacgctgtccagcagaacttgatagacccaagagaaaccggaagcagagggccaatgtcccaggggcggcccctgaggccacggcgagaccatggncacaacgncaccanagcaacgagcaacaaacgggaaacgcaagaagccgatcccgncaagcacgaaaaagggccacgagaaaagcagccgcacagcccacaggaagctcgccacaagagaaggaaagcgccccgcccgacggaacggcagcaaaaagcggacgtgccnaccacagcacagaaagaagagccccatgcgacgcagacgatgatgaatgctcccgattcaaatacaaatactgacctactgttaagcattgatttgccaggtttacaaggagc

SEQ ID NO: 15320 - DNA, 371 bp, Glycine max
  Clone ID: PAT_MRT3847_11383C.1
gtaatgatgtgtgaagtgtgtgttattttaaaaaaaaaaaaagaaagaaaaaaaaaaaaaaaaaaaaaaaaaaaaaaaaaaaaaaaaaaaaaaaaaaaaaaaaaaaaaaaaaaaaaaaaaaaaacaaaaaaaaaaaaaaaaagggccccccccccactatggaccccacccccccctaaataaaatccggcccgttcccggaagcccacccaactttccttatagaaaactttttaaaacctggccgaatccatgaacataacttctccctgaaaaaaattgtaatccgctcacattcccacacaaaatacgtcccgcaaacttaaatggtaaacccttggctccctaatgagccacctacctcccattat

SEQ ID NO: 15321 - DNA, 441 bp, Glycine max
  Clone ID: PAT_MRT3847_113840C.1
cggctgcgagaagacgacagaagggcactaggaaagttttatccccttaaatgggtccacctaacctgagttggattagttagagctccttgcggtttcacatatcaaagagtcacaaacaggaaataagataaaataaaataaattaaaatttagtgcagtgttataggaaactttggttgtcatgtttgatatacaaaatgctataggttttctttgctgcacttgtcaacacttaaaattagaattttttcaaacataatacattcaatgtataacttttccggtttatcaagcatgcccttaatgtaagaaaaccaacttgaaaaccaaaagcaatcaatcacgatcagtgataaggcatctcaaacctgttttattgccattaataccacttgaactttttcttgcatagtaacaactttcagcttctggtcttca

SEQ ID NO: 15322 - DNA, 257 bp, Glycine max
  Clone ID: PAT_MRT3847_113841C.1
ggaaagcaaaacatgcctacacagcataaatcagaagaagcataaaaaaatagcaacacgcaacacattctcaacaaaagaagcaaagcatgtgcacggttacacaaatggaatacgttgaccatttctttgcctccaaaatccataacgttacttctctcatcttccatggataaaacagtgaggttgtgggatttggaaactaagtcgtgcttgaaattctttgcacataatgactatgtgacctgcgtgcagtt

SEQ ID NO: 15323 - DNA, 406 bp, Glycine max
  Clone ID: PAT_MRT3847_113842C.1
ccaacgcgtccggtttagggttaatttttttaagggggtttgggttccaaagacaacccttttcccccggggggacccggtttaacggccgtgggggaaaggggggaacccaaatgccaaccgggtttaaaacagtccgggattttgagggttttggggcccgacatgtccggggatgaacgattggaattaacccagaattccaagggggtgctggttgttgaagggggattgtttgtcagggttttaaacaaaggagtttttcaattagcgtttggcataaagaggaaaaacaaagcgggggagaccaacatttattgggatggcatttacctctggttaacttacttaaccaagcttgattaaattacccttttgggggggccattgttaacggatgataatg

SEQ ID NO: 15324 - DNA, 1158 bp, Glycine max
  Clone ID: PAT_MRT3847_113843C.1
atgcgcgtagcctggggggtacacaaaaaagctataataaaacatccttgccgaagagcaagagcaagtggcataaatctccatgaagtagatgattagtccaacttttgaatgccatagctgtggggaacacaactcatctgatcagatcgaaccattattgcctaaaagctacagcatgtggaccaaaaaaatgaagatatgatgtggaaaaagatcaagaattaatgtgataaaatttaatttgaagattatacagttgaaacttagcaggtatatatatttatcagttccccccgtgggtatttgaactttttgaatctataaccaatctattatcggtttcggatcagcaacatgcccttctagctgattcttgatcgacagaatgttacgaatccatagcctttggattttccggtgttcttgtcagtgatgatgacagcttcaagaatatctccgaactgctcgaaatatttgcgcatttcttcggtaggagtctcccaggctagtcctccaacgaacaacttagtgaacgttgtgtctccgaagggtgaccgataatgcgggtggtgatgagccattgcatccaaagaagaaatgggtgtcctagttggtgcatgaagactcgctgtctcactcatttaagctctttcttcttcttttttcctaggccaaaattccataaaatgtctctgctttgtactatatatgtgtgattggcagcagaggaatcattgcatttgaagagggtgaaagaaggaggtaaggtgggtatggtttatgatggtgtattatggttattatttgatggctgtttggaacagaggtgttggttgattatgattgcaacaaagcatatataaggaaaggaaacaaatttattatttttattaaaagatgtgagtgagagagagggagagagagagagagagagattgacagctgcaatgacctctttctctgccaaaaaaagagaacgaagaaacacaagggatttgtgcggacgcgtgggtcgacccgggaattccgacatggggctggggttgcccatgtggaccccactaggggaaggagggggttgccttattggaagttgttgcaattgaggtggtggacgataagcagagaaagagctttccatgggtgtaggctggt

SEQ ID NO: 15325 - DNA, 1588 bp, Glycine max
  Clone ID: PAT_MRT3847_113844C.1
ttgcggtcgtttgcatgttagcgtataaaatgagacgccaaatccaaaccctaattttctaccacaccgccgctcgttattcacactgtgctgtgcttatttggcgtagcttaagagattagcaatagaaagtgaaagaaaatgagtcgaggaagtgcaactgctgcgaagggcaagaagaagggtgcgacattcaccattgactgcgccaagccagtggaggacaagatcatggacatcgcgtctctcgagaagttccttcaagagaggattaaggttggtggcaaggccggtgctctcgccgacaccatcaccgtcacacgtgagaagaccaaaatcatagttacttcagacagcaacttctccaaacggtatctcaagtacttgactaagaagtacttgaagaagcacaatgtgcgggactggctcagagtgattgcttctaacaaagatagaagcatttatgaattgaggtacttcaacattgctgagaatgaaggagaggaagaagattaatttacccattttgagaaaccttctttacccattttcccagtgttagcttctcttttggattgagctatgttgctttgtttacattagttgcaatttaacagttttgtttatttatgagttgcagtgctatttctgttgaatttagaatagagttcacatattatattgtcagcttttgcctttgatacagtgccattgcattattaaacatttgaacgaattggtagatcaaaaaaaaaaaaaaaaaactcgagactagttccccaagccctatacaaccaaaccctaacacacacccatttgattcagtttccatggctagcctcaaggttgcatttttggctgcagtgctctgcatggttgtggtgagtgcacccatggcacatgcagctatcacgtgcgggcaggtgacgaatagcctgatcaattgcatcggttacctccagaacggaggaacgccgccgtcgggatgctgcaacggagtgaagagcctcaatgccgccgccaagaccaccgccgaccgccagacggcgtgcaactgcctcaagtcggccgccagccaaatctccggcttcaaagccaacaacgccgcctcgctccccggcaaatgcggagtctccatcccctacaagatcagcacctccaccaactgcgctaccatcaaggtttgaagagaaagtcatggacgcaggaaaccggaaactactcactagtatatgagtagcattattaatattaagaataagatcgagggtgatgagggctccacttatatgcccctctcctcttgtatgagagatttgtattggatagctttaaattgtgttgcgttgttatttctctgtatgagttacacatagttatatctactttaatattgggttctccctaaaaaaaaaaaaaaaaaaaaaaaggattaatcatcgatatcactcatcacatctctataatttcaatagctaatcatgatgctgcacctaaccaccttgcatgggtcgtttccctcgccggtccactacttctgcagtagtattggagcttattgttgttggtgttgttgcagaagtagtag

SEQ ID NO: 15326 - DNA, 389 bp, Glycine max
  Clone ID: PAT_MRT3847_113845C.1
caaagacaagaggaaaggaattggcaggcaggattcattttcctcagagtctccaatgcaggatataccactacttttgcctcaagaagctgatggactagatacttcaaatggagatcatacaaatttaagtgaaaattttccattgttgtcccaaaagctggagcatgaaactttagtttcagacacccagatgaaagggtttcaagatgaagttgttcctttaaacttgggggcacaacctgttgccaatgctctagatgattggtgggaaacaccagaagaaaccaatgatgacattactttggaatatggagaagttggtccacgtactacctgtcactgtcaggtaatcagaagtgtcagccagtggtctgctggaacaagtc

SEQ ID NO: 15327 - DNA, 143 bp, Glycine max
  Clone ID: PAT_MRT3847_113846C.1
ctcgagccgaatcggcctcgaagtaacttagtaattacactagcaagtctactgccagcctaaacaaagtactcactcgttcactgtctgggtgaatcactgaaagaacagcctgactaaattacttagactttttcattatt

SEQ ID NO: 15328 - DNA, 380 bp, Glycine max
  Clone ID: PAT_MRT3847_113847C.1
gggggcaggggaaaacacaaaatttttttttaggaatggtttacaaaaacaaatactaagctcaagcccaaaatagcaaactgaaaaataggggccagatccccccccgttttttttttaaaaaaatcttccccccttttaggggccctgtacagttttcccacgtcctcgatgcaacgcataagcaaaatttacccccttggaggaaaatttcctttgtctcaaagctttttttttgtagtcagaaccactaaccccccagcaaattttttcgtcaaaaaaaacaaaaaatctgtcttcctgcatatgattctgaaagcttaaaatccatttacagccctttttggggaggattttggggcaaccaatggacgtttttt

SEQ ID NO: 15329 - DNA, 390 bp, Glycine max
  Clone ID: PAT_MRT3847_113848C.1
acggccgcgcctccactgatgggtccattgttctgagatctcttgtataggaatataaggttgtgctcaaacacgtggataattatgacggggacaggatttcctgggcttcgttcgcctattactagtatttaatttacttatgattattaatagattattgatactactaattcctactttgtgttatattagtaccttgtttactgataaagattctatgactaatacctgatttagtggtacaatgttaacattatatatgttattattatttaaatttgactcctttttattcccatttttctttctccaacaataaattttcaccgttgccatttatttcatgctcactgaaaattgtaaacaagaacgccaccttgtttcaac

SEQ ID NO: 15330 - DNA, 527 bp, Glycine max
  Clone ID: PAT_MRT3847_113849C.1
atactaccgggtaaatcacattcgaagttataattccatagcttggacactcgtctaagcacgctagaattcacatgaagatacacagcatctcatcacatgaacacgtgaggggagcatgtgacacaaccttaggggcgagagaaattgtgcaaataaaatcatccataatataccccttacatgtgactccaaccaatcatcatgacacattcatgtgtcactaattcctttttgttaattacaaatcataatcatgtgtgactaattccttttacttccccaaaccaaaagaaaaataaaatcaaatagagattaaaaagggtaaattgaaggattgatgaaaattattaccggggtcagaaaatatcaagaatttccaaaattaaattggtgcagagagggcagttccctctgctcacccaaatctccctcgaacacattctgcaaaacgtgtgcccgcacgggataaacgccgcgcctttatgccgcaccatgcacacgcagcagttatactccaccacacc

SEQ ID NO: 15331 - DNA, 418 bp, Glycine max
  Clone ID: PAT_MRT3847_11384C.1
agggatgcctaccaagggctcattccttagttctttgtccgaacgtttgttccaatggcgtcaacctaagaaatttgagtaaccaggaaatagcttcattcagcatacatagtttctgtccattttgtcttatgtctcagcccccaaattttgaggcacaatggttcctttggaagcaaggctgttggtaaattaattggtcttactgattgtttagtgattcactattgattgttccatatacatgtactttttaattacccattcaatcccatatgatttatggctccttggagctgattttgtaattgtaacaattcacttttgtaatttatgtacaacaaccaagaattgctaaacgcatatacagtttggcgattcacattcaattttttaattccatttctccatcacacac

SEQ ID NO: 15332 - DNA, 362 bp, Glycine max
  Clone ID: PAT_MRT3847_113850C.1
ctctctttgaattggcattggaattcaactcttctctttctctgtcgaagaacaagtagtttcagaaagatgctagagaatcttcaggctcctccgtcaacaacggaatcggccccagtggtgaagcgctatgctccacccaaccagaggaaccgttctgctaacaggcgcaaatcatctggtcagctcactccttattttctcccaatctttttattcacctgccctttgctaacttttttctgttcttttttcaaatgggtatttaataatgtcaaagaaatatagcccctttttttctcatgagcatgatgtgctttatttactttttttagttgcgcaagtcaagtttccgttgccaa

SEQ ID NO: 15333 - DNA, 519 bp, Glycine max
  Clone ID: PAT_MRT3847_113851C.1
ttcggaatcgggctctagcaaattttcacaatattgacaccaaccaatagataaaataatcacaaggaccaaatttgattatttaaaaaaaatgaccacccagtcacacctcctccactgcaaaacaggttgagaaatgagaatcagaatccaaaacagaagccaccatctaaaaccccgcgtggtgaaaatccaaaaatgttcctgttccagaagggttctcatctccatcgtctccttctgtcaaagaagtactactaccattttccgcttccacgcaatgcggttaccatcgccgattccgtcgaacacccctcagacgccaccatagccaaactagtcctcgaatcagacccacgcaccgtctccgaagccctaaccaagcccacaatccaatggaccccagacctagtaaacaaagtcatgaagcgcctctggaaccacgggcccaaggccctccaattcttcaaacacctagaccgccaccacccttcctacacccactccccctcctccttc

SEQ ID NO: 15334 - DNA, 604 bp, Glycine max
  Clone ID: PAT_MRT3847_113852C.1
cccgcgtccggctggtttttccaaggatggacagactcgagaacatgctctgctctcattacaccctgggcgacaaacacattattagctgctgtaacaaaccggatgctcctacacccacttattccaagggcagggatgctgaaattgtgaaggacgtctcttcctactggaagaatagtcaggtacagccctgacacgatcactttagatcatatctgtgccttttagggagacaccatgatggttaggtccacaaaccttgcctggtacaaggggccaactctgtttgatgcacttgaccagattagtgatcccaaaacgccctctgacgagcccgtcaggcttactcttaaagatgtgtacaagattggaggtattgaaactgtgccagtgatacgtggagaaaccggcgtcttgatacctggaatggaggagacttttgcaccaactggactgtacactgacgtcaagtctgtcgagatgcaccatgaatctcttacagaggcacatcctgctgacaatgtgggattcaacgttaataatgatgctgttaacgattagaagcgtggctatgctgactcaaactcaaaggatgaccctg

SEQ ID NO: 15335 - DNA, 462 bp, Glycine max
  Clone ID: PAT_MRT3847_113853C.1
tgtctcgtaatggccgaggagagaaacatacggtgctcttgatttgggagggtcttcattgcaggtcacgtttgaggggaatagcaataaagagccgcaacatttgttcaatagtgagactagtttgtatgttaggattgggtctgtgaaccatcatttgacggcttattcactcgcggggtatggcctcaatgaggcatttgataagtctgttgctcatgtttttaaggagtttgggtatggtatggaggatgttgttaaggggaatttggaggttaagcatccctgcttgcaaatcgggtacaaggagaggtattcgtgctcacattgttcttctgctgtgaagaaaggaggggagagtctgatggttgagggaaatgggaatgtggtggggaagaaggagggaggatcaaggactgtggtgacgcttgttggcgccccaaattggttgaagtgtagcac

SEQ ID NO: 15336 - DNA, 305 bp, Glycine max
  Clone ID: PAT_MRT3847_113854C.1
cccacgcgtacgttctgcagctaaactatatttaggcttaggcaggaatgggcggtcgcagagatacagtccaaatattgctaccagaaccatttggctttaaggtctgggaaacaataatggatcacagcttgagtatttgaagtgtctacatgtggagtcatgcacatgtgatccatgctacacaaagagagctgcatctgatagcataacaatatgcttactagtggatgcatccactacacatatatcctcttaattcagaagtatccaatgtatactctcaagcagagcatacatataaa

SEQ ID NO: 15337 - DNA, 479 bp, Glycine max
  Clone ID: PAT_MRT3847_113855C.1
ccccaaaaggaccccgccaaaaacttttcaatgtttttgaaaagaaccggcccctttaaaaaaaaaaaaaaaaaacccccctttcctcacttttgggaaaaaaattttttttccaccaagagaataccctgaaaggggtacccaaggctggaaggaaggggttcccatctgcaaggctttgcttccaaacaaaaaaggaggaaaggagtttttcgtttaaaaaaccctttttttaaaacagttttaaaagccctttttgggcccaatggggggaccaaactcgtaatattttgcctttgcaacccacatttgggggagggggctaaaaaatgccaaaataaaacccccgcccccaaccctgttttttttttccgggggggccacaaccttgatcttaatgcgggggggggccaatgccaaaatttccttgttcattttggcaaaaataccagggaacatgggttgttcctcctgaaaaa

SEQ ID NO: 15338 - DNA, 119 bp, Glycine max
  unsure (1)..(119): unsure at all n locations
  Clone ID: PAT_MRT3847_113856C.1
caggaaaanagtgtnccgaggtttgggctnatcccttngctgttcccggntacatgggcgnggcggnnccggcnanntcagcgncgccgangtgcaacgtcggagtggacggcatggtg

SEQ ID NO: 15339 - DNA, 216 bp, Glycine max
  Clone ID: PAT_MRT3847_113857C.1
acgtccacgcgtacgcttatttagggttatagtgactgtgctccacaaccgagtcgcgatggggtgacatgagagtataggaaggatgcaagcacggcagaattaccggaggtgatcgcacacgcatctgatgagatggattcaagcagctactccgtatcggagcctcacgttgaggagagcaccatgaatgtcgaaccttactggcaaacgggc

SEQ ID NO: 15340 - DNA, 278 bp, Glycine max
  unsure (1)..(278): unsure at all n locations
  Clone ID: PAT_MRT3847_113858C.1
attcccgcctagacctacgcctacgctgatacacatcacattctataatattatttatcaatggcacaaaaacctcgcagcggcgggtcaaagtgactgggctcacgaggactaccacnacccaccccccgccccattctacgaccccgccgagctccgaaagtggtccttcttccgcgcacacataaaccactttgttctcaccctcctttaaccatacgtcaccatcctcaccgtcatctgttacaaccaccagacagtcaccatcggcaagccct

SEQ ID NO: 15341 - DNA, 317 bp, Glycine max
  Clone ID: PAT_MRT3847_113859C.1
acatgcggcctgccctttgtatttcggttgatatgatgagcacacatagggaccataaatatagttagcgattctgagagagaccctcatcatcggaactgtacagatttggttaaggcttatgagttgactttagataccaatttgctataaaaaggtgtggagaggcaaacattgtcggtgatatggagaaactatccatctatagatttatccgaaacacttaccttaggcaccctttggcttatgtgagccctgttatatgccgcatgaggatttcctttgcttgtttgaggaatgggagcgaggattgtttg

SEQ ID NO: 15342 - DNA, 249 bp, Glycine max
  Clone ID: PAT_MRT3847_11385C.1
cgtccgcttaaggaagatgaatatcatattattcttatttttcccaatctagacttgctgggggggggtttgtgtaattgatatggcacgtctaactttgagtaattaaatttaccttgtaggttttaaagcttctgccgatggctctctcatttcaaatagggctgtatttcatgagccatattttaatgacccttaaaactatggcttacaagttgttgaattcataggtgttttcaacatcacaat

SEQ ID NO: 15343 - DNA, 176 bp, Glycine max
  Clone ID: PAT_MRT3847_113860C.1
gattgcctttttggttaattataattgtaattttattttttaaaaaacacatccaccatgtcacataatgccacataagacaaataagacacgtaatcatctattcaactaagttacttatttcacaggcaattaacaattgaccttatttgcatttttaaaaaaaactaagggct

SEQ ID NO: 15344 - DNA, 1102 bp, Glycine max
  Clone ID: PAT_MRT3847_113861C.1
ccacgcgtccgcaccactcctatcaccgatagtgagcttcacgcgccaccttggcgcgtagggttgccagctgctattcctccaaccaaaaggagccaaagccaaagcccattcgttcgtcaccgttctgttcactctcgcgagcacccacccaaccgtcttcgccttgccggtgatggaattaaaagcacccgccctagtctgcatcgaattcttgagcttcacgtgaaacccttctcggattgatgacaacttgtttggtttgggcatcaagaacaaaaaacaagctttgtagaattttactggaaaattatggaagcacattctgctttctctattgaaaggtcaaatgctaatgacatggggatgtctgaagcatttccctcatcgttgcctgtccttccatcgcctctagaagagacataccctaaattatctgattctagaccagcttttatggaaaaagagcttaaaacaaaaccttttacacattcaagtcatttaacttccagcggagcagttgggcatatgttttcatcttctcctggatattcaactgatcttcatcactcatccttttcatctcatgaaaaacaacctagaaatactcattttatttcacaatcattaagtaacatcacttcatttccattatcatattcttcaaatactggaccaccaacttcagcaacaccaagccattattccaaagaaagcagtgtttcctggcatacagattccctgccaagctttctggattttcctgaaaatggctctattgataataatcgggtagaaagtagtgcctgccctataatggcatctgaggagtattctaagcaaaatgattggcaggagtgggctgagaggctaatcagtgatgatgacactttgactactaattggaatgaccttcttgctgacaacattcaagatcttgagccaaaggtgccattccaagtttcaaaaccactttcacagattccaggacatcaatcccaaggtcatcaacaacttcctgcttcatatggagagaattgcattggtgctgccctctcttcctcagcaaattttgctcctgctaagtcacgaatgcgttgga

SEQ ID NO: 15345 - DNA, 503 bp, Glycine max
  Clone ID: PAT_MRT3847_113862C.1
agcaaagagccttgatcacgattggttttattgtcacagagctgctgtttttgtcgactctcattggagaccaccctgaaggtatggcatctttggctcgttcactacacacagtccttagtgaagtcatcatggtacgtttgtgctctcttgttggtcagctcgttgtcttgttcgaccgcatggtaggcactgcgttgttcaagtagtctaaatgggtgtagagtagcacgaaaggatgcatccgtctcatcaatgtgtgtacagtggcagactagggcaaggccttttcctataccaatgctttcagtgttttgttagtcattaacttatctgtaatgtgaatttcattgcttgtgaatcctcttcctacgccacctttgatcacatgtatatggtgtctcattacgggataagacactggaatatgctgaacctgcgcctgtagatttttcttgtacagaagacgttgacgactacgactacggctatgatgttgacca

SEQ ID NO: 15346 - DNA, 287 bp, Glycine max
  unsure (1)..(287): unsure at all n locations
  Clone ID: PAT_MRT3847_113863C.1
gtgactgaacggacccggtgacaggatcttgctgttggtattaggagatctgcacatcccacaccggtgcaaaaatataacagctanattcaaaaaactcctggtgccatgaaaaattcagcacattctctgcacaggaaacctttgcactaaagagagttatgactatctcaagactctggctggtgatgttcatattgtgagaggagacttcgatgagaatctgaattatccagaacagaaagttgtgactgttggacagttcaaaattggtctgatccatggac

SEQ ID NO: 15347 - DNA, 984 bp, Glycine max
  unsure (1)..(984): unsure at all n locations
  Clone ID: PAT_MRT3847_113864C.1
ccacgcgtccgcccacgcgtccgtacggctgcgagaagacgacagaaggggaatatgtaccaatggtggacaaagctgttgatgctgcctggaagagccaaacatcactccagaggtctcaaacttcaaaaggaacacctcccctccctgacactacaaacacccctgaagggattcaagctcggattgtggtagctctaactgtcttctttatgacgctgtttactctcttccgttcagtcgcatgccatgtgaccaagaaacttcctgccgtatcatctaatgatgatcagggcacttcagagccaactcttgatgcaacaaaaacaaactatgaagactatcgtcctccttcaccaactccagcatatgtagaggcaaatctcctttcctcaatgatgaaaaggttaggtgagcttgaagtgaaggttgacacactccaatctaagccatcggagatgccttatgagaaagaggaattgctaaatgctgctgtatgtcgggtggatgctttggaagcagagctaattgcaactaaaaaggctctttatgaagcactaatgaggcaagaagagctgcttgcttacattgatagtcaagaaaaagctaggttacggaagaagttttgctggtgagttttggttgctgatagaaagggactctgggagagggtgttttcgaatcatggtgtttctagtgctgaccttgcacatgatgttaaactctgaatactgattcagtttaatgagtaaactcgagaattgtttcaaacttgtgtatagctaatggtggcttctttgccggattaaacacaagccttgtttttgctaacctttgttgttgtatttggtgtggttgtctttgttggttggaaaagcggttgttcttccgatctcataacttgcatcgaatattaatctattttgggggctagcgaggggaacaaaggtaaaaaattaatctccaactatanatttttcttgc

SEQ ID NO: 15348 - DNA, 459 bp, Glycine max
  Clone ID: PAT_MRT3847_113865C.1
gacgatgagcaacaccacaaaatgaaagatgtacatcaagaagatgcactagagcatgttgaaagtaaaaccatgagagatagcatctgtgggagaggaacgatatccggtggttgtgccccttgatatggttaataaaaacaagatgggaaagaatgctatgaaattggtagcagagaaaatctagtatgccaagtttttactgaagtaataaagaggaagaacatgttgatgaagaaaaagcatcctatggaggaaatgccattgaagaaggtgaaactttaactcacccagaagcttattctgatctagagaaccttaaaacccaataaaaagaagctaatcttgaagaaggttatgttgagagagaaaacaacgcttgctcggaactttcttgcaccccagataccttcgcaacttcagaaaaagaaaacgactgagcacaggcagaaacagaac

SEQ ID NO: 15349 - DNA, 373 bp, Glycine max
  Clone ID: PAT_MRT3847_113866C.1
ggggccataagaggaaaacacccttagaaaaacaaatggggcccagggcacaaatgaagatacaacggaacttctttttggaatcccgtttttctcctaacactggccttatttttttaacaattgtttacaaaaatattattactaaaaattagtttctgaagggttatggaaaaatattttcaaaaattaattcttaaaatggaaaataattactaaaaattggtttctcaagttttggtggaaaagatttcctaccactaattattagaatggaaaataataccttcccaataccagtttttaaaatatattttaaaagcttggcatgactaaatcactttttaaaagtttttttttttataggacattt

SEQ ID NO: 15350 - DNA, 463 bp, Glycine max
  Clone ID: PAT_MRT3847_113867C.1
ctcactctctcactctatcgttcgtcgctattgaaattcgaaactcttctgcgcgttcttcctccttttatactattctgtttcaaacggtttaaacccttcgcggggtttttctttttctcgccataaaaaaataaaaagtgttcaacaaaaaaaatgtggtaaaaaacttgaatgcacgtgatgtaattgtaacagttcaagttttgaaagatgcatcattccttgcaaataggagctacccatatttatttataactattaactatggaaggaacttttccatcacatgcctttgagatatcaacatttggaactcttaccttttgtatgaatgaacgatttgaaaatttttaagaaattcaaatacacaatattttaatgatcttgatttaaatttcttttattttataaatattttatttggatgaaaccaatttaatttgttgattttaattttcta

SEQ ID NO: 15351 - DNA, 715 bp, Glycine max
  Clone ID: PAT_MRT3847_113868C.1
gttcatttatgcccatatgtcaacctcctctttctacctcattgtgctgtgtgttattcttggcaaaactcacctttggtagctttatagtaaatggtaaattttatcaagagcaaattacatttgcacccaagttttttttcaaattgcacacaacactgccctttatttttattcctacactatatccccttaatgtttgaaaacattaaacatacacccccttatatattacactaacccccctaaaccccttataaaggaggttgttgtaaacaataatttaggagggtattgtgtgcaattcgaaaaaacctcggggtgtttatgttattagatcttttatcaatctattgtttgattgatagttttcatggagtagatgaagtctataattcaattcagaaactcattgaggagagggggagaggtctctttgtatatttcttacgccttgtgtcaatgaatcttgtcccaaacatgccttccatgtgcatgtgtgcacacaccagtgtaatcattacctgatcgcggagaatcacgaaaagctgaaaatccgctatagaatatagcggatacgtcgcggtcaaatagtggaagccgcatagcggttgaaatagaatatatataacaattaaatatgtataaaaaagaatcctatatgcaaaaaaaagaagctggataaacattaacataatattatctcaaaagttaa

SEQ ID NO: 15352 - DNA, 598 bp, Glycine max
  Clone ID: PAT_MRT3847_113869C.1
cctgaattgagttattattagcttcaacatcacatgggaaaaacttgacctaactattaaccagttattaacagaaagattgcataggcaattctttcatcatatctgccttcatatcttacagaatagtaatttgcaaatgcaattcttcatacataatgaatattgaaaattgtatgttgcaggttaagttcaccaagaccggggtatgtcatggatttgtgctgtggattaactgggtgatggatttgcaaaattctgttgtgatatcaactggtccaggtcactcatttccctttccaacattaactaaagctatgaagcctcactcttccattcaacacctgtggcaaaaattatagatgaaagactaaatcaagacccaagacaaaactcatatcttataaaggatctagaacaatactatgagctattgcttattctttccattttaagattgcatataggagatattggaaacagggagtaaagcttcttggaacacctagaacagtaggacctcaaagatcaataaatgtgcaagcatgttctgcatgcatggtactgggaactttccgcccgccggctcgagcggccg

SEQ ID NO: 15353 - DNA, 228 bp, Glycine max
  Clone ID: PAT_MRT3847_11386C.1
acaccctctcagagataacttacccacaaataatctggactcactcttaaactattaaggcatccttctagaaccgccccagtattgagccatgcatgcttggtcctcctgtcaccgattcctggctcgcaaagttctttgctggggaccccgttgccttaacccaggctcttcacaagtttctctacgatactgttttgccggtcgaggaaatttacttttttccct

SEQ ID NO: 15354 - DNA, 282 bp, Glycine max
  unsure (1)..(282): unsure at all n locations
  Clone ID: PAT_MRT3847_113870C.1
ctagctttaaaaaatacgtaaatttgatttctcatanactttgtgacattcaaatactgccactaaatgctatgtttaaacttgaagagggactatataaattcagatatttcaaaagttacaagaccaaatttaatactttgaaaatacagagatcgaaacccttcaataagttaaacttagaatggaaactttcaataaatatttgatttggcacatcaccttgttgggntctatggatacagtggaatgatgtaatttccaaggaaaagttactgatgt

SEQ ID NO: 15355 - DNA, 437 bp, Glycine max
  Clone ID: PAT_MRT3847_113871C.1
cattagtattccttctatcaacattctatctattctattcatgtgctcaattttatgctgaccattctttcttcttcttttgcttatgttatttgactgccacaaaggatggttcaatcaacaatgaagaggaaacgaaggaagggttgactagaatgaaccaatcggataacagaactcgttcacattcatcctcaccatcaactcaaaaccgtcacagaaaattgaggaaaccagctactactacttgtgcaaggaaactgcagaaatccataagctgcagaacacttggggagctagaacttgacgaagtaaagggttttatggatcttggtttcacgttcaagaaagaatatcttagtccaagaatgatgagcgttgtcccaggcttgcagagacttggtgtagtggatgccagagaaacgggtgaaggaaat

SEQ ID NO: 15356 - DNA, 303 bp, Glycine max
  unsure (1)..(303): unsure at all n locations
  Clone ID: PAT_MRT3847_113872C.1
tcgaggggggggcacggggactagggagccctggaagaaaggaaacatttctttggcatgtcgagcgatcacaaatgagggggggcccccctgacgagaacggggaaacgtctaaaatgactctgcatcgctttggcaacacctgcaccaaaaagagcaggtacgaagagggtgacaagggaaccgaaaaanaggagtgggaaaagtgaggggtagggcaggcaaaaccggggctgggcttttggcctaagatgtgggttggcgcgccatgcgccgaggcaccaagccttctaggaacccttg

SEQ ID NO: 15357 - DNA, 257 bp, Glycine max
  Clone ID: PAT_MRT3847_113873C.1
gcatacttctcttgcctctctaactaacacacgcgcattactgtgcaggaataagctcttacttctgagataggacgcttttttggcccgaggggcataattttaaactatccgcgtaccgacgcaccctatggcaacatggctaaagccaactatactagatttgacaataacaagcgaccgtcacgttactgatcaacagtgactatgcgcgagtggtgtagctctttgatcgtaagcaatttggatgatgacac

SEQ ID NO: 15358 - DNA, 152 bp, Glycine max
  Clone ID: PAT_MRT3847_113874C.1
cccacctccgtttcataaagggtagaatgaaagaagcaccgattgtctcgactgctttgaggaatacgatcaaatttggtacaattctcaatgatcctgacttgcctctttcatactttcctgaattcaagaactcaaaaagagttcctaat

SEQ ID NO: 15359 - DNA, 479 bp, Glycine max
  Clone ID: PAT_MRT3847_113875C.1
agcctgctactaaatctaccaatctgatggaaataagttcttctgagtccatacagccaaagctcatccttaactctaaattttctctatcattaaccaacatagtctctaccacacctacatttgcctctatacctagctttaatggttgatccctctctatcaatactaataatgctcttattcaacaatctaaatgcaccattaatccatatagcaaactatcttcatctaaattatacatcttgatctgaaggatttgctctagttcttataagaccaaatcattaaatctaaaaaacttgccctcccacatacaaaaaccttcgttagaagcaattactcaattcattgcctcacagtggccatctacatctttctacaatcttgccactgtccatgacatgacataatctgctctaatgcttgcaacccctagtccttatcctcggacttttacattggtatcaatctataaa

SEQ ID NO: 15360 - DNA, 181 bp, Glycine max
  Clone ID: PAT_MRT3847_113876C.1
attcggctggaacagaaaaggaaaggcggcgccgctgaggttggtatatatccgagacgccaccacagtggagtgtttcgtctcgggggaactgaatattcaacttcagcagactctactgtatctagggtttttccatggccagcgtgatccgcaatcctatccactttccctccagctc

SEQ ID NO: 15361 - DNA, 395 bp, Glycine max
  Clone ID: PAT_MRT3847_113877C.1
ccacgcgtccgcaaacacatacattgaagcatcacttttgactagaaatttgatcattttgagttatggcaagcttaaaggtagcatgtgcggattagatgtacatggctgagacgagtgcaccaatgatggcgcaaagccgaggcatgcaatgatgtttctgtgaacctagcaccaggcctatcttacctgatgcacggaggatacgactcacaatccagctgtagcagagagaagaacattctggcatctgccaataccacctttgacaaacaaaccgagtgcaaatgtcttcatgaagctgctaacaactatggcatcaaagacataatacgctcatgcactccccgaccgctgcaatgtcagcgtgccttacaagatcaggcgatccacca

SEQ ID NO: 15362 - DNA, 363 bp, Glycine max
  unsure (1)..(363): unsure at all n locations
  Clone ID: PAT_MRT3847_113878C.1
cgcaacactaatgagntattatgagtgggggggcaggactttggagtccaactttaggtggtcatgggggaagaataattacggaaccaacaacaagggctttccttaaacttttggtggttggcagaaccccagaaggtaaaaagggatttggcagccctaaggcctttaaaaggttctgggttaggcccacctccaattgggaagggtcaaaaccctggcagggccgggaagggcttaaggggcaaaacctaaggggtaattccctatccttatcaaatattggcttgagcggccacctcttaaggaagattggaacaatttctgaagtggagaatctggaactctcttacacataggggc

SEQ ID NO: 15363 - DNA, 2581 bp, Glycine max
  Clone ID: PAT_MRT3847_113879C.1
caagcttatttttttattttgatggtactgaacattgaaggaagttatcaaacttaaaaataggtactcttaataatcaaactgatcaaggagtattcaggatatcatggacgagaatggaagctcaagcaatgcaccaaagaacaagagaaaccttcctgtctccgttttcttcaaagatgcaagacatgttttcaagatggattccattgctaaggagatacttgggattgcattcccatctgcactggctgttgctgctgacccaattgcttctcttatagacacagcattcataggccatttggggcccgtggagcttgctgctgcaggagtgtccattgctttgttcaaccaagcttcaaggattaccatcttccctttggttagcatcacaacttccttcgtagctgaggaaaataccattgaaaaaatcaatacagaaaagaagttaagtgataaggctaagtccaaagaacaagtaatgctcgatgatcattcccttcaagacatagagaaagttgcatccaaagagaacaatgagactgagaatgtggaaatgaatgattgcaatacaagtatatgcaagtctacctctgatactagtagtagtagcagtaacaagagtgtgccaaaagatggaaggaagaagcgacacgttgcttcagcatccacagcattactttttggcacaatccttggtctccttcaagcaacaacccttatatttgctgcaaaacctctattagctgcaatgggtctaaaacctgattctcctatgctaaaccctgctattaaatacttgagattgagatcattaggtgctccagcagtgcttttgtccttggccatgcaaggaatctttcgaggattcaaggacactacaactcctttatatgttattctttcggggtatgcattgaatgtcattttggatcccgtgcttatcttctactgcaaattgggcatcaaaggtgcagccatttcacatgttctctctcagtacttgatggcattggccctcatggtgatattaactagaaaagtggatcttgtacctccaagcattaaagacttgcagattttcaggtttcttaaaaatggaggtctgttgttggcaagagtaatagctgttacattctgccagaccttggcagcctcattggcagcaaggtttggtccaattcctatggctgcattccaaacctgcttgcaagtgtggctcacatcttcccttcttgctgatggtttggctgttgctgtacaggcaattctagcttgttcctttgctgagaaagactatgaaaaggtgcttgttgcagcaacacgaactctccagatgagttttgttttaggagttggattgtcttttgcagttggagttggattgtactttggagctggaatcttctccaaaagtgttcttgttgtgcacttaatcagaataggcctcccgtttgttgctgccacacaaccaatcaattcattagcctttgtctttgatggtgtgaactatggggcatctgattttgcatattctgcatactccttggtcaccgtgtcattggcaagtgttgcttcattgttccttctctctaagagcaaaggtttcgttgggatatggattgcactaaccatctacatgagtcttcgcatgtttgccggtgtgtggaggatgggaacaggtacgggaccatggcgttttctcagaggccgctcaatgtcttgatgatgagatgacatctaacaaaagaaatttcattgttgagcagaaaatgttttgtatcacttttcaccatttaggaccagttgtctttattcaaaacatgatttatgcactatacaactatggtgatagtcttattatatattatattggacgggttcattttacacttgcaagtgttatattcaaagtatctttctttttttttggcctatgtttactgtatggtctctgtttaatgatgtatcctctgcttattgtaatattttgtcgtatttagaagattattcttcgtactgttagtagtatgtaaactctgagtgcatgtatacaaatgagaaaaataaattacttttttcttggagttttctcagaggccgctcaatgtcttgatgatgacatctaacaaaagaaatttcgttgttgagcagaaaaaatgttttgtatcacttttcaccatttaggatcagttgtaatttcgttgttgagcagaaaaaatgttttgtatcacttttcaccatttaggatcagttgtcttttttcaagacatgatttatgcactctacactatggtgatagtcttattatatattatattggacgggtccaatttacacgtgcaagtgttatattcaaagtatcgtttttttcttttggcctccgtttaatgtatcctctgctcattgtaatattttgttgtatttagaagattattcttcgtaatgttagtatgtaaattctgaatgtatgtatacatatgagaaaaataaatcacttttctgtccaaactctacaatctccatggtgtagatcatgtttttattgggaaagctgctaaattacttattccttttt

SEQ ID NO: 15364 - DNA, 679 bp, Glycine max
  Clone ID: PAT_MRT3847_11387C.1
ctcgagccgaatcggctcgagcgatcgccagtcactcctttcgtagcccagcatgatcattcccaaggccgacaggcgtaccatctacgagaacctcttcaaggaaggtgtcctcgtcgccaagaaggatttcaacgccccgaaacaccaagacctcgacgtcaagaacttgttcgtcatcaaggcttgccaatctttgacttcgaaaggtttcttgaccactcacttctcgtggcaatactactactacgtccttacccccgaaggtattgactacctccgagagtacctccaccttcccgctgagatcgtccccgctactttcaagaagcaagttcgcgcccctcgtcccggacaaggtgctcgcgccgaaggaggagcttaccgtgccccccgtcaaggtggagacgaaggttaccgtcgtcgtcaaggtgctggagagggagccaaggaaactggagatgacttcaagcctaggttcgctggtgttggacgtggtggaccccgtactgaggcttaaagaaaatcattctttctaggatgatttttctgaaaggtcgaaaggagggaataaaaaatcgtagttttgggcgttttgatctgaattcttttcttgttgaaaattgggatgattcattcgctcgtcaaaaaaaaaaaacgacaccaaaaaaacggcggc

SEQ ID NO: 15365 - DNA, 282 bp, Glycine max
  Clone ID: PAT_MRT3847_113880C.1
atattattatatgaagaaagcccatcttgagtagaatgactatatggttatacttattataaaacttttctagagattatagctaagcccctctatcttataatataatataccctttgtttattcactgaggttatggctatgccttatcggttgtaggcaactaaaagaggggatggcattggaatccctcactcggaacgccgtttaacagattacgcggtcccaaaaggctaaatcctcccttatcgaatggacctttatttgcttgtgaactcttcc

SEQ ID NO: 15366 - DNA, 1124 bp, Glycine max
  unsure (1)..(1124): unsure at all n locations
  Clone ID: PAT_MRT3847_113881C.1
ctcggctctcgttgtgatcttagtgagtgagtgaggaagcattgagagttggtggaaattaaggtcaagaatcaaactgaccaaggagtattcaggatatcatggacgagaatggtagctcaagtaatgcacccaagaacaagagaaacctacctgtctcagttttcttcaaagatgcaagacatgttttcaagatggattccattgctaaggagattcttgggattgcattcccatctgcactggctgttgctgctgatcccattgcttctcttatagacacagcattcataggccatttggggcccgtggagcttgctgccgcaggagtgtccattgctttgttcaaccaagcttcaaggataaccatcttccctttggttagcatcacaacttcctttgtggctgaggaaagtaccattgaaaaaatcaatacagaaaagaagttaactgataagaccaagtccaaggaagtaatgcacgatgatcattcgcttcaagacatagagaaaggtgcatccaaagagaaaaatgagactccaacagaatcttctgctgtaaggggtaacacaacttgtgtacctgagaatgtggaaatggatgattgcaatacaagtatatgcaagtctaccactgaaactagtagtagtagcaacaagagtgtttcaaaagctggaaggaagaagcgacacattgcttcagcatcaacagcattactttttggcacaatccttggtctccttcaagctacaacccttatatttgccgccaaacctctattagctgcaatgggtctgaaacctgattctcctatgctaaaccctgctattaaatacttgagattgagatcattaggtgctcctgcagtgcttctctccttggccatgcaaggaatctttcgaggattcaaggacactacaactcctttatatgttattctttcggggtatgcattgaatgtcattttggatccagtgcttatcttctactgcaaattgngcatcaaaggtgcagccatttcacatgtgctctctcagtacttgatggcattggcactcatggtgatattaactagaaaagtggatcttgttcctccaagtattaaagacttgcagattttcagg

SEQ ID NO: 15367 - DNA, 132 bp, Glycine max
  Clone ID: PAT_MRT3847_113882C.1
gcaccggcccggaattaaccggctcgacctactcactccgcagttcttatataactgaaaggaacgatgcaagagggggacccatatggatccgcgggcaaacacgtatatcagcaggctgagctatgaata

SEQ ID NO: 15368 - DNA, 701 bp, Glycine max
  Clone ID: PAT_MRT3847_113883C.1
tcagaataggcctcccgtttgttgctgccacacaaccaatcaattcattagccttcgtatttgatggtgtgaactggagcatctgattttgcatattctgcatactccttggtcacggtgtcactagcaagtgttgcttcattgttccttctctctaagagcaaaggtttcgttgggatctggattgcactaaccatctacatgagtcttcgcatgtttgctggcgtgtggaggatgggaacaggaactggaccttggcgttttctcagaggccgctcaatgtcttgatgatgacatctaacaaaagaaatttcgttgttgagcagaaaaaatgttttgtatcacttttcaccatttaggatcagttgtaatttcgttgttgagcagaaaaaatgttttgtatcacttttcaccatttaggatcagttgtcttttttcaagacatgatttatgcactctacactatggtgatagtcttattatatattatattggacgggtccaatttacacgtgcaagtgttatattcaaagtatcgtttttttcttttggcctccgtttaatgtatcctctgctcattgtaatattttgttgtatttagaagattattcttcgtaatgttagtatgtaaactctgaatgtatgtatacatatgagaaaaataaatcacttttctgtcaaaaaagaaaaaaaaagggcgg

SEQ ID NO: 15369 - DNA, 304 bp, Glycine max
  Clone ID: PAT_MRT3847_113884C.1
ccgatgtgttcaaacattgcctgtatctatagggggaggagctggagccaagaatgctttctgcatgagtatgccaaatgctgttctttcaatgaggagatattatgttggacatttcaactctgaaggtcataaaatgacttgttgctacatttaaagcactatctttttcttcatttgctgggaccttacgactgatcacaccattacttgtcttgctcactgccactacctggcgcggacatgagagatgaaggaataaattggatcgttctagtcgctggaggaattttttacagctcgt

SEQ ID NO: 15370 - DNA, 1489 bp, Glycine max
  unsure (1)..(1489): unsure at all n locations
  Clone ID: PAT_MRT3847_113885C.1
acatactgggaaaccttttattggataaccatggaagttgacagaaacagcaaaatcatcccattcatgatttttgtgcaacaatgatcatttccattattctagtgtttttattaagacaatgatgaagacaatctttgagttcacggtatgctagtgtttttaaatacatggacattgcagtattttgcttgtagatgaatgttgcaccatttgattagtcggtctccaaactgcagcctttgttcctgtttgcctgtccactcacttcagtcccctttgttcttgattatgtttttcaatttctcatttgcagccactagttcagcagttatgcctggttcattggctgaatgccctgcatcaggaaccaccctaaaatctgcctctggccaagctttatgaagatcccaggctgacatcataggacagcaaacatcatatcttccctgaacgattgtggtgtttatatgccttattttatcaattctgtccaacaggaatgaatcagaggggaagaatcccttgtttacaaaatagtggttttcaatccttgcaaatgccagcgaaaagtaatcgtcatcccctttttttatattctcttcatttggaagaagatgagcagtcatcatttcccatttggtccacgctctagcagctgcatactgagttttgatatcatcagagtttaatctcttgttataggcatcaacaaagcatcctctctcactctctggaataagatctctaaatggctcccaagcatcagggaatatagcagcagcgcctccctcgtaaaaccaatcaatttctttcttccttaaaaggaaaatccccctgaggatcatgccagtaaccttgtccgggtgagattggctgtatgcaagggcaagtgtgcttccccatgatccaccaaatacctgccattctggaatctccaagtgttctcttagcttttcaatgtcatcaatgaggtcccatgtggtgttttgctctaagcaagcatgtggtgtgcttttccctgcacttcgctgatcaaatagaacaattcggtaaaagtcaggatcaaaaaatttccgattgcttggagaagttccccctccaggaccaccatgaatgaacacaacaggatggccactggggtttcctgattgctcccagtaaattgtgtgaagatctgaaaccttcaaaaatcctgtactgtagggttctatttgcgggtaaagatttctgttgagttctgagaattcattttctgaagccatcaaatgactaggaattggttcaattctatggtcaatgttttgcacacgaaaaactaagctctttcttcctgaagaagtagttttggggtgagagaagggaaatgagatgggaagtttgaaaattagggaagttaaggagaaggaggaagggagggtgtttggaacaaaacccaacttcattcgaatagggaagggtcgtttggaacaaaannncccctcgagcc

SEQ ID NO: 15371 - DNA, 254 bp, Glycine max
  unsure (1)..(254): unsure at all n locations
  Clone ID: PAT_MRT3847_113886C.1
gcacttggaatccaaaaatgagaganatcatcagcattcacataggtcaggccgggatccaggnaggcaantccngctgggnactctactgcctggaanatggnatccagcccgatggcatgntgccaagtgnntcctccttcggtgtagcccangacgcnttcaacaccttcttcatcgnaacnggtccggcnagcacgtcnctcgcgccgnatcgtcgatctcgagnccnccgtcatngacgannccgttgt

SEQ ID NO: 15372 - DNA, 562 bp, Glycine max
  Clone ID: PAT_MRT3847_113887C.1
aaataaaaaatttaaaaaaaaaaaaaaaaaaaaaaaaaaaaaaaaaaaaaaaaaaaaaaaaataaaaaaaaaaaaaaaaaaaaaaaaaaaaaaaaaaaaatggggtggcctttttaaggttcccttcttatcgaacccgggcggccgactttttacttttttttttggagcccttaatttgattttccggaccttattttcctagctgccgattgggaaaccccctgcttttaccttatttaacagcctggaaccaattccctttttgacaatttgggtttttagaaagagggcctttcccatccttttttccaattatttggcaaccttaatgggccatttgcccccccttttaccgctccatttagcgggggggttttgggggttcccgcccatttttccccttcctttggccaggtccttgccgcctgttcctttacttttcttcctttgtttttccccctagctttccgattttccctttaaggttttatttgggggcctctttttgggtttcgaatttagggtttccgggaccctttcccctaaaaaattgtttttg

SEQ ID NO: 15373 - DNA, 353 bp, Glycine max
  Clone ID: PAT_MRT3847_113888C.1
atcttaataaattattgttcctcaagaagggcagaaagcttcggggccccaaattggccaaggaagtatgcaaacgggaccgggccctcccggaacacaatgtgtcaaggccctaaaaggaaccaaaagggggggaaggttccccctcttttagtgtgactttgcaaggggggtttccaaaaaagccaaaaaaggaaacgggtaaaaaagctggtgtttggggaaaaagcttatcaaaattctaacggtgggatgagcaaagtatttgtaatacaaaaaaagcttgaagaacaaaaaatttattatttaactggggaagacccggttggggccccccgcttagaacattcttg

SEQ ID NO: 15374 - DNA, 573 bp, Glycine max
  Clone ID: PAT_MRT3847_113889C.1
tactgagtcatcatctagctatctcgatcgaactgtccaaggtcctgtcacataatagcgacggccgccaacttaaccggcccgagcaagtaatacatggtaaggtggcccgggtaccttaaatagggaaccggcctcagtaatggcggggtaacgatgtggtggcatagacgcgccgagcaatgaccgacgcacacgcacgataacaaggcgcagtggcctaaggtacgcaatgtaactcgtacgcctaagcagcggcataaatgcaatacgttgcctatatcggatggcgtagcggccgataagcccgttaggcatcagtaacatagcaactcgaagagtataatacgcgatccgtgtgctacattgtggattaggtagtagtagtggtggtggtagtgaaggcagtggtccttgcataagcgtgtcgggagtggcgctgtaggcggccaggcgacaggcttgtgtggtggaatgaccgggccgttagcagggagcaacgggcccttagccagggtaggcgtgagcggcaaagaagaccggaagaacacgccagtgcgcaaagggtgggga

SEQ ID NO: 15375 - DNA, 776 bp, Glycine max
  Clone ID: PAT_MRT3847_11388C.1
attcccggggtcgacccacgcgtccgcggacgcgtgggcggacgcgtgggacgaaaatgaatcttcattgtgcttctcttgctgcaacgatatcttccgtttgctccatcaatgaagccacacacaagtctcgcacgcttcagaagcgagtcaactcggacgcgccaatcaaactcagcaccgagtttctctcccatgactcgctggaacccaccaccaaaccatgcttctgtggaagaagacacttcattgaagctgcaacactgggaactaccctatttccaatacaaccctccagagccaccaacccaccacgtgaatacacggctttgcttaaaaagtttcatccaccaagacctgattggtacgaggagttctatgcttcggttatgaattcagctactaaggattatgaagctgaggttgcaatgtacaagtctcaaatcttcggtaacttgaaggggaagggtctaagaatattggagattggcatcggaaccggtcccaacctcagttattatgccagtggctctggtgttgaggtcgttggtattgatccaaacccgaagatggaaaaatatgctcggtcctcggctgcgtcggctggattgcctacttcaaattttgagtttatacaagctgtatgcatgttattctcactagtttgaatcctcactttagaatgggaatagaaattatgccatggagaagtaatggtctaaatgatgattcattacttggtattcaaatcaaaacctttaattagtatagaatat

SEQ ID NO: 15376 - DNA, 587 bp, Glycine max
  Clone ID: PAT_MRT3847_113890C.1
ttcgggagaggtttttagttgtcttaatatatttcattcacaaaaatagtaaataaattaaaacatggggaaggagatgcaacagttggtctgtgcgtttgtgctaataactttgagtttcatgatgttttctgcagaggccagaaacctacatgcttttcagcaacaggcaatggaagaacctagtgccgctggtttgcagttgcaaagtttattatttgaatcaacaatcggctttgggatgttgcctaggggagcaattcccccatctgggccttctacaccaactcactcctactgctgctgctactactacagctggtcgctaaatcatgcatccaattgcaactatcaacttcaaagctacctccgatccgtttcaaaatttatgtatttttattttaaaactttggttgttttagaattaggatttccaatctcaggtaagatcggttcagatcatgaaatccttttttgtcggataggaggactgtttcaaaaaatgtacttctaagtaattgctccatagatcctatatctatctatatgaagaagaaatcatgtgaccgaggaattcttatttgtag

SEQ ID NO: 15377 - DNA, 162 bp, Glycine max
  Clone ID: PAT_MRT3847_113891C.1
agctctttaaagataacatttttccaagcaaactattttctgcagaggttgttctaattttgaaaaggataaaatttaagtgttattcttcaattaaacttggtttttcctgggtcatgctgagctgtaattccaaccattaataagcagattaatatagta

SEQ ID NO: 15378 - DNA, 397 bp, Glycine max
  Clone ID: PAT_MRT3847_113892C.1
gaggacacacagccagacaaacctaatgtggttgctgaagaatattttcaaagaggaacctcctgaaaacactgacttcaaattttaccatccttacaggggccaacgaatctcattgctcttggtacaaatacccaaaataatattatgagttcacaaggccataggttgccacatccatggaacaccagatcaaaaaaaactattccgcgggataagacaagaagttaccctttcgctaataaacgaaggttcaaggactaatctggatttgagtgtgcagacgacaaagttaacttattactaagctaattcggttgctgaaacacagcatgcactacttttttggttctttaaacatattcatctttgcatggcatatcactgcgaattgaga

SEQ ID NO: 15379 - DNA, 288 bp, Glycine max
  Clone ID: PAT_MRT3847_113893C.1
acggaggtcaagcccgccctgaccaacatggtctccgctgctaagctcattcgcacccagctcgccagcgccaagtgagcacctttttttgcctttttcgtttccgaggagggcgtcgtcgatgccaatttgtttccaataaacagggctccccccctgtgcccgccgttctgttgtgctccgtctgtggttaggttactagttttcttgatctcgcccccacgcggtacctgttttactatctgtttggtggtttctgaggcaagttgcccgtgtacttgtatcgta

SEQ ID NO: 15380 - DNA, 709 bp, Glycine max
  Clone ID: PAT_MRT3847_113894C.1
ccagcgtccgtttgctttaaccttactgttctgcaagtggcagaggaatatgtggaagttgaagatagcagaaggaggaaaggggttgatatccgtgaacgatttcatcgggcgtcaacactggatatttgatccaaatgcaggaacgccgcaagaacgcgctgaggtagaaaggctacgccatcaattcacaaaaaaccgattttccatcaaacaaagcgcggatctcttgatgagaatgcagctcacaaaggagaaccagtgtggtcccattccaccagcagtgaaagtgagagacacagaaaatataacgatggaagacatgattactacaattagaaggggcatcagtttctattcatcaattcaagcccatgatgggcactggcctgcagaatcagctggccctttgtttttccttcaacctttggtaatggcattatacattacaggatcccttgatgttgttttaggacctgaacacaagaaggaaattgttcgatatttgtacaatcatcagaatgaagatggtggttggggattccatatagagggtcatagttcgatgtttggatcagcattgagctacattgccttaaggatactcggagaagggtctcaagatggtgaggaacgagcaatggacagagctagaaaatggatccttgatcatggtgggttttagtggctattccatcatgggggaaag

SEQ ID NO: 15381 - DNA, 486 bp, Glycine max
  Clone ID: PAT_MRT3847_113895C.1
ggctcgagcgcccagtctaactgcatgcaaggactcgcgaccgagctcactcagactgtgcgctgcctgacacagctgccatactatgccgtacactatggagcaacaactctgtcttccggggccccgaaggtcatggggtgggtaccttcacatacagcaacgcgtggatgaatgtacaactcgtcggaagggaaggctaggaacgggacagtttgagatagagacccagtgacgctggcgcaataccatgcttggataaggtgggtggagcatgtgcactatggagaaacatgcgcagagagcctggactcgttcacatgccgatgctgcgagagctcgaagcactaataggggctgatatgcaggtcgcttggttgcgtagagagctgaagcagtacttgtggatgatcaatgttgccgcgacgaatttacgttagatgactgcatagacattgatagctgcattgacctcatgggcatatg

SEQ ID NO: 15382 - DNA, 967 bp, Glycine max
  unsure (1)..(967): unsure at all n locations
  Clone ID: PAT_MRT3847_113896C.1
gccgcgtcgtaactcgcatttggntatagcaaggccaatggaggaagggcttgtggaggccattgagagaggcaagattggtccaaagaataacaacaaaatggtgtgtgaagagtttggttgggacaaggatctagccaagagaatatggtgttttggccctgataccattggacccaacatgatggtggatgcatgtaagggagttcagtacctcaatgaaatgaaggaggctgttcttgctggctttcagatagcatcaagagaaggtccacttgcagaagagaacttgagaggggtatgctttgatctttgtgatgttgtacttcatgctgatacaatccataggggaggtggccaaatcattccaactgctagaagggctttctatgctgccatactttcagctaagccaagactacttgagcctgtgtatgtgatggaaatacaagcacatgaaaaggctcttggtggcatcaatagtgttgttaacaaaaaaagagggcatgtgtttgaggaaattcagaggcctggcaccccattttacaatgtcaaggcatatataccagtgattgagtcattcaaattcagtgaaacactgaggactcaaattggagagcaggctttcccacagatggtgtttgatcactgggatatggtgcagtctgatccactggaacctggaacaccagcttctgcatgtgttgctgacattcggaagaagaaagggttgaatgaacaagttatgcctttgtgtgtgttcgaggacatgctttgaagtatcaataatgtagaatattatttaggaccaatgtaatgtcgtgtgtgtgcatgtaattttagttttatgtttcaataaagtatcatgtccattagcactaatctaatgcttcctgtgaaagatataaatcaaattttaaaagacaacccggtaagtgaaacccaatagataaggtttggtttcttt

SEQ ID NO: 15383 - DNA, 398 bp, Glycine max
  Clone ID: PAT_MRT3847_113897C.1
gcacgaggtcatgtaagagacttcactatgttgttttctctttcgtggctttaataaattatgcgcccttgttccaaaaaaaaaaaaaaaaaaaaaaaaaaaaaaaaaaaaaaaaaaaaaaaaaaaaaaaaaaaaaaaaaaaaaaaaaaaaaaaaaaaaaaacctggggggggggcccggcccccatttccccttttagggatttttataaccccccctcatgggccgtgttttaaaaacgtgggaatgggaaaacccttgggtttccccaatttaatccctttaacaaaatccccttttccccacttggcttaataaaaaaaaggccccccccaatcccctttccaaaaatttgcccaccctaaatggaaaagggaaccccccttttgccggccctt

SEQ ID NO: 15384 - DNA, 920 bp, Glycine max
  Clone ID: PAT_MRT3847_113898C.1
gcttaagatagctatgaaggatcaagcacttttagagaagcatgctgtgatagagaggctgcagactctagtgcatgaagagcattctcactttcttgagattgaatctactctacagactctgcagaagttgtactctaagtcacaacaggagcaaggaagtcttgttatggagcttaaatatgggcttcagttgttgaaggatttgcagtttccaaaacagggttttaaggaagaaatgcacgagaatgtggaagaaaacaggatcctgaatgaacttactttctcttccactaggtctccgggaagaaggcgccaaacagaaatctctaaattaaaggagatcaaagagaaactggaacgagagcttgttgtaaactctgaagaaaacaatgccctccagcaggaagctcatcaaataaagaataatatccagctcttgaataataaatatcatgctatgctggaacaactacagactttaggtttggatcctaaatgttttgcagcatctgtgaaagatttacaaaatgagaactcaaatctaaaggaggtctgcaagatggaacgtaatgagaaagaagctcttcatgaaaagtcaaaggatatggatgaacttttgattgagaatgcctttatggaattttccctctcaagattaaatgatgaattagatggattaagagtaacagtgaggaaatctcaagagtcttgccatgttctccaggaagaaaaatctacggtcgttgatgagaaattagctctactttcacagttacaaatagtcactgaaagtatgcagaaactattggagaagaatgccttgttggagaagtccctctctgattcaaagattgagctggaaggtttgaaagctaaatcaactgacttggaagaactctgcaagttgctaaatgatg

SEQ ID NO: 15385 - DNA, 616 bp, Glycine max
  Clone ID: PAT_MRT3847_113899C.1
tcatttgttctcacttcattcctctgtgttgtgctgcctctacattctgtttttgctcgttgattcttgttaataattcgttaatcagattaataataattgggtgtataacatacgagttttgatcattaatgatgaatatatttctaatttttagtaattcctctttactatttttgagaacttgtatgtgtgcactataagttattttcattgaatccattatatttagtgaattggtcatcccatcatgtcctacttcattataccaggttttcggtccgccactccgcgccactatccaagattaactaccctgaggctaagttgaatatacaatagatattaccaaaaaaaaaatacttctaaagctgaacaatgaaactagaccttaagaaaagcctgtgtcccatcttgtcacagatagacattcaaaatgccaaccatttcacagtatagcactgttgataaggggatttacctcttggtgacttgcccgctccaccttacctttttttcttgcgaatttaccttttttattgtttcttttcgagttatccgtgtattcttccatgaaaataacacagctatattaatatttaatgataatatttaa

SEQ ID NO: 15386 - DNA, 134 bp, Glycine max
  Clone ID: PAT_MRT3847_11389C.1
gaaaaaacttgatttgctaacttttcttgtcgccatttgcatgtgctcagattttctgtaaagtctgatgaaacaataggggaaaacatgggattctatcttaatctcaaacgcaaggcgttccggcttaaacg

SEQ ID NO: 15387 - DNA, 306 bp, Glycine max
  Clone ID: PAT_MRT3847_1138C.1
tttttgtttttttttttctttttgttcattgggggggttttgtttcgtagcttttaaactttattattttgaataatctatgactaataacttactagtgcgaaccaccctgcccgatttgtttttaaaaggagaacccgggaagttatggtgttatatggactgtaacctcgaatacaatccaccacgaagaactgacgttggaaacaatcttaaaaagcggctattgtagagaatggcctaccaacactcttgtgaaccaacctgctatgtgccagaccttggaaggtgtttgtaataaacaag

SEQ ID NO: 15388 - DNA, 318 bp, Glycine max
  unsure (1)..(318): unsure at all n locations
  Clone ID: PAT_MRT3847_113900C.1
gttggtgtgagcggangaacaagaacaattaacttgtgataatggttggtcagagacaatggatatatctctctaagatgaaagagaagtgagatctaaacgctgtgaaagaggcctgataagaccagtggagtgagtggagatttgtttcgtttgatatttggatctgccactggagttatagggatgaagatggtttttaaattgtatgtaaggatgaaattgctagagacgaatatgatttggaacttagtggggtgaggataaaagaaatagcaaaattaggtttgtggcgagagaagggtattggaatatatg

SEQ ID NO: 15389 - DNA, 522 bp, Glycine max
  Clone ID: PAT_MRT3847_113901C.1
attggggaggggcaaccacaagtttttatttaaaaaaaaaacaacaaagtccccaaattattatttcacaatttttttaaattctaaaaaacaaggttaccattttttattaaaatcggcccccaacaaaaaaaccctaccctacaggggaacatggtccaaaaatccaaaagttgcatcaaaccacccctgaaggaaaaaaaggaagcttttcccaaattccgacctccataaacccattttcaggggcacaccccctaaacatgccattggaaatgaaaccataacccacttccccagcgttggacacaaaaatgaaaccagccatcccttcattaaaacgggggttgaacaaaaaaaccccggttttttaaaacttaaaccctttggattccaaaaccggtggcacctaaccccccaaggggccaaaaaaaaagggccttccttaacccgggcaaaaaacccccaaaacacttcaagcctaggtcccgggccctaaaaaggggaaaaaaccaatgcccc

SEQ ID NO: 15390 - DNA, 383 bp, Glycine max
  Clone ID: PAT_MRT3847_113902C.1
ggtttacaactacacggcgactccgccgtcgccagcctgtaagccttgggccatgtgtggtctgccaagctgccgccggcagattctccgtgtagttgtgcacatggagcggtgtgccgggctacagaaggcgctcgggcttattgcgcgagaacagaaagcgaagttaggtcatgagctagatggaaatggtaagagatgcggacaggaacaaaatggttaccatgttattcaaaagcgcattgaatctattcaaaccaaaaagattagcttcatactatctgcatttctaagcttaagttgttactctattaatgcaatcctctggatgccgagtcatacagagaggtggatagcattgcatggactagagtcaatgccag

SEQ ID NO: 15391 - DNA, 769 bp, Glycine max
  Clone ID: PAT_MRT3847_113903C.1
ctcgagccgggagttcaacccaagtcacacgttgcagctcccacaaaaccatttttgctcttatttgtatgtatattttgattatcttgatgaatctcgaattaagttttgggtgcagatgagaaatattacagctctgagatgatcaagtgcaaggatgaatcgaaatccttctccagagaccgtctgaatgacaatttctgtgactgccctgatggcactgatgagcctgggacttcggcttgccccaacggaaaattttattgcagaaacctaggtagcaagccgcagtttatagtttcttctcatgttaatgatcatttttgtgattgttgtgatggggagtgatgaatatgatggaatcatttgttgcccaaacacatgtgtgatgggtgggaatgctgagtccacgtttagcaattgcaagtcagaagcaagtcaaaatggagtgaagtcagaggaatcagttcatactggtttgaagttggtgattattctacaagtggttctggttatttttctggtatttctctggagttttcgttgccgcaccagatctagaaggagacattaccgttgaattgaaagagactttgctttttacctgacattgaatggtgttgatcagttggagttgaagtcctgaaggttatggatttagagtcacaacattgttatgagtgcagtttgcgagttcaagagtttccaaggcactgaatttaatgaatagtgaaatatggatcatccggcacaaggaacattggtgaaa

SEQ ID NO: 15392 - DNA, 2825 bp, Glycine max
  Clone ID: PAT_MRT3847_113904C.1
tacggctgcgagaagacgacagaaggggagcctcgaaaatcgaaagtgaacaccctctcatctcattcattctcccacaaagacatggactcgcattgcctcttacgtttccgcttcgcatgttttgttctcttcgcttccgtcgcatgttgcttttcacacccttctctcctcggtatacaccctctagatgagaaatattacaactctgaggtgatcaagtgcagggatggatcaaaatccttctccagagaccgtctcaatgacaatttctgtgattgtcctgatggcactgatgagcctggaacttcagcttgccccaacggaaaattttattgcagaaacctaggtagcaagccgcagtttatagtttcttctcatgttaatgatcatttttgtgattgttgtgatgggagtgatgaatatgatggaatcatttgttgcccaaacacatgtgtcatgggtgggaatgctgagtccacgtttagcaattgcaagtcagaagcaagtcaaaatggagtgaagtcagaggaatcagttcatactggtttgaagttggtgattattctacaagtggttctggttatttttctggtatttctctggagttttcgttgccgcaccagatctagaaggagacattaccgttgaattgaaagagactttgctttttacctgacattgaatgttggatattattttatatatagtcgtggttagatcatcaatgcacctatttcttcttcatttctgtccttttatgaacgtccttcaattagtcaatgatcatcattataaaaactagagcatgctattggagcacaacagactcaacgttctggttgtatcttggaatttatcatctttttaatttgttttcattcaggaaagatacttaagaaaccatatattgcatgcagtacaacttaagatataaaacctttttccaaatatatttttaaattgactggttgttgctgtatcattgaggcatcaggattaagttgaagaatatagatataataagtttattctacaatatgatgcttccctttgaccatggcaactatttgtggtagcttaacaccttttgtttttttacacattgatgtcttattctcttaaactttcaacatataattaatggttctttagtatgctattcatgccatggatattagtttttttttttttttgttatggtagatttggcttaaaagatcattatgctataaggcaagcttagcaaacatgcttatctattacttgttgctatttaatatgaacttgactaatttaatttagagtggtgtatttcaatgttcagtatattggttctgttcatatattttacattgtaatatttaaatagttatatgtttgttattgttaaattagacataagtggctgtacatttttgtgtacatatcatatcacgacttttgttattgatgtaccaaatgagttgttactttattgtgattttataattatgtgataatttttcaccagtggtaatgttccattctttataacatgatggagaaaaaattgatattttatgtgataaatgagagggtggctgacatgggtgagttagttattggcactgctgagttcagaatgggaacaaaaggcataataggtcttgctaggcgtaggagactaggagtaaccaactgaggaagcctaaacaactcttgtaggactatgttcattagtacggaaatgagaatataagctagggaatggatgagaattgggggcactgagaattgttgtaatctcattttctaccttctgtctctttccctttttaactttcatcttctaactcatatactattgttgatgtttatctctatagtactggtaaactggttatagtgtgaatcaaataatacattactccattctgatactctactgttgttttctgtttacactgcaatcttccattacattttctcaatccctggccttatcttttcacatatttatactgtctctttagtctctaggtgccatattgatcagatctaagtatctttctgacaaacctctgcagggtttcatgtttgttatggtacaagtccagtactgaattaatttatcaacagctatgattagatcaacaatgcaccaatttcttcttcatttatgcccttttatgaaccaatgcacttcaattagtccatggtcatcattataaaacctagagcaggttactggagcacaacggactcaatgttctggttgcattccagttcctcaaatcctagtttctctcatctgcaccacgaattcaatgtctgtcacacagtcattttgtatctaatattttacttgaggtgcaatcaattggataacatcttgactgtgggacttgtaatatatctactatcatatcttcgtacagttgatcagttggagttgaagtcctgaaggttatggatttagagtcacaacattgttatgagtgcagtttgcgagttcaagagtttccaaggcactgaatttaatgaatagtgaaatatggatcatccggcacaaggaacattggtgaaattgttggcagcactacggtcaaacagggaaatatataaagctgttgagattattgatttcctggagacagttatgccctactagatttgaagattatatttagcagtgactgaatttagttgtatttggcaagtacatcaaattacaacgatagtacaataactgtggtgcactattgatacacacacccaccgggaaacaatttaagaaattaattgaaatggaaagttaatcaaatttgaagataggtttggcc

SEQ ID NO: 15393 - DNA, 1747 bp, Glycine max
  Clone ID: PAT_MRT3847_113905C.1
acgtaaagcctcggaaattcggtctcgcagttacggctgcggcccgatatttgtagagtgagagagtttgggttgtgggctgctccagcctctgtctgtggttggtcttatcttttgctgaaacttgaaattgaatctctctcaagcttcctttcttaaaaggttaggaatttgaagcagaagtaagaactaggaagagatgggagtggatttgagacaagtggtggcaggtgtcctcaccctcacaatgtttgtcatgcttggaaatatgatcaaaagagaccacttcgataattcacttcaagaaaagcttccaggaggatcggaagatgccaactttgagactgctacgtttgatgctactcatgtaagaaagaatatagggctttggaagggagatgtggatgacctaaaaccgtgttgggttaagccatcttctgatgatgtggagcagacccaaggatttgttacttttgcgttaaccaatggcccagagtaccatatttctcagatagcagacgcagtgattgttgctagaaatctgggggcaacgcttgtgatgcctgacatcagaggaagccaacctggtgacaagtggaattttgaggatatttatgatgttgatgtgttcatgaaaagcatggaaggggtggtcagagtggtaaaggatcttcctactcgtatatcaacacgaaatattgctgctgtgaaagtccctaatcgggttacagaagattacatagctgaacatgtggagccaatatacagaacaaagggaagtataagacttggaacttacttcccttcaataaacatgagaaaggcagggaaaaagggtgacactgattctgttgcatgcttagcaatgtttggaagtttagagttgcagccagaaatgcatgaagtggttgactcaatggttgaaagactaagaactttaagccgaaattcagatgggcaattcatagctgtggacttgagggttgagatgttgaataagaagggctgccaaaatagtgatattgatggggagaaaagctgctacaatgcacaagagattgcagtatttttgaggcagattggttttgacaaggataccacagtttatgtgactgaatcaaggtgggatagcagccttgattctcttaaagatttgttccctaaaacttacacaaaggaagccatcatgccggcagataagaagaaaaagtttctagattctgaatttgagaaagtgattgacttttacgtaagtgcagagagtgatgtgttcgtaccagcaatttcaggtctgttttatgcgaatgtagttggaaagagaataggttctggaaaaacacgcatactggttccagctacatctgcttctgcctccaatttcctctctccttatgtctccaacaaaaaccactttgcttattcttgttactgttagcagcagcagcaacaacaacaactttatttatttattatgctccaagacacaatctcagtttcccaaactacctgcccgttatggctttttgcttttccaggcgttcaccaaaaagggttcaccgtcaaatgtgtacagagtgctttctattcatcacattttgttgtaaaattctggttgcctcagttttttatctatcataattggtggtggtgaaactaaagataatgtatttgtttgatctccatggtataatggcatcgcatgtattggaattttctttcgtggtaaaaaggtatattttttcttggt

SEQ ID NO: 15394 - DNA, 409 bp, Glycine max
  Clone ID: PAT_MRT3847_113906C.1
ggctcgaggatataggttccctgatgggctgctgttttgctggtagtttgggcgcaactggggctgggacttggaacgttgccttgagaggctctagatcagttgggacctcctacggagccagaggcgacaataatgtaactacgatggaggcacacagaaggctgactggctttggtgaccagggtcttacgaaaattagttgggctctaggaaacgaatcgagtttaagaggaattggttggtgcaaactgccgaggctgtggcgtacacttgctctagaaacgaaaggccggccaggctgtctggagcactcatgctcaaggcggaggtcccaatgctgccccgtctactgctagtactcagaaagttaaggatgcattgacctctgtagccattggatacacat

SEQ ID NO: 15395 - DNA, 207 bp, Glycine max
  Clone ID: PAT_MRT3847_113907C.1
aattgtaaagcttttttatgcttaattagaccgatatcactgacgacgtatgcactgttaaatgccacagccccaacctcatttactttatgtaccacattttaaaggaacagtccaacatgacttacggggactcgatcacaaagcatactgcaggtactcttaagagggacgatgaccattattcaagatagccattatactact

SEQ ID NO: 15396 - DNA, 422 bp, Glycine max
  Clone ID: PAT_MRT3847_113908C.1
ggcaggatgctactatctcagatctatgaggagtggggcggtgttctttgtaagcaagaacaaagaagtttacttaatgcactagtactgctgtgatggaactccttaggaacctgctcttgaacctatgagggggtctacactgggttttagcatccattgacgcttgattatcaaaatcagtctatggggtgggggcatgcacacacgcgtttggggctgtacttatgggggggggggctaacgcgggcttaagagctgagggtgaactagataaaaagctcttagctctgagtactgataaacttattcaagctcgagaaagggagtaccacaacaaatggggtgctcgagaggcgcatcttaagagtcccacctttatcatactgctgggaactggctgggaatctaagcgtcccaca

SEQ ID NO: 15397 - DNA, 492 bp, Glycine max
  Clone ID: PAT_MRT3847_113909C.1
aatttgtacaactagtcaattgttgtatagtttggtaaaaagttgtgcagcttgtgactatcaattttttaaatgtatgaacaataaaaaaatgtaactgggcaattccatgtactctgtctagttgatgccaatgctggatgttatgagtttgattacagaattcaatgatcctaaacgcagagcagcagaggtatttgataacttagagagattaacatagctatagggaattggggatgagtataaaagaaagctatatgttgctaggtgcatggttgcaactttcaagtaaatcatggatcagtcaaaaatctatttttcttgcaattagtgtgctactgggcctcaattgtcaaattcctaggatggaaaatgttttttttttttttcagaataagacaaccactgatgcccgatggatggtgttttttgccttgatctaaatagtttgccatggcatgacttaactgtgagctattgaatatattg

SEQ ID NO: 15398 - DNA, 436 bp, Glycine max
  Clone ID: PAT_MRT3847_11390C.1
gtatctcttcggatccaatcctggcaaaatcagtatctgtggcgcattcacagctattgccggtatgtctgtctacacttaccttaatatgaggcaacaatcaaacaagccatctcctcgacaggcttccgttttgccaaaatctaaacttggcaaagaaaatggcagcacccatgatggacattatggggccgaatctgtctaactaaatgcctaactctgcattccatgcagtgttatgacacattaaccaaacattttttgttctttctcttgtttccaagattctgatctaaccatcttgggtgctcatggtgatgagtcagctataatatgatcaagaagagattttctagggtatatgagtctatattccacttggcagctataatacatgatcaagagattttctagggtatatgagtctatatcctct

SEQ ID NO: 15399 - DNA, 370 bp, Glycine max
  Clone ID: PAT_MRT3847_113910C.1
ccttcacgtgcgggtattagtcagatggcaattttatatcatgcacaggttagcggcgcacttattgaatatgcggaatgatcaaaatggtcggcactgtgggtattcctgagaatgcacgtttagcaaaggcctgtgctgtaaataggcctgacacggggggtgccaatgctgttgttaacactaaatgctcacaacactgttaattatggaatcgaggtgggacaagtgcgatgtctttgtcatttaatccaaacccgtgtgctgatgcatgaggcttggaatttttgaagatccccgcatactatcgcgatatcatgagtgtcactggatggactgacgccccaaagcatgatgtacatgttacaat

SEQ ID NO: 15400 - DNA, 367 bp, Glycine max
  Clone ID: PAT_MRT3847_113911C.1
ggcggcagagacacaaagggacagaaaaagcccaggcggacagcgaggcaggagcaccaaaagcagcaccagaggcgccagcccaacagcccagaacaaacacgcacacacaagcaagagccaaaaacacacacgacatcagaaggggacgcaaaccacaagcagagcagcgcgaccggccagcgaccagggaaaacccaaggaacaaagctagcagctccccgagcggcaagccgaccgccaggagcccacaacacaaacccagacacaagacaaacccacacagcccagcccccaaaccagagcatatgacagccaggcaagcaggcccaaccacacaaaagaggcagcgaaacacacccaagaa

SEQ ID NO: 15401 - DNA, 272 bp, Glycine max
  unsure (1)..(272): unsure at all n locations
  Clone ID: PAT_MRT3847_113912C.1
gcgattcttgttctgcnnaaggaatcctgccgtagccagaagcaggttcgagaaattcaagcgcagtgcattcctccagaanatctacccaaanaccagagtcgctcaacacttcatcggtgcgtgccaatcacacggccttctcancactgcncttgtnctcntcaccaccctcctccnccacccccacgtctannnnttcaacaccctcatcagagtnttctcccaatcccttaccccgcacaccnntctntnnnnctacacgcacatgg

SEQ ID NO: 15402 - DNA, 316 bp, Glycine max
  Clone ID: PAT_MRT3847_113913C.1
ccccgacctcgatgaatgatcactgatagattttacatgcatcatgcttggggagttatacgcatttggagaatatctaggaatgcatcgacaacaacagtgattcgcttttttgctagaaactgatgaggtgttgtagtgatgttgacaggaacaggatcaatgatcagctgtcagtgccaaaaaagtatgggtcgagtacggaatttaattagactgctacttccgtattgttgacaacattgtgcttcaggctgatatctttcaggcccagaagaatgtagagtgaccttatttgaccgcttttaagaatttt

SEQ ID NO: 15403 - DNA, 2388 bp, Glycine max
  Clone ID: PAT_MRT3847_113914C.1
aaacactctctctctctctctctctctctcgctctgtttcgagctttctttctttcttttttttctctgatgcgtttctacaataacacaacctcttaaccgttttatcttcttctttgcttgctccttttgccttccttcgtcgtcgccgagtccgaccatctccgggccgcgctgccctggcggcgttcgtgcgtctgtttcgcccgcttgagcgggtgcggccgccggccgatcccggccgggagcaaccacgaccaccccccaggcggctcccgccgcgactagtgacggctgtggcgctggcgatcaacggcaacacggcgccgtttttggcgcgcgtggcggaaacgctgtcgtattacggcgcgttgttggagtccattgaggccaccacggtggggaaagataacagcttcaacaactcagaccgagtcacactcgccgaagcaacgactcgacaaatcccgtactcggtaacgtgcctgcttcgaaccgttaaggccccgaaccactttctcccataaccatatggactttaccgttattgcagtggcaaagccaaaacctttatgccaaccaaccgcagcgttttcatgttccgctacatccccatctccgccctcaccacattactcgccccaacaacgggcccgtgcccatggacaggcccaaattttggttaccggaactcgaatttgggttttcctccaatccagaaccgggttcgtctttctcctcctgtttctgttccggttcaggttcagtcatctgaaccggaaaagaagatcatggaccacaggcttcttgaattggagaagcagcttctggaagataacgacgaaggaaggtgaagcagatgctgcgtctgggataaccacgagcgagtggtccgagtctgtcccagtccggttcagtaaccggttttgacgccgacgtcgccgacttcttccacgacgtcgtccacgtcatcttcttcctccgtggcttcgcctgcttccggatgctccaagcaaacgctcatggaagccgcatctgcaattgttgaaggtaaacacgatgttgcggcggagatcctgaaccggttgaacggtgtgaaccggagtgataggttgacggattgcatggtttcggcgttgaaatcgaggatgaatccggtggagtatcctccgccggtggcggagcttttcaggaaggagcacgccgattcgactcagatgctcttggagaactcggtgctgcttttggataactcagtgtgcttcaaggtagggttcatggcggcgaattacgcgattctggaagccgcatttgaggagaaaacggagaataacaggttctgcgtggtggattttgagattggaaagggaaagcagtatttgcacctcctcaacgcgctctcggcgcgtgaccagaacgcggtggtgaagatcgcagccgtagcagaaaaaggaggtgaggagagagtgcgggctgtgggagacatgctgagattactcgcggagaggctgaggatccggttcgagttcaaaatcgtcgcgactcagaaaatcgccgagttgactcgtgagtcgctgggatgcgatgcggacgatgttctcatggtgaacttcgcgttcaagctgaacaagattccggacgagagcgtctccccggaaaaccctcgggacgagcttcttcggcgcgtgaagagactcgcgccgcgcgtggtgacggttgtggagcaggagataaacgggaacacggcgccgtttttggcgcgcgtggcggaaacgctgtcgtattacggcgcgttgttggagtccattgaggccaccacggtggggaaagataacagcattaacaactcagaccgagtcagactcgaggagggactgagtcgaaaattgcataactcggtggcgtgcgaaggaagagatcgcgtggaacggtgcgaagtgtttggaaaatggcgcgcgcgtatgagcatggcggggtttgagttaaaaccactgagtcaaagcatggtcgagtcaattaaagcgcgactcatctctgccaacaaccgagtcaactcgggactcaccgtaaaagaagagaacggagggatttgctttggttggatgggaagaacactcacagtcgcatctgcttggcgttaacttggctcatttatttttctttcttttttctttttattttggttcggaatattattatatataatatcacattgttactatattttaacgtcatctagagataatggaaaggcaaagagaatagatttggtaaattattattattataaatatagtatgataaaagggtgaaaaaaaaaaaaaaagaaaagcccctcctcttggttctaccgaactaaaactaataaagaagtgtttggattccgag

SEQ ID NO: 15404 - DNA, 1558 bp, Glycine max
  Clone ID: PAT_MRT3847_113915C.1
cccacgcgtccgtacggctgcaaaaagacgacagatgggacaccacataactaaaacacccatactctctctttctctttcattctttgatgcctttctacaaaaacacaaccttttaactgttatttttttttttttcgtttgctccttattttcttcgccgaatcctagaatgtcatcgccggggttccctggcggcggtagtgcgtctgagtttttcgctggagcgggtgttttcggcggcagatccattccgggggccaccatgaacaaccccaacgccgccgcttccgccaccatcaacaacctccaccctctctaccgaacccaacaacaacagaaccttcccgcaatgtttctagatccttcctcgcagatcgcccaacgccaaacaccaaccttcatcggtaagcgcaccctaaccgaattccaagcctacaaccaaaccaacaacaaccccaaccacgtcctctcgaacctcctgcttcgttccgttaagccccggaccagtttataccacacctctatggactttcctgttcccgaattgcaaaaccaaaacctttattccaaccaaacgcagcgttttggtgttccgttacttcaccagcttcgtcctcagcccattaatctccccaacaacgggcccgtgcccatgacaggcccaaatttcggttaccggaactcgaatttgggttttccaccaaaccagaaccgggttcgtgtttctcctcctgtttctgttccggttcaggttcagtcatctgaaccggaaaagaagatcatggaccacaggcttcttgaattggagaagcagcttctggaagataacgacgaagaaggagaagcagatgctgcgtctgtgataaccacgagcgagtggtccgagacttatcagaatttaatcagtcccggtccggttcagaaaccggttttgacgaccacgtcgccgacttcgtcgacgacgtcgtccacgtcatcttcttcctccgtggcttcgcctgcttccggatgctccaagcaaactctcatggaagccgcatctgcaattgttgaaggaaaacacgatgttgcggcggagatcctgaaccggttgaacggtgtgaaccggagtgataggttgacggattgcatggtttcggcgttgaaatcgaggatgaatccgggggagcatcctccgccggtggcggagcttttcagaaaggagcacgccgagtcgtctcagctgcttttggagaactcggtgtgcttcaaggtagggttcatggcggcgaatctcgcgattctggaagccgcatttgaggagaaaacggagaataacaggttctgcgtggtggattttgagattggaaagggaaagcagtatttgcaccttctcaacgcgctctcggcgcgtggacagaacgcggtggtgaagatcgcggctgtggcggataacggcggcgaggagagagtgcgcgccgtgggagacatgctgagtctactcgcagagaagctgaggatcagggttcgagttcaaggatcgtcgcgactcagaaaatcaccgagttgactcgcg

SEQ ID NO: 15405 - DNA, 359 bp, Glycine max
  Clone ID: PAT_MRT3847_113916C.1
gcttggaacctttgggctgatttatgtgcttgcatggtcgtgagagatgatagaagggggtgagtgagtgagtagccctaaagagaggacccgggaccgggaaggtgagggaccgtgtcgtgctctccttctcctctccctgacctaccttctacctacaactccgtaacttaataattccagttctatatccatatacatatatactcgaatgtgcaccgctttctctacggtcctaaagtgtacttctaaagagtctaaggatccgtagaaagatttattaatcctccgtagtgtcggcctagcagtcgaggatacgccttaccggtaagtaatgaccacgggcttcgtcgacagct

SEQ ID NO: 15406 - DNA, 408 bp, Glycine max
  Clone ID: PAT_MRT3847_113917C.1
gacccacgcgtccgctcgtccttctcaatcttgtttttctatttccttcaccataatgctgcacaggcttcttgaaagtctacccaagaacaagcctgtcacacataccgttcacctcaacacctatgatctcacccaaatcaactgctatacctattgactagaccacatagtctaccattctgaggttcaagttcatggattggactatgagccttgacgcgcacaagcacaactcaaccaagatttctcactttcaacacatacactgcacctgcatcacttatacaaactcaattttcatcgccacatcagatctcgataacaaagatgcttgaccattcatcgaaaaacttcctctaaattacttcatcaacacctatcatctcatttccaacaatttccacc

SEQ ID NO: 15407 - DNA, 442 bp, Glycine max
  Clone ID: PAT_MRT3847_113918C.1
cttcatgttccgccacagaccacatctgagaccaaagcagaaatattacaccaccacacacgccatctcactcgccagaccataacacggaccaagacaggcaaagagccagacaccgggccatggccctggcactgggcttgggcatgcgctggggcgctccagaggctgcagggcaagatgaaacacaaactgatacacaagctcgtacccaaaccgacacccaaagcgacacccacagcaaccggaccagcgactgcaccggctccgacgcctggtgcggcgagtaatgctgcccaaacggcagagcaaacggcctaacagtgggtctcattaaccttcgcggccaaattgagacgccaatcgcaccaacctacacacgaacctacgacctccacgaagaccgctaagacggcaccataaaccgcaccataaactgcac

SEQ ID NO: 15408 - DNA, 351 bp, Glycine max
  Clone ID: PAT_MRT3847_113919C.1
aaaaagaacacttgttcatcgagcatttagatggatcaaacatttagagcttcaaaaaaaaaacactgtatattgggctttcctaccggcaggatattcttaaggtcggaaacaaacccgatttatttttttttccccgccctcggggctttcatctaaccggacaccaccatcccctctttttatacaaccattaaccgagctcagtgtagcgcggacaagaactccctcctataggataaagccatcgcactgcaccacaggaaaggtcaaattcacatctcatgttgggcaaaagccccctccttccccccccccccatactcaatcctcatcagcaggggggggaaa

SEQ ID NO: 15409 - DNA, 430 bp, Glycine max
  Clone ID: PAT_MRT3847_11391C.1
ggctctagtggcttatgccttattccggcttatttttgcactcggcagggaactgacggttgctctcacaatggggtcattggtcttggccattcttattgccatgagtggtcccatcctgtcaaaacgcattcttaaccaatggctgttatcagggcttgcggtcatcacctacgatgtatggaccgaatgccgtgattaacagatgatttccccgggaagagaaggaaacatgttctacccaactcatctacaccattcggagttcaagttctaaaatctcctggggtattcacccaatctaagtactattggaaaggcgttgacgcactgactgcatatacaatagagttcaatactgcttacatcctatactttacttatttgaaccccctggtgcatcatcaagctggtaagtcacaaaaatctt

SEQ ID NO: 15410 - DNA, 209 bp, Glycine max
  Clone ID: PAT_MRT3847_113920C.1
ctatatctctagcgcccgtcgactatctttatataatcatatatataacagggaaaggatacaaaataaggaagaatctctatatatataaaaataatatatctaaggtacacatagtaaatctaggtacccatcttatgataaactttccttccatatttgatcctctaataagcctataatttcctgcaattgcaataacttcttta

SEQ ID NO: 15411 - DNA, 225 bp, Glycine max
  unsure (1)..(225): unsure at all n locations
  Clone ID: PAT_MRT3847_113921C.1
tcgcgatctagataaaaatatgcaacagagtcagagacagggtgcatgatatttacaagaaaatatcttttatatatataaatgattcaatcaagttacttgatgaggattatgagtgaaaatgagaggacagtcatagaaactttatcctacattccttctattttcacttctgtcanatattcctttcaacctagctaagaaagacaagaaatcgaaactcca

SEQ ID NO: 15412 - DNA, 487 bp, Glycine max
  Clone ID: PAT_MRT3847_113922C.1
tcgtatgtttatttaattctatcttttttttacaagagaaaaaaaaaaaaaaaaaaaaaaaaaaaaaaaaaaataaaaaaaaaaaaaaaaaaaaaaaaaaaaaaaaaaaaaaaaaaaaaaaggggactgataatagaaaaaaaaaagactagttgggggggatggttcaaaaaaaacaactttattggaagcgccaaaatgaaatataactgcccttgtatggaacccacatgtcaggcaaaaaggaatatgtttcaaaatttaatagcgttaaaacggtactacatataaaaaaatggtgttaatccaaaaatgccttaatgtatggtctgttataccaaaaaagcaccctcaattgcaaatggaaaaaaccttgtaaagctaaattaaaaacgggaaccgccctttttacgcccattggggcccgttcaattgggaagaaacttagaaccggttcctttaaatttttaacctccctatttcgcca

SEQ ID NO: 15413 - DNA, 371 bp, Glycine max
  Clone ID: PAT_MRT3847_113923C.1
tctcttttttttttttttttttttattttattttatattttttttttcctcttgggctttttggtttttattatatacaacctctacgatttttacttgtatttttatttgatccctgcaacaaaaataacccttactccccctttaaacgagataaaaacggggggcccaactgggcacatcgaatcacgggggcctatgcagaaaaatactgccccaagggaggcaaacaggtaaaacagccagaaagcccatggtctggaaaacccgcgttctgtataaataaacaggccggccaaagattttttatacgcgaccactccccctatatcaaagaactcttcccaaatatgctgggatttttcacctga

SEQ ID NO: 15414 - DNA, 408 bp, Glycine max
  Clone ID: PAT_MRT3847_113924C.1
cctacttgtctcaaacgaatgacgcaagcgctgagtgcttaaccttcttcaccgtttcgtttcgccgacaacgtacgaacgaagaacaattcctcatttattcctattgcttgctaaaatatatatatagactctgttccttcattcgccttttcagtttcaacaacaaaaccatcgcaaaacatttttcattcctttgaagcatgccggggttaacgtgcaacgcttgtaacaccgaattcaaagatgacacagagcaaaagcttcatttcaaatccgagtggcatcgatacaatcttaagcgcaaggtggctggggttcctggggtgactgaagctttatctctggctagacaatttgtgcttgctcaagagaaaaaaaaactgggtgaaaactccatgctctact

SEQ ID NO: 15415 - DNA, 346 bp, Glycine max
  Clone ID: PAT_MRT3847_113925C.1
aaaaaaaataaaaaaataaaatttaaattaaaaaaaaaaaaaaaataataaaaaaaaaatgggcaaatggtattgaggatccacgtatatacacgaaggatatccagttctatgaaccgtatcatcaaactgtaaaattagtagaatgaatatgaatctgatgaattatcaactggcaaaatggtatccttagccatgaaaaacccacaggatatcaggagtcttaaagaaaattctagaatatttattgaatcatttagactgttttttacaaaaaggtacaaggacatagtcaatctaggctttgataaatgatgatcagtattatgtacaatttgttactgca

SEQ ID NO: 15416 - DNA, 311 bp, Glycine max
  unsure (1)..(311): unsure at all n locations
  Clone ID: PAT_MRT3847_113926C.1
angcncgtacgantacgtnncgctcgganttcngntcgagctttgtnncttctcaanatntgcnttgnatgtnnntccctttannangggggatagngacnagnagcgtaatctccaagtttncanctatcngtgcccttnttgtnnagagancntacatagtcnngncccanaagaanaaattgctanaacctannttgannngagatctgtcgnntctnngnttcagntcagggtcaangtgatgaatgnanagaanatggggaggagaggaagtanttggttttctactgngaagaaacnctcagccc

SEQ ID NO: 15417 - DNA, 603 bp, Glycine max
  Clone ID: PAT_MRT3847_113927C.1
gcattcaagggaagtagtatcttatttcacaatatatataagccctaacaagagctatttattacatagtattatgaaagtcggtaatcaaaggcaaatcttataagagaattaaatgaaaagatagaaactcaattctgctaatcaatcatgacttttagtcttcttcatatgtagatgagtgcatgtaccgattaatccaaatgtgagggaagccctaaccgggtaacattaacataatcctgggggcaatgagctggtaatcctgcaagaaataataagcccaaaaccctaatgaatcttagaagccatccttcttgatactcaggtccatgtttatgcacaatagtgaagctcctcacaagttcccggaaagcattcaccttcttctgtatcatcatacctttccatggccacgagaagtagttcttattcggctcttctttcactttcttgcctctatagaatctgtcataataaagacaggttccaaaatgctcaaatttcatgatatcatcatcgaagggcaaccttggaacaatatcattgcagtaaacaaacctgaaatacttaatgccataatatttcaaatttttttccatg

SEQ ID NO: 15418 - DNA, 317 bp, Glycine max
  Clone ID: PAT_MRT3847_113928C.1
aaacaaacacctctctttctctctctgcttctgcttctgcttctcgctctagggtttggagttttgacaccatgacgagggagaagcgttttgtgccataattctagtagggtttttgctcttcctccatgccaatttcattcattgcgtgcgtcacagagtgagttgcgttcactcattctgatcgacccaccttccgttttgaccctggtgcaaagtatattgatgtttcaatttcgctctgcgaagggaattcgtcgctaatttcctttgcttgctgaggcatgaggattataggcactacctcgtgttgatag

SEQ ID NO: 15419 - DNA, 471 bp, Glycine max
  Clone ID: PAT_MRT3847_113929C.1
cggcaatctgggccaaaaatttttccggggctttaaaaagcaatagcccgaaaatttcaaagataggaaaaaaccgcccccaaggttaaaaacattaaaaaccctaaattcccccaagcaatttcaaaaaaagggttcccccccccttcacaaaaagccccaaaagccccggaacagggcaggtcccccggaagggcccccgatccccggggcccgagaagaaaacccccccagaagggaccctaatggggcaaacttcaaaacaaaaccctctccttaataaccattttaaggggccttggcaccaacttcctaaaaatccttccccagggcagaaagatcttcacgggcccaaaaaaacccccccttttccataccctccccaacataccagggaacgaccgccctcttggcatacaggagggcaaattgggggccaatgcaaaaaaacacctcacccacccggggggg

SEQ ID NO: 15420 - DNA, 266 bp, Glycine max
  Clone ID: PAT_MRT3847_11392C.1
tacggctgcgagagacgacagaagggatgcacaaccgttatcagactccctcaaacttaaagctttgcttgtccacaaaaaaaaaaaaaaaaaaaaaaaaaaaaagggggcccccgactattgcccccttccccccgggatttattcccggaccggaccctgggggggtaccattttcccctatagggggccgttttaacccttggggaaaccagggcaaaaccggttcccggggtaaaattttttcccgcccaaatttccaaaaa

SEQ ID NO: 15421 - DNA, 1351 bp, Glycine max
  Clone ID: PAT_MRT3847_113930C.1
cccacgcgtcgcccactaatgtgccaagctcgagagtctaaaattcaaatcctagcttgggttaacttagatatgagttctctatttttaattttccttatccttcttgttgccgatggggtccttgtccgaggaagtataaatattacagaaataagcttcgatcaaaactatgaggttacgtggggtgataatcatgttgtctccttaaaccaagggaaagaaattcagctcacaatggataactcttcaggatccggttttggatccaagatgtcatatggctctggactattccatttgaggatcaaagtaccagataggaattctgctggagttgtcacagcttactactattcttaatgtatttgatgcagttaacttcacaaggaagaagtcatgacgagttagactttgaattcttgggcaatagagaagggaagccatatagattacaaaccaatgtgtttgtagacggccaagggaatagagagcaaagaattctccttgggttcgatcccacccgaaagaattgaagcttgtgagatatttggaggtcttaccggaaaactaaaaattctaattataatagttaaaaaaattgaaaaatcactaaccaacccaatatatgaattggcagattttatgtggataacatccctattagggtatacaagaataaaagcgatattggagtcggatacccaacaaagccaatgcaaatacaagcatctttatgggatggagatagttgggcaacaaatggtggcaaaaccaaaactgattggagctatgcaccattcagagcaagtttccaaggctttgatgttagtggttgtcaagttccaacctcaaatattagccaaaattgttcttctgataagtactggtggaatacgcagaagttttggcggttggattctgtacgacaaagacaatatgaacgtgttaaacacaagtatatgacctatggttattgtgctgataggaatcgatacccagagattcccttggagtgcctttaattaattacccaattaatttactcacatatatgcttaaaaaaattgccattttttatggaattgaattggagcttcttttgagcgattacgtggcagaggaggaggaaaaaagtgttgattcaatttgattatccgagtatcgattgctgttcttgtttagttgtttacccaaatttgatgatgtgcaatcatatttctgttaacatcttttttatattatgtaatgcttgataagtctgaaattgtttaggacaaaccgtttcttttttttagggaagtagctcaaaattgatgaactataaatttatccaattgctttgtcttat

SEQ ID NO: 15422 - DNA, 161 bp, Glycine max
  Clone ID: PAT_MRT3847_113931C.1
aacccgacacgtgttacaccacactttgctgctcttattgctatgtctttgcaccaaaactcaaaggtctgatgcttaacccaaaccgaagctccgtgggcattatttctggggagattctgaaaccagggtggtcctacttcggctcctactttttcttc

SEQ ID NO: 15423 - DNA, 326 bp, Glycine max
  Clone ID: PAT_MRT3847_113932C.1
gccctaggtgattacagcttgcataagactacataaggcgactttgatctcctattaagcaatccaattcaaactgactggaccatggagaagaaaacattgagggggatagccttggtgctacctgacttaacttcttttgtgaacatgaccatatcacaggctggagatttctctgaaaaggacgcgcccgttccaccgtacaaactgttgcgcaacgtgatgggcacatgggagccgcactgaaggggcgcttcgagggcagtggcgtgggcgtctacccaatgcgtgtgcgctacgccagccagagccctatcactaccgcc

SEQ ID NO: 15424 - DNA, 484 bp, Glycine max
  Clone ID: PAT_MRT3847_113933C.1
ggctcgagttcaagtggaactcaccattctggtgtccttgaaggatggtttggagttcactggtggactgggcgagcttttgttcttttgtttacgacacttgctgtctttgcacctttggtcagctttaagagaattgattcattgaaattcacatctgcattattcagtggactagcagttgtttttcttgtcattgctgtgggaatctcaattttcaagattataatcggaggccttgagatgcccagactcttcccgatcattacagatgtagcatcagtttttgaactgttcactgttgttcctgtgcttgtgactgcctatatctgccactacaacgttcacagcataaataatgaacttgaggactcctcacagatgcatggtgttgtacgcacttcccttgcactatgcgcttcagtgtacttactgacaagcttctttggattccttctatttggtgaaagaactcttgatgatg

SEQ ID NO: 15425 - DNA, 111 bp, Glycine max
  unsure (1)..(111): unsure at all n locations
  Clone ID: PAT_MRT3847_113934C.1
tngtttggtcatgttgntcttatnattatttgcgggaanaatngnangcggtgtggggtgcaggggcaatatcaangttattaaaccttnaccagttattcaacttacttg

SEQ ID NO: 15426 - DNA, 251 bp, Glycine max
  Clone ID: PAT_MRT3847_113935C.1
gactctcgctcagatttcttttctcttctcttcgacttttatttctctttcatttttcaatttatagtttaggattatggaggagccatcttctcttagctcggtggagaggaacgtccacatagcctctgttgtggaagccatggcggtggacactattctcgctgctgccaaatctctcatttgcttcttcattctgactggatttctgctgactgacttcatcaattcattttcccaaaatttaaccc

SEQ ID NO: 15427 - DNA, 238 bp, Glycine max
  unsure (1)..(238): unsure at all n locations
  Clone ID: PAT_MRT3847_113936C.1
cctttgtgtatgtgtgtgttggngattntnccttcttctcnttagatcngnanagttttcnggntttnaanaacaaaanaccatncctttgcagtttgccccanaagctaagggattatnaatttccctgngttttgnanagaangctnctttttgtnanaatnattattcttnttttcccagattcctaggttgnggnggcgngaaangggtcgcagattccttganaaggctcttg

SEQ ID NO: 15428 - DNA, 142 bp, Glycine max
  Clone ID: PAT_MRT3847_113937C.1
gtccggattcccggctcgacccacgcgtccggttacgctttgaaactccaccgttcatggccccatctcgcatattgttctgcgcgtccggctacataaaggagatgtagtgatactacattcctttaaaggactatgctat

SEQ ID NO: 15429 - DNA, 443 bp, Glycine max
  Clone ID: PAT_MRT3847_113938C.1
cccacgcgtccgaagaaactgcatccaagttctgtccttttcaaaaaaacaaaacttaggtgtccgattgttagatgcttttagtgcaaatatgtgatcaaaattggaattttacctaggttatgcaataaaggtggatgttagttatagaggtaaaattctaattttaattggaggataatactgattactgaaagaacttaaggtattgtgcttaggttttatttgtggtagaaagaattagttatggtagtcaatcgttgggttacagattaacagtttgagtggccttctgttttgaatttttaaatggtgaagggagcttgatattttgcacatggtgatggattaaagatttaaggattagcttttcttgcttttgtgatttggttattggattttttttaattgaaattgtcaaataaaatatcactactgaatta

SEQ ID NO: 15430 - DNA, 316 bp, Glycine max
  unsure (1)..(316): unsure at all n locations
  Clone ID: PAT_MRT3847_113939C.1
gtcttggcgtcgcctgccgcgtgcgggtggtcggggtgcggctggggctngttttctggggntcgtgcccttctctttttnntttctnctttcttctttctcccttctgtttcttttgccctctttgggcngggtctggttgctctcttcccttcttgggttctgggttccctttcttggtttggtctgtgtgtccccctgcgtgcggggtgtggggncttgtggtctggtgctgtgctgctttttgttctttagctgatgaaaaattgggccttctttcttnttgtttgtctcctgtcctgttccntttcttctg

SEQ ID NO: 15431 - DNA, 748 bp, Glycine max
  unsure (1)..(748): unsure at all n locations
  Clone ID: PAT_MRT3847_11393C.1
cttttatctagacattatcaaatatcaatctctcactgttacaagtcttgcttatgttatgctctacattttgcacactgaataggttgctagttgcaggattgtgtttctttagttttttcctcacagtttgttacttgtcccttcttcactagtattgagtctttttgtattcgacagtataagtttgttgtggtcatttccttctctcatttataatcctttaaattcagaatgggaactgtattcagtcatcttcccatatccatggcaactgagcctgctgcagatgactcaatactttcactgctaagggttttctggcccatcttggagaaattttttggctctgagcatatggaaaatggcaatttatccgtagcagcttgccgagctctttcactagctgttcgatcttcaggtcagcattttgtgacattactgcccaaggtgctggactggctttcaacaaattttgttttattccaaagtcatgaatgctatataagaactgcttccattgtcattgaagaatttggtcatctagaggagtacggacgtttatttgtcacttcatttgaaagatttactcatgcagcttctgtaatggccctaacttcctcctacatatgtgaccaagaacctgacttagtggaggcctacaccaattntgcttctacatttatccgatcctgtaataaggatgccctatcagcttgtggttctcttcttgaaatttctattcaga

SEQ ID NO: 15432 - DNA, 379 bp, Glycine max
  unsure (1)..(379): unsure at all n locations
  Clone ID: PAT_MRT3847_113940C.1
ggcaaggtgttcaggttacaattgattgggttatttcctcttaggaatggggtcccaggacctattgggttttaaatccacaaaatccttttgggcctaataggtggatggggaaactggacttttccccaaggcactttccgaagtggtaaaagaatgcctttntctatagggggaggagctggtgcaaagaatggtattcttatgaatatgccaaatgcttgtctttcaatgtggagatattttgttggggatcttcgttttgaaggttctaagatgacttcttcctacattaaatggacagtctttttctttatagcatttggaaatttggctgatgacacccatcaattttgggctttttcccacaagctggtgc

SEQ ID NO: 15433 - DNA, 691 bp, Glycine max
  unsure (1)..(691): unsure at all n locations
  Clone ID: PAT_MRT3847_113941C.1
cttgtttctagtattcaggtgcttttttaccaattggggataaaataatccgcaatttttcatttggggtatattttaaaaaattatctaaaacgggttaagttgtaacagttgttagcacctattacgactttttagttttcttatttttttaactgaaatcgtaaaaatatttacaacttcaatgtaaatataatttttttacgactttaaagtcgtattaaaaaaaaactcgtattttgttttattactttaaagttgtaaaactgtcttacttattttttaaaaatttcatgaggtatacgattttgagatcgtaacctccttttttttttaaaaacgttattttactatttgtagtttgtttttaatttgttaaccttttttttcataaatttgttttttaattttataatgttaacaattttatttttttaaaataaaaaagttaaaaaatatatatttaaatatataataaataatattaagttgatttcattagtatattttttgtgattttatttgatatgttattattttattttaatgnttaattatttaaaacatgttatatatatttttattatannntactttaaatgttttttatttaaagtttaaataatttatcaataaaaattaaaaacaacataattaatacattaatataaaacgcacaatacaaatgaaa

SEQ ID NO: 15434 - DNA, 343 bp, Glycine max
  Clone ID: PAT_MRT3847_113942C.1
tgccccgatcctcaccccaactgggagagaggatatggcgaaggaataccagcaagttatagaagaactccagaaattggtgaggcagaagagcgaactctaagccacagctgctgacaaagtggagcagataacagcttctctgggaacatcatcatctgatggcatcccatcatcagaagcctcacacattatctctgctggtatcatgcacctcgagaaggagaagtatgacgagaatgcacctttgtatggggaacttgccaaaggccagatccccaagtttatggtgttggcttgctcggactcaaagacgagcccatctcatgtgctagatttccaa

SEQ ID NO: 15435 - DNA, 573 bp, Glycine max
  Clone ID: PAT_MRT3847_113943C.1
aaaaagaaaaaaaaaatcggggaatgatttttttcagggatagaaaacccaatttgtctttggccccccccctttttttttataccctttgggggaggcaaaccatcatcctcctagtataaaggatcccccctagggggaccccaacaagggaaaaaattaacccctttttattctcttttggcggattattacggcaaaacaagtttaaagccaacaagcataaccccttgggcaactgctcagggctttaccgggttgcaatcaagggggggggattttttggggggcaagttgcccccccttttgctagggaaagctgcaggggttgcaaggttgaatccaaccaagctcaaagcaggggttttgaggcccctacaccccccttgacaattggggggggtttgggcttccttgtttaggcccccaaccccattgcaacgtgctggggggacacctcccccaggaccccttaggtcccctttgcctggagcccctgggatttgccccccgccccaaggaatttcaccttttgcccagggaattttgggtccaaaaattacccttaacccc

SEQ ID NO: 15436 - DNA, 815 bp, Glycine max
  Clone ID: PAT_MRT3847_113944C.1
tttattttttttacccccggggttttcccagtcccctcaatttgaccccccttcccatttattttattttattttcccccttatcatagtttattactttccatgcacgctttttttttctttttttcctttattaccgccccccccttttttttttttttttttttttttttttttttttttttttttttttttttttcatgctgctcaatttgtaatatatataactgaaaattaagagttaaacaataccacgattgatcaatcaggaaagggttaaacataaagataagtctatttcctcttctaagttctttccctttttccattcacattcttttttgtgcttcccccattgtcttcaacgaactttgcgaactttatcttcctgtcctatgcccaaggatttctgggcatttgcaataccttcaggatcaaagaattgtgtgaaaatgcgagtgaagaagttcaagttgcgagagacattgtatgccatgacaggaggaagaggtttcaccatagtgtcaatgctaaaaacacgctgaagaaactgaaaattgcgctggaagctgtagcgtagttcaggatcaatctcgattccgaggtcgtcgtggaggtcatggtgatgatgcttggacttggaggcagggacgtgcatggtggaagtgccatcaccctgcctcgtcactttcagctttccctctttgaaggattcttcactctcctcgcctctccacggcgccgatgacatcaattgcttcttccccttcttcgtcatgcttcttcctcatcccgcagccgtacggacgcgtggg

SEQ ID NO: 15437 - DNA, 348 bp, Glycine max
  Clone ID: PAT_MRT3847_113945C.1
gggaatccatctgctgcatctatgcacgtgctcatgtcactcgtctagttccatcatattctgacagcgtaccacattggtcacttgacttgcctttctttacagacagtcccaagtattctacaggttctaacaatcgcatggtaatcacggacgtgtctaccattgccactaatactctgcagccagacttgacagtttcacaagtaacttgaactatatcagggacatgaatgctcctcagcatgctccgcaatcccagcgttcatgagcgagcacgtttgctgacatcactcctcaggagttcagcatgaagtacttgcaaactccgaacgatctatctcaaca

SEQ ID NO: 15438 - DNA, 610 bp, Glycine max
  Clone ID: PAT_MRT3847_113946C.1
tcgtacgtctagctcgtagtccggctgcgagccggctcgagggaaaaggtcgtggggaaaaggaaagaggcatggggtgtgccagctccaagctggaagatctccccgcagtggccctgtgccgggagcggtgtggtttcctggacgaagcaattcaccagcgctatgcactcgccgccgctcacatcgcttacataaattctctcaagtcaattggtcactccttacaccttttcattcagcaagacatggattctcctccttccccctcttcctccccttctccccctcacaaactcgcccaacacctccccccctcctctccttctccctccgattccctcggctcccacctccacttccactccgactccgacgacctcccctccctccaccattcccctcaatcctcctctcctattcctatcgcttcttacttcaccggtccagatcatcaccctccccatcttcatatgaatttcatgcagaacaaggcctctcttttcattttctacgagcagatgcctttgagttcccaaaccatgtacgttggagagtcctcctcttcctccttttacccttaccagtatcccccttacccctaccccta

SEQ ID NO: 15439 - DNA, 426 bp, Glycine max
  unsure (1)..(426): unsure at all n locations
  Clone ID: PAT_MRT3847_113947C.1
nnngnnntttttgtttttttttttttttttttttttttttttgggccggattaaataggtttattttctaataattttttataaaaaaataaatacaaaattcgttaatttgttttgaactaaaaaaaaatcttaccacccaaaatgaattttttttcaaagaatttaaggtaaaattctttttataaaaaaaacagaaaattcagtttttattagcgctggaataatttagggaaaaaaaggtaacttggttaaaaatcaaaaaaaaaaactttgggggggttttaggggcccccaaccctttaaaaatgtccagcttttaccaaaaaagaaaagctccagtaaaattttttggatttggcccaccttgatttggatagatcacatttttaaacattttggggggctagctaattaactagcatc

SEQ ID NO: 15440 - DNA, 314 bp, Glycine max
  Clone ID: PAT_MRT3847_113948C.1
cactcacttcggttgacaccggagtgatcggaaagatgtctgctttctgtgctggcggtgtgtctgcccttgtgggcaatacatgaaacgggctcaaaccagcaatgggtgctgctgcagagagctaaccgtgaactgatacggaggggctggccgtcaacaccctaccgatggggttgcgattgcgtcacaccgacgaggagcgtatagagtactacctgtgctcgaagaggaaccgctattgaggctatgataggcttatctactagagctatgtctgcagatgggaacgatgatactatgatgatttgaca

SEQ ID NO: 15441 - DNA, 580 bp, Glycine max
  Clone ID: PAT_MRT3847_113949C.1
ccccttcaatctttttcctaagttcatgagttaaataaaagagattccggccttttcaacaccaccagggaagttgaacacaagtttgcaacaaagaactaaggcaaaacagccctttgaaaaatagcagactgaactccagccttccttatttacagaaaatcgccttccccacgggaagatacaaatccaagatgggcatcatgttacctgtttgggaacatgaaagtcaatgttttttaaataactttgatcttccaaaaaaaacccaacctttaaaactactatcaatttttacaagggttagatgttgggaccttgaacttgaaagtactagcttccccaaccgggaagggggcatcaaataattttccatgggcttttttgttggcataaccaggataatcatccttgaagaagggcacaatttgttgaaagaccagcccttttttttttggttttttcaccaaatcccatttgtgggatggatcaccctttttgggggttacatgaatctccccaccctttttttttattagagccttggcattggttaaaaaacccttgaggaactttttgt

SEQ ID NO: 15442 - DNA, 605 bp, Glycine max
  Clone ID: PAT_MRT3847_11394C.1
ccacgcgtccgtggcgatgttgtgcttgtcaatcgacagccaacactccataaacctagtataatggcacatatagttcgtgttctaaagggggagaaaactgtacgcatgcactacgcaaactgtagtacatataatgctgatttcgatggtgacgagattaacgttcattttccacaagatgaaatttctcgggctgaagcttacaatattgtaaatgctaacaatcaatatgtgaaacctacaagtggggatccaattagagctttgattcaggatcatattgtaagtgctgctcttcttacaaaaaaggatacttttctaagttatgaagagttcaatcaactactgtacagttctggtgtatccatggctgggctaggctcattttatggcaaacatgggcagaaagttttcatctcaaattccgagagtgaaatgtttctgtttcctccagcaatatggaagcctgagcccctgtggacaggaaaacaggttatcagtgcattgctatactatatcaccagaggttcaccaccatttactgctgagaagaatgcaaaaatcccgtctaactttttcagacttagatcaggaagggaaaa

SEQ ID NO: 15443 - DNA, 1096 bp, Glycine max
  Clone ID: PAT_MRT3847_113950C.1
aggattcattcgattatttctttccccccagccatggctcgctcattgttcctatgctcactcctcatcctcgctgtcaccaccttttcctcacccacgggtgctcttatcctgaccctagtcaacaactgcaactacaccgtgtggcccggcatccagcccaacgccggccaccccgtcctcgccggcggcggcctcaccctccgctccctcacccaccaatccatccccgtccccgacgcccactggtccggccgcgtctgggcccgcaccggctgctcctactccggcaccgccttctcctgcgccagcggcgactgcggcggccgcctccagtgcaacggcgccgggggcgccgcacccgccaccctcgcccagctcgaggtccaccacggcagcaacgactacgcctcctacggcgtcagcctcgtcgacggttttaacgtccccatgaccttcaccccgcacgagggcaaaggcgtgtgccctgtcgtgggttgccgcaacgaccttctcgccacgtgtccgcgcgtgctgcagcaccgtgtgcccgcgggtcacggacccgtggtggcttgcaagagcgggtgcgaggcttttcacacggacgaactctgttgcaggaaccacttcaacaaccctaacacgtgcaagggatctatctactcctccttcttcaagcacgcgtgccctgccacctttacatttgctcatgacaccccctccctcatgcaccagtgttcctccccgcgtgagcttaaggttatcttttgtcattaatattagggaccaactactaagctttcttgtgttaagaagccgtttgggtcattgttaagtgactcgactcttgtcttttctaataagattcgaacaaaacagaaatgtagtagtcgtgtgtctttgtaatttctttggcttagttgggtgtgttttgtgattgttagcttgaaaaaataacaaaaaaaatgtaatttttagttgtgtttcataatagagcttcaccttctcttttggtaaaaaataaataatgtttattttcctaggtcgcgacacactctagcacactcaagccactacctcgccgatactggat

SEQ ID NO: 15444 - DNA, 337 bp, Glycine max
  Clone ID: PAT_MRT3847_113951C.1
aaaccaaaaccccccaaaaaaggggttttttaaaaggccctttttttgggccatggggacccctaggggaaacattcccacccaatttaaggaaaaaaaaaggccgaaccctttaaaagggttgaataatcgggagaaaaaaatctttggttccaaaaaaaaaaaagatttttttttgtttcaacaaaacagttattttaaaccccaaaaataaaggccctggttttggaccccaaattttttgggggggaaacaatggttcccccaacctgccgggccattgagttgccattctccaaaaaggaagggggaaaaggggcttttaaagggccccctt

SEQ ID NO: 15445 - DNA, 449 bp, Glycine max
  Clone ID: PAT_MRT3847_113952C.1
gggggggccaactcaaaaatgttttttttccttaaagggcagcccccaacttaaaagaaaaaaaaaaggggacatggaaactttaaagctgatgaaaaaagcttggaacgtaaacaaaaacctttcaaagaaaattttgttccccttcaaaccataaaaaaaaatccggataaattggtggggtgaaaataaaaataaaattgggacatgcccacaactgggtaaaactaagggttttggggctgaaatttttttttagttttcacaagcaaaggtttattcgaaagccgcagttttgtctttgaaatgttcaaggggtttttcaatacctaaaaccttatggttgggcgagtctttaacttggacactcacctggcctgaaataactttctcctttccaacaaccaatttgaagttgagttgggctaactgggctttttggacctttt

SEQ ID NO: 15446 - DNA, 741 bp, Glycine max
  unsure (1)..(741): unsure at all n locations
  Clone ID: PAT_MRT3847_113953C.1
ccacgcgtccgacttaaaccccctcatgtcttccaatcatcactacacataacataacacgctcttacacccaacaataacacacacacaccaccaccaccaccaccaccaccaccaccatgctcaacgccgattccacttcgccttaccaccccacagccaaaccctccaaacccaccaccaccttcttcaaaaaaaccaatctttacaccctcctggcttttctctgcatcgtctcctacctcctcggtgcataccaaggaaccaccaccaaaacaacaataacaacaacaacaacaacaccatgccctcaaaacccaaccttaacaaccactactcacttattagacttttcatctcatcacaactccacaaacctcaatccttcaacttcgaccaccctccatttccctccttgccacgtgtcgctcagcgagtacaccccctgcgaggaccacgcgcgctccctccaatactcgcgcagaagaatggtctaccgcgagcgacactgtccgaggaacaacgaggttctgaaatgccgtgtccccgcgccgcacggctaccggaaccccttcccctggccggcgagccgcgacgtggcgtggtacgccaacgtgccccaccgcgagctcacggtggagaaggccgtccagaactggatccgctacgacggcgacaggttccacttccccggnagcggcaccatgttccccgacggagccgataagtacatcgacgaca

SEQ ID NO: 15447 - DNA, 486 bp, Glycine max
  Clone ID: PAT_MRT3847_113954C.1
ggggttaaattgactttgtaatgcatgattatagattgtcattcgtcaagttcaagtatcagcagctaggacttacaaatataaaaacaacattgcttttccaataatattctgtcagaaaatataacaccaatcaaagaaactggcatgtggacggatatcgatcatatttctaaaacatatactacgaatcgcaagatttgacataaaacgcgattcgtatgaatttgatgagaatataaagtttaatcatgattagcacttcttatataataataaggctgtaatgattataatcctaattaaataaatttctctgagtatttataaatgataaaaaaagataaaatgaattaaatttttttcatagattaaaattaacttatgcacaattaacttttttgaaaagttaattgaatctcatatgagctaattttaatctatcgaaaaagttaattcactttatctatttttttttttaaaagg

SEQ ID NO: 15448 - DNA, 544 bp, Glycine max
  Clone ID: PAT_MRT3847_113955C.1
agattaacaacttccccacacaacaggccacgcgtccgattctcactatagagcacaaaccccatttcttttctttctttttttgtcacaagtgtagcgttgcttcattgagaaactaggactagaagcaccaatggcatccaagaggaacacggttgtttttgaggactacttccctgcaatgatggagaaactgggcactgaggggttcatgaaggagctgacaaacggatttcagttgctgatggacagagagaagaaggtgataacgttcgagagcttgaagaagaactctgcattgcttgggttggaagggatgagcgatgatgagttaagatgcatgctgagagaaggtgatcttgatggtgatgacacacttgacgagatggaattctgcaccctcatgttcaggttgagtcctgctttgatgaacaattccaaggagcttttggaggaagccatttacccttttcattagtctctttttctttctatgtcctcttttcactctcactcagctccttcttcatcttgtgtgttctac

SEQ ID NO: 15449 - DNA, 933 bp, Glycine max
  unsure (1)..(933): unsure at all n locations
  Clone ID: PAT_MRT3847_113956C.1
ctaataatgaattgaagccacctcagagatctgagcttgcaagtgatgagtttggacagcggcagaataaaccccgaagatattcagagatgaattttggtcagtgaatagggtgcagcttgtttgaaatttgaaataagcagatgaaggcctttctcctggccctttgttctctagcttttgatctggagcactttgggctacaataagttttcagatttttttagttatataatgcctgctcttgctgttcaccatagtacaagttattgcagcttgatgggtggtagttgcttgtttaattgtacggtttttctagtgaagcacaggcaggcttctctagaactacggatatagaaaaaggccatagttattattgtgcagcagctgattgcatcgtgggtgaaagaaaagtttctcatgtaaagggttttgttatgcatctggtttgactatgtgcttatatcaaatctataagcatatgagacatttttaatgtattgttccttttttcttttttgttcaattattttagctaaacggttctatttccaaatttgtacacctattgtgacttgaaagactatagttagctatcatactatctaaaaaaaacaagcattatcatacaattatcatttctattgcctccatgagaaaaaagacacaaaaaaaaagataaacgacgcccaaggaaataaaaacaaaaaaaaaaaaaaaagcccnngggggggggccccctttaaaaaaaaacaattttcccaccccggtggtggagttttttattttttttttggggcacaaaaaaaaattttgctggccggctgtttaacaacggtgggggggaaaaacccgggggaaccacaatttattggcgtgcaaaaacccccttttttccggggggggggaaaaaaaaaaaaggccccccccccc

SEQ ID NO: 15450 - DNA, 902 bp, Glycine max
  unsure (1)..(902): unsure at all n locations
  Clone ID: PAT_MRT3847_113957C.1
cgtctcttcgaccctttacaaaaaaaaacactaatttttcctttacaaaaaccttcgtctgtaccagaaattgtcaatttctcatcaaccaatccatcactctttccttccattcttcatctgactatataaatgcacatacccagattaacaacttccccacaaaaaaagttcctctctttattctcactatagagcccaaactccattccttttctttcttttttagtcacaagtgtagtgttgcattgagaaattaactaagactaattaaccaattagcaccaatggcgtcgaagaagaacacggttgtttttgaggactacttccctgcaatgatggagaaactgggcactgaggggttcatgaaggagctgacaaacggatttcagttgctgatggacagagagaagaaggtgataacgtttgagagcttgaagaagaactctgcattgcttgggttggaagggatgaacgatgatgagttaaggtgcatgctgagagaaggtgaccttgatggtgatggtgctctggatgagatggagttttgcaccctcatgttcaggttgagtcctgctttgatgaacaactccaaggaacttttggaggaagccatatacccttttcattagtcctttttttatccatagaatttgcaatactgacgcgttttgctcaaccaagtaagttagatcccttgatcttttctcttttctttctatcattttctttgtcctcttttcactctcactcagctccttaatcttgtgtgttctaaggtggttttcatttcttgtttttggtttcttttttagtattttttttatgaacctgttctgtagtgtgtaattgcggatttctgcttagttggttaannnntnattcaacaatgccatnnnnca

SEQ ID NO: 15451 - DNA, 526 bp, Glycine max
  Clone ID: PAT_MRT3847_113958C.1
gtttttggaaaccatactttcttttttggccaacattcttttggggccgaatttcaattaaagattggaaatcacgaattcgagtccatcacccacctttaaaatcggtcacaatgaccaggcctggatgaatcgcgaaaacaaacaattttgaggaaagaaaatccattgaagagataccttgccccatgacacatgaaacctactgatctttaaatatgggacttcaacacccttagatccgaatttaaaaatattagatgtccataagagaaccaccttggcttacagcatcatatgcaccttgaccagcaacagctactccctgagctgaggaaacatcctgatcggatgctggctgaactttctcttcggacggagcggatcatttctcccttccaaggtcaaaagtctcaatcaactgttgcacatgttgtggatcccaaatgcggcaaggctcccccactccacccaccactattgcgcacaccaaactcctgaaattttcaccttgccaggacttcct

SEQ ID NO: 15452 - DNA, 519 bp, Glycine max
  Clone ID: PAT_MRT3847_113959C.1
catattcataaatatgtaatttgatgtaaaaattttactgataatttaaatagcatattgcatgttaaaatttgagaacaaatttcctcatccctaacattagaaacctcacattatcaagcaagaagcgcaagaaaatccacgaaagaaacctaaaaatcggttattatcgctatagatgacatgttaaaaacccagggtaacactgaacggagtataactggtgttaacttgtaaagactcgattataaaaacttataactgtacggatttaaataaaagttttcaaactataaagaattctaactaaaaaaaatatagacactcgattagttaataacactaggcctatagattaaattaaccttttaatttggtttttgggcatagtgttccttaacaatatacacactcgattattaaatagggacaagagccatgatactcaagttagggggcggataagacaaaattgctgaatttcctaatttttgttttgcctataaaaagatggacttt

SEQ ID NO: 15453 - DNA, 282 bp, Glycine max
  unsure (1)..(282): unsure at all n locations
  Clone ID: PAT_MRT3847_11395C.1
ggacttcgacagtccgtcatcagcacagaaggctgtaactgcactganatccagtggtgtgcaggcacaantggcaaagcaacaggagcaagaccctacaaatntatacatctnanacctccctctgtcaatggacgagcangagctggaggngatgctgaagcccttnggcnaggttatctccactcggatcctccganacaccantggggccagcagaggggtcggctttgcaaggatggaatccacagagaagtgtgaagccatcatcanccactttaa

SEQ ID NO: 15454 - DNA, 310 bp, Glycine max
  Clone ID: PAT_MRT3847_113960C.1
tttgcaaaacacgcgagactggaatgaatgtcttattgcatacgtcactatatccagctttaaattactattaggttatgtaaacactggagtatccgggtgcactaaaaacagaactataactactcggctcataacttatcaattttacggactgatctctactacaccacgatacaaatgttgcttatgtggatctgacgctccataaaggaaatgcgcaaaggagagaccccagaggaatgtgggctgcagcatatgagaaataaaggcgggcaacgccttacgaatgggcgagccaaccacatga

SEQ ID NO: 15455 - DNA, 1192 bp, Glycine max
  Clone ID: PAT_MRT3847_113961C.1
ccacgcgtccgctgaaccttaagaagatgacacacctgtcgactacccccagttgcattcaagcttaaggaaccgacacacctgtcggcaaccccaacactaaacaagagagagaaaaaaaaaagacacttcactccaattccaaacctgttgctgaaaccccaaaaaacttacaacattctatgtttctgttcagaggaagaaggaaaaaaaaaaagttagcgtggttttgttgagttgaaaccgattcagctcaagtcaatccaaacacacatttggagaagaaacaataagtttcatttcgattttcaattattcaatgatggtccaagagcgttcacttcccaaatcagtgaactcgaagccccacgcgcgcacggcggcactggcctccacgaagagcctcgatttctccgcgtgggtctccgacaacctcgtcaggatcgtggcagtggtgctccttgtcgccaccgtcgccgccgtgttcttcctccgcaacgccggcgacaccgccgcgctgctctgcttcgagaatcaggcgcgggagctcgagaggatcgcgtacccgcgcgtggactggtccgcgattgcgccgatcgcggaccggacctcgaagttctcgagctttcgatcggagaaatggatcgtggtgtcggtgtcgggttacccgagtgacgcgctccggcgcctcgtgaagatgaaggggtggcaggtggtggcggtcggagggtctaatacgccgtcggattggaccctcaaaggtgcgatctttttgtctttggaggaacaggtcaatttagggtttagggttgtagattaccttccatatgattcgtttgttaggaagagtgtggggtatttgttcgcgattcagcacggtgctaagaagatttttgatgctgatgatagaggggaggtgatagatggtgatttggggaagcattttgatgtggagttggtaggggaagctgctaggcaagaggttttgttgcagtatagtcatgataaccctaatcgaacagttgtgaacccttatgtgcattttgggcagcgttcggtttggcccagagggttgcccttggagaatgtgggggagattgggcatgaggagttttacactcaggtttttggagggaagcagttcattcagcaggggatttcgaacggcctgccggatgtcgattcggtgttt

SEQ ID NO: 15456 - DNA, 243 bp, Glycine max
  Clone ID: PAT_MRT3847_113962C.1
aaaaaaaaaaggcccaattttgttaaaagcaaattacgggcccctggccttttatttctggttttattgggcccccttaaaaaaaaaaaaaaagcttaagggggtttcccccttttgaaagagcttttagtttttttagccattttgggacttgcagggtttgaaccaaaattctttggtgtaaaaacaccaaccttgtcctggttgggagcgtgggcccatacggtttttacaattgggggg

SEQ ID NO: 15457 - DNA, 606 bp, Glycine max
  unsure (1)..(606): unsure at all n locations
  Clone ID: PAT_MRT3847_113963C.1
gacaacctgtcggcaaccccaacactaagcaaggctcgagaaaaacacttcactccaattccaaacctgttgctgaaaccccaaaaaaacttagcaacattctatgtttctgttcagaggaaaaaagaaaaaaaacatagcgttgttgtgttgagttgaaaccgattcagctcaagactcaggtcaatccaaatacacatttagaagtttcaattcaatttttcaactcaatgatggtccaagagcgttcacttcccaaatcagtgaacccgaagccccacacgcgaacggcggcgctggcctccacgaagagcctcgatttctccgcatgggtctccgacaacctcgtcaggatcgtggcggtgcttctcctggtggccaccgtcgccgccttgttcttcctccgcaacgtcggcgacaccgccgcgctgctctgcttcgagaaccaggcgcgggagctcgagaggatcgcgtacccgcgcgtggactggtccgctatcgcgccgatcgcagacaagacctcgaagttctcgagcttncggtcggagaaatggatcgtggtgtcggtgtcgggttacccgagcgaggcgctcncgcgccttgtga

SEQ ID NO: 15458 - DNA, 243 bp, Glycine max
  unsure (1)..(243): unsure at all n locations
  Clone ID: PAT_MRT3847_113964C.1
ctcgagncncttcggctcgagctttcgtcgcaaaagggtcacaacattaaggggactatggtcggttatgagaagaactgtgtattctatgaacagcatcagtagtgttggagggatcgttgtacaaggcttaggattcatagggagtgcagtcgatgcgattagttttgcagggagcaaaatgtgcatccagttgattagtggtaccaaggctgatggtgggacaggagaaattggaaagag

SEQ ID NO: 15459 - DNA, 393 bp, Glycine max
  Clone ID: PAT_MRT3847_113965C.1
attattattattactactattataatttagacgcagaaaatgaataaacttatcttcacttttttaattctttatatatacaacgcagcacccctaaatctaacaccgctcttctatactatcctaagcttcacagcataattaacaaaaacactcaacatactgtacattatatcctccaaaaagtacctaacaagactcttattgtcctacattccaagatcaatcaatatcttccaaaaaaatacaccaaacacaaccacttatctactatctaacattgcctgaaacaaacaaaaaactaaattctaaaaaatctacctatatttatatatagttttataccacacccacctacaagcttttatattcttcatttccttttatcaaaaa

SEQ ID NO: 15460 - DNA, 330 bp, Glycine max
  unsure (1)..(330): unsure at all n locations
  Clone ID: PAT_MRT3847_113966C.1
ttgtcgctgtggtgaaagtcttttttaattttttttgataacaaaggccatgctcctcctcaatttattgggggagcacatatttattaccataattaccaattgtgtgataaaaggacaatcaaattaaaaaaaaaaaagcgcctttgagaaaggagtccttaaaaggctgtttttcnatttaccgcataaagggcaagaaaaaatttatctcagaaaggagatcagggacaaaaaattttaatatccatccccgaaaagagccccctgttgtgtggatttgaggaattttttttgcaaaaggaccacaactgcaatagggagtccaat

SEQ ID NO: 15461 - DNA, 367 bp, Glycine max
  Clone ID: PAT_MRT3847_113967C.1
atttcaattttaacacagattaatttgggtttggctatcgatacagttgtcagtttttaaaaagtgtaaccgacagaaatgcatatatctaaacaagtgaaaatcgtaaaatgcatgtgatacatacattcatgcagatacacatttttatgtatgtctatttatttgtttctccttgccatatatattaatggatagatagtctgattgctttggctacattgtcttttctatgtttctttgcttttttttgatggggaatatttcttctgtcttttctacattgttttttaatgaagttattagaaatacgaagaaatatcagcgcataaggatggaagataatgaatcctcagacccgataagg

SEQ ID NO: 15462 - DNA, 223 bp, Glycine max
  Clone ID: PAT_MRT3847_113968C.1
gtagagaggaatgttgcctaccagccttggatctggacagctggaaatcatgagatagattttgccccagaacttggtgaaacgaagccattcaagccatacagctataggtaccccacaccttataaggcttccggtagcacggcacctttctggtattctgtcaaaagagcatctgcttatattattgtcttggcatcatattcatcatatggaaagtata

SEQ ID NO: 15463 - DNA, 1055 bp, Glycine max
  Clone ID: PAT_MRT3847_113969C.1
ctgagggtccgaggaaacagaggatagatcttctttcccactgaggaaacagaggatagcgtcatagcagcaatggcttctgcaagagaacaaatttattttctggcaatcgtccttctattctctcattcgaaactaatgttatcaaatgctgctataacaggggaaccaattcccgctgaatggccccatcagttccacgcgttgatgttcatgaaccaaagcggaactcttcagaaactggacttgtggtacgactggcccaacggccgcaacttcaacataattcagaatcagctcgaccacctcgtaacatacgacctcgaatggaacaacggcacctccttcgtctacactctcgacccctccgaacccacgtgccaagtcctgcacgtggaagtgggcattctccgccccaattggctccacggtgcaacctatttgggtcagcaacatgttggtaatttcctctgcaacgtgtgggagaaagttgatttcattgtctactacgaggatgtcctcactcgtaggcctgttaagtgggtcttctacacaggatacactgctcacgtgatgacatttgaggttggtgcagtgcttgaggatccaaattggcaggctcctgtgtattgttttagtgagaatgggaaggaaaacaatagccccattttaagacatgctgttcctggtggttctcttgggagtttgatgagagggataactgtttgggaaactatgtaattatgaaatagatagtggcaatggcatatgcactatgttcgataattttgatgcactagaggtgctcatgcatcattgtgttggaaataaactgtgatagtctttggaacttatgccagaccaagcatttagaaattttgttgaatttgttctgttgtagagtgggaagtatagaatgttttgttgcttttaacagcttgaatccggtaagagaagcttaattggttggtctaatatttaagcggtagagaggcttgtgcgtaatttagaagatattgttgaaagttaattagtttaaaaaaaaaaaaaaaaaa

SEQ ID NO: 15464 - DNA, 253 bp, Glycine max
  Clone ID: PAT_MRT3847_11396C.1
agaaaaagttgtttaaaagagagcaggaagaggcgcttcctcaggaagaggaagaggaggaagaagaagaggaggaggaggaggaatctgaatccaaaactgactccaataagaatatactggaatggctattgtgaaacctgtgtttgttcccaaatcccaaagaaataccattgcggaacgtgaaccttttgaggcttaagaacttgcttttgaggataaaaggaaaagggaattggaggaaccgaggatt

SEQ ID NO: 15465 - DNA, 507 bp, Glycine max
  unsure (1)..(507): unsure at all n locations
  Clone ID: PAT_MRT3847_113970C.1
aagaaggacaaactatcttgaatttgaataaggatattaaacattgctttgctgaaaatgttgcagtcacttctcatttcaccttaccttacagccaaacatggaacatcacattcaacgtactattctctaaactagttctacactgattcgtctatacagaaacagcaaacatggacatggaggcatatttccctcatatatgccttaaaaacttggctgttcacacatcattacttggtagacaacatccttgatatgggcaaattttttaacaaaagagtcccttaattttatttaagggagaaccaaacactatcttcattgatcttctcgnaatggagggcaatccttcaccattaaaatctccccctataacttatgggggacttgctccaactttggcccctcttgccctgcgtgccctactgaaaccccagggcccagatagggaacatacaccacaatttgatcgggtgaaaggataaggagggtcaaccggggctt

SEQ ID NO: 15466 - DNA, 612 bp, Glycine max
  Clone ID: PAT_MRT3847_113971C.1
ggcaccaattggcatggaaagccccccgtttttttatcatttgaaaaacaaacaaacctttccccccaggggaacagggaaaatttcgatttaccgcccaccctccgggtcaaatccccttcaaatttaaataaatcccaaaaaatcaatttgcccccccgtttactgaactatagcccccctaaaacataggaagcaagaattccccttcccttcctagggggggtctttattataaaaatccccctttttgctgggggtggggggcatttaaaaaacaggccggtcttttaactgtcccgcataattggaagcccccttccatttaacttttaattttaccattatgggaaacccaaggaatttttgaaatgaacaaaaagccctgcaacccttttaaaagtcttgatgggggcgggaccccgggatgggatctccggggctcaaccccgtgggatgctgatttcaggggattggcttttaaagccttttccatttcacctttacctgatttaataggggcgggcgcaaggttccctttactttgttttgaagagggggcccctttagggggaagaaccccccccgaagttgcccgcgttgaaaacaaaa

SEQ ID NO: 15467 - DNA, 311 bp, Glycine max
  Clone ID: PAT_MRT3847_113972C.1
cttactcaaaatataatcttttggaatgaatttatcccttattggggggccacccttttaaacggcaatggaagacctttgggtaacggagaaaaaaaccccccccatttcagaaactcaattcagggggggtaaaaactaaaaacggggggtaaagtcatttacaattggacaaaaaaggtgctaaaaattaaaattccccccccccccaggaaggatttaaatcgcgaaaaaaacataaggggaggttgggtattttcaagcccccacatgtgggccacaaaggaaaaaaccaacccccggtagaaaaa

SEQ ID NO: 15468 - DNA, 501 bp, Glycine max
  Clone ID: PAT_MRT3847_113973C.1
caaggaggtgctgatatggcaggtagaaaacctaaattaaacgctacaaaacaagggcatagaactaaagaagaattagagcaatctgagtataaagaaaacggcttacaaaagtttgaaaagattaatgtcgattctgtacccgacggtttaaccgaaaatgctgctaaagaatggttgagaattgtaccattactcgaacaattaccgatagctgatttagattactcgcttatcaagaaatactgcgaagtattagatcaaaatgatactttatatcgctcaataagtcagaaagatggcattgaaggtatggttgacccagaaactaatcgtaaaactggcgctttcatggcgtatatggaatcgttgaaagagttacgttctatttgtggccaattaggaatgactattgattcacgtatgcgattggttgtaccgactgaaagcgaagttaaacaatctgtgtacgatgaatttggtgttgatgacgatgactaa

SEQ ID NO: 15469 - DNA, 269 bp, Glycine max
  Clone ID: PAT_MRT3847_113974C.1
tttttaaagctacatgtgatattggaacctttttgcatgtgaaaacattgcaaaaacatttatgaaagcactacaacaaggaagacttgcaatcaacttggttcaccagccgcttctattgaaacaccaaacttagtttataaggttacacaaaaagtgttacatgctatgaccaattaaattacacttttcttttagtctgcttttatgagaatattacacgttcaacagagccgttacccaccaaatggactattgttctcaatctt

SEQ ID NO: 15470 - DNA, 342 bp, Glycine max
  Clone ID: PAT_MRT3847_113975C.1
aagggtattaagacctacaagaagctttatttgaacaaatgaaaggtacattatgacaggggtcaaatgtcaaacttttatattggatcactttgcaacaagataccgataacaacgtatgagtcagggaaatataacctgtaagctcaaaagaatccagttccaacaaggaatggatgcatagcttcacatagttttgctgagggattatacaatttacttactggcgaaatattttagctaccctcacaactatataggaggggcaaaagcagaacacatttttaatagggggaacacttttaaagaggaatcagattaggatcatgatcttttggggac

SEQ ID NO: 15471 - DNA, 681 bp, Glycine max
  Clone ID: PAT_MRT3847_113976C.1
ttaaaaacttactctattatctgcaaagataaatatatatatatatatatatattaaaggaagtaccagaggtactgattacaatgttagacaccataaaaatggttcctcaagcagacagcataagtctgattgggaaccaaaactatggttagatgagtatacatgtgtgttgaaccgaaaatgtaatccctactactgcaaaaaatgatgtcggaggttactcgaccattgattaaaatgcaatgtaaaatccttctccaaattatgaagccaagtccacataaggaaaatcgcgtcttcaaacagtttgtttccatcaaatgctgcgtcggagaataagattctgtttctaagctgccaagtagaccatgttatagccaaccaccaatattgccatctccttttcctaattccttcaacctgcaaaaaggggtactgcatgaagtgatgttttgtggtcaatggagaggcacccttcaagtttatccaagacattgattcccaccatagaggttggaccttaatgcaatggataaaaagatggggatgcatcctcctccatctctctgaaaaaggggcatgatatatatccgaaatctgcacttgtctagcccgcaaatttgactttgtaggaagcctgtccctaaataacctccatgcaaaaaccgctattttact

SEQ ID NO: 15472 - DNA, 407 bp, Glycine max
  Clone ID: PAT_MRT3847_113977C.1
tgctcggtgggatggttgcttcgggaggtgatgcattcatgcttttcgtcggggtggttattggttggatgcgtatggtggttggggcgtcgaggcctatgatcgttgggctggttcgtgcgcagatggtcctagcggatagcggtctggggggttgggcggattttgtttcagtggtttctttcggtgcaactgtgagtgagttcgtcgtgatgtgtgttgtcgtgtttggttggatacttatttatggatcatgtccattgaccctgtgtgacctgagcgcgtccgggcgtcggggtggttgtttcctggagcacaaggtcttcgagattcacatgtgtgcgggtggaagcattggttggcagcagcgcggggctcgtctattctggggattgggggctacttgg

SEQ ID NO: 15473 - DNA, 378 bp, Glycine max
  Clone ID: PAT_MRT3847_113978C.1
cgggtctggatttccgggtccgaccaacccgtccggacattccagggattgatttttttttaattgttcgcagcttatttttaagccagactggaagagtttgccataattaacctttttctctcgacgcccattgggtaaagctaaaaagggcccaaagttggctgttttgaaaaaattgttccctccctaagtattcaaatgctccaactaagagtctttgaccccataaaaaaaaattcttttaaaggaaagtgtccccccaattgtgccaaataatctttaaaagcttcctttaaattgcaccattgtactgggacccctttattgggttttggtggccacaaacttaataaattcttgaatccaaattaattt

SEQ ID NO: 15474 - DNA, 152 bp, Glycine max
  unsure (1)..(152): unsure at all n locations
  Clone ID: PAT_MRT3847_113979C.1
ggggggttcatcattttacactcaggattaatggtcattagcaaccgtgataaacctccttggccaaaaatggcaccctagggttctagaccccacgcaaaagtcgatttattgcctcgnaagcgatcatatggggggagggctttaatctt

SEQ ID NO: 15475 - DNA, 977 bp, Glycine max
  Clone ID: PAT_MRT3847_11397C.1
ggaaattgacaatgtggatgcttcagttggaaatcaaggtaattccgcaatgtacattgtgtcaatataaattatatgcaagtgccatatttgggcgacggaaggggagggaaggaaggtaaggtaaggggggggggggggggtaagaaaatttttgtacgtttgaaatggcctgtttgttcatcattgaagtctgctttaatatgcccttctattattgttctgctgatacctgatcggctgcattataattatattccctcttgcattaatgttatactgagaggtgacttgctgcattgtctaccctaaacagaggctggttgtttattacctagtttgccttcagatgctacatttgacagtatttctgggatcagcttcctttgtgatctaaatgataatattccagctccttggccttctacatctcaactgacttcttcatcatgcaataaatctatcaacatccctgctcttcctgcagcagcatcaagtcaaagttgcctttacagccatgacattctgttctctgtgcttgttgctttgttgtttctcttgatgacgaccatgtaatcatatgagggtttccttgttaaatgaagctttcctagttcttcaacaaggatagtttttgcacgtgtagtatggcaaaggttaattaattgcgaccggttctatgagaaagaaatgtcagttggaggtgatgtccaatttgtttcggatcttattgattcatgattcttcttgtgtgcttgtgtaataaattttttgtatatagaaaatctagaaaccgtaggttatacaggaacttattgagattgatatgtaaacctggattgcagtcgaagaaggttttgtaatcatacatttgaagtagtataggaatttccagtgctaaaaatgttctttatcttcaaaatagaatcttctaccatcatcatcttgccccctcttaagtgtttaaggtctgtccc

SEQ ID NO: 15476 - DNA, 296 bp, Glycine max
  unsure (1)..(296): unsure at all n locations
  Clone ID: PAT_MRT3847_113980C.1
nntcaatncagctcgangcagcanangnaggancngcattannnatgcagatcttcgntanaannctaacggggaagaccataaccctcgangtcganagcagcgacaccattgacaatgtcaaggctaagantcaagacaaggaaggcatccctccggatcagcagcgtnngagttnngccgganagcaactngaaganggaaggaccttggccgatnacnacatccagaaggnntcnnccttcaccttgtnctcaggctncgtggtggcatcatcgagccttccctcatggctt

SEQ ID NO: 15477 - DNA, 291 bp, Glycine max
  Clone ID: PAT_MRT3847_113981C.1
gtctgggatactgcacgatcacgggacaggtgaggaaaaatatgaggaactgtgaagttcatctcaagttagaagagaagagacaacatacattgcatgaggaggaggaagctcggaaacgtgaagatgctgaaaggaaaaagaaggaagaagaggaaccgcttgccgaaatcggaagagatagctgcaaagcaaaggcagagagaaagggaactcgacaaaaaagagaaacaaaggagagaagcattgttgggtagagatgctgctgaaccagcttctactgcccgtaca

SEQ ID NO: 15478 - DNA, 409 bp, Glycine max
  Clone ID: PAT_MRT3847_113982C.1
aaaaaaaattcaatcaggactgtttttctttagaagaaacacttggagcgcccgactaataaccaaaaagaccctatgggacacatcaactcacacataaagctacagccgcaaaaaatcactaataatggatataaggcccacccccttatacgagcctttttgtttttatcccctaagatggaccgttcaaaagcaaaaaaaaaacatgcgcctgaaaccgcttccgcgagaactacgtaagttagatatactcttcaaaagaagatactaaggagcaaaagccaaatctttgtgaacctcccgagaaggaaaaagggcaactccttatctctcctcccaagttccatggataatttgaaggtccaacgccttatatgaccccttccagggaagaagaaacacttgc

SEQ ID NO: 15479 - DNA, 1136 bp, Glycine max
  unsure (1)..(1136): unsure at all n locations
  Clone ID: PAT_MRT3847_113983C.1
cccacgcgtccgcaaaaagttccctctctctctctttcacactctcacttttttctgtgcttctcttctctctctcctttcaccctcttggaataatagagtagggagaaaaaaaagggtctcaaagatgagaccaaaagacgggtttttcattaaaggtccctataagggagggttttttctcatgcatgtggctagcagcaacagcaatgcaaggtggccatgagcatgaccatggtcaacgaccctttgaggagaattgggaggtgtgaccaaaaaaaagaatccattagtggctctgaaattggagctgacaattctcctgcagagagcagcttctcattctaatctggtgctatcctatctgagctttttactactactatctttcttcatctaatttctaccacactttctttgtttttcccctggagtcttcttgaccttgtaagaccttttcttgaccttgtaagacctcacaccctatcccttctctttatttttgcttttggggaagaccctatatcttccccaaaatctatcattcactgacgttctagctctcactttttctgtgcttctcgtcaccacctttcaccctcttgcattccttgattagggagaaaaaaaagggtctcaaagatgagaccaaaagacgggtttttcattaaaggtccctataagggagggttttttctcatgcatgtggctagcagcagcagcaagtgcaaggtggccatgagcatgaccatggtcaacgaccctttgaggagaattgggaggtgtgaccaaaaaaaaggagccattagtggctctgaaattggagctgacaattctcctgcagcaggagcagcttcttcattctaatctggtgctatcctatctgagctttttactactactactaccctttctttcttcatctaatttctaccacacttttctctttgtttttcccttggagtcttcttcttgaccttgtaagaccttttcttgacaatgcaacctatatgatatttcttcttctctttgttatttcgcttgtggaagcttcaagaaactaatncangaccttatcttaataccctgaccttagaacctctctcaatgggggcttgtcaaatgtgcaaagcatt

SEQ ID NO: 15480 - DNA, 670 bp, Glycine max
  unsure (1)..(670): unsure at all n locations
  Clone ID: PAT_MRT3847_113984C.1
actaaatgggttgggcataagcccctaacccaagaaatggactatatagaaatcaacatagaatcactcatgaacacttcctctgtcacagcattagcaaaagaagggagtgattaaacaattatcatttctcccaatatggccaaaggtgcagcttctgaaacttcgcttcactttccaacaaagaagcgatgttgtgaccctcaaattgcatacaatcataaataagcatcatggcacggagactatcaatagcaacatgcaaatgttccattttagcctncagctgccatttggaggtcatacataataccccaaagcttagcttcaagcacactacagaaatccaatctcctaagagatctcaaaacacaccacaagaagccaccatagcttcactagacatagccccatcacagttaagagtaacactcccatgcctctntgtttgtactagcacagtacatatcagagaccccatccatttttaaactaagttgaactattttgctattataaaaattatgggacaagtgccttaatattaacaatgtggctagcatttgttatcatattttgttggaaaagtgtatttcatttctccttcaccanaggtggggtcaagtacaacaccaaaaacactactccaaaccattccttccacaatttt

SEQ ID NO: 15481 - DNA, 589 bp, Glycine max
  unsure (1)..(589): unsure at all n locations
  Clone ID: PAT_MRT3847_113985C.1
gacaacacaaaagcccccgaaaaatgttcctaaagtatgcacaaaaggatatacgacatagagtgaagctcgtgcccaattcctaaatttgtcagttaatcatagattaaaggcccgtttgattccgttatgtgtctatcctttctctccagaagcacatacgatctaacttcactttctggaatctcaagtagtttgaaggtcgaccagcaaagaatattaaccgattccattggtggacaagggtattcataaccacacaattggctgttctcaccgtcataaacatgggatcatcatgttcgagatccactcctttaaagtcggcatccatgaaagggcccaagagtagcaaggcaattatctccctctctgtaacccttctactctaaggtcttcttctcttcaagtatttgattgctcagccctcctcccatgtgagatacctggccccttccccggccacggcctccgcctcttccccttccacggccccggccacgtggtggacgcggaccacccatacccaccatacccatagcaaccacctggctnnnnnnnntagcntggnnctnncnntcgtccccga

SEQ ID NO: 15482 - DNA, 383 bp, Glycine max
  Clone ID: PAT_MRT3847_113986C.1
ttttaccaggagccttaacaaaggatggattgaggcatgtacagttcccaagcctcaaaatatacagaagcagaaattgcattgaacaacccttcaagggctgagtgttagattttcctggagttataacgccctgctgtgaagactacacctcaacctggtgattattattctcctcggccactcacacatgatcaacataagagacctgggattcctggggtgaatcatatgtcactcactcaagacattgcaactatagacatgtatgacttgggatcgacatatgaaagcccaaaacccccaggcttttccggatgggaaggtatctcaaaaaataatgctggaagataacaagtgccttgatagcctttattccctgg

SEQ ID NO: 15483 - DNA, 212 bp, Glycine max
  Clone ID: PAT_MRT3847_113987C.1
ccaaagaggaatgaggcatgtagaaagtacaagagcatatacaactagatggggggccccctgtctctggggttggagaccgccggttttatccgtggtggtctcgagggggaggaacagttttcccccaaggagggcggtataagcctggggggaataggggggcaagtgtcttcccgtgtgaaattggtctccccccagtgttccaaaaa

SEQ ID NO: 15484 - DNA, 698 bp, Glycine max
  Clone ID: PAT_MRT3847_113988C.1
ggaaagcgatcacgcaccgtgatagcattcaatgccctataatccacgcaaaatcgccatattccgtcgcatttcttgactaataaaattggtgacgagaagggacttgagctgtgttgtatgtgaccattgtgaagcatcttctttttataatatatggttggatctgagtgttttctaaataatttttaggtcatcaccacgagaatgtcctgtatagagatttggtgattttggttatcaattttgtgaatatggttagctaaatttgaaagaacttttattgtgtttaatgaaattaaaccggcattttacatatgatgtgacttcaaagttgaaaactaagtttttgggaaactctgttgatgtttaccctgttggaagaacacgtgtgacccttaagagagatggtgttgtcttagatttggtgccacctcctacaaaggttaacaacctcatatttggccgaacttggattgattcacctggggaaatgataatgacaaatttgacaactggagacaaagctgtactatattttcaaccatgtggatggtttggtgctggtcgatatgaagtggatggatatatttataattcttcagaggagcctaaaatattaatgacagggaagtggaatgagtcaatgagttatcaaccctgtgattcagaaggagagcctcttccaaacacagaat

SEQ ID NO: 15485 - DNA, 604 bp, Glycine max
  Clone ID: PAT_MRT3847_113989C.1
cttggttttttttttttttttttttttttaataggtgatgaatatttttatacaccaaattaaccgaacaaaatttgggttaaatcctaatcagaatacatttacatgactacataactaagaaaacaattataggagagaaagaatcaactatacatcaacgaccgaactaaagcctctgaagattcaatcatctcacagaattgatcagacaacccaatctattcagcaattgacaaaagaaataagaacctaaaaactttccatgcaaaaaagccacagtcgtcagaaggctaaggtagatgcttacattcatcatgttaaattccttaaagctgaggaactcatcttcaatgcttgtggattcaaaacaatgtacctagcttctccgataaaatttatagcaaaattttctcctgtcttgaatggagagatcagtaggagccgctgctgccgcccattggaggcattccaaaaggtggcatcggaggcatccccataccacccatagggggtgttgtcagtggagcatagcctcctccacccatacctggcattggtggtgcaggcaaagcaagtggtagtaactgggcatacatattct

SEQ ID NO: 15486 - DNA, 1300 bp, Glycine max
  unsure (1)..(1300): unsure at all n locations
  Clone ID: PAT_MRT3847_11398C.1
gacgtncgcatggcactgcccgtacgtaagnnctcggnannattcggcttcgagggactaggatataaattttccatttgaaaaaatttacttcatgatttaaaattacttttgttggatatgcttgttttctttattctttgtaggtttcatgacattggtttattattagggtgctacaaggtccaacaataggcagttacttttcaaattagtcctgtgtaatacatttatatgtgtgaaagtgaaacagggatttaaaggcattatagatgccttgttgaagaggaaatggctacattgttgtttatagccagtgaatccatctagttgccaaaagtatcttggttttacaaatgttagtcatttggagacttgttatatattgtatatgctatctacttatctctgaattattaacaaaatgatttttttatttatatgaagggatgcaagcctcctgttgaacgcatggacatagtaggtggttctgcagcagcaagcccatgctcatcttaccatccaagtccctgtgcttcctacaaccctagtccaggctcttcttgcttaccgagccctcgcgcatccccctttcctccaaacccaaatgctgatggcaattctctcattccatggctcaaaaacctttcatcaggatcatcatcggcatcctcttcaatgcttccgcagctgtacattccgaatggctccatcagtgctccagtcactcctccaatcagctctccatcatcccgaaagccccggatcagggttgatcttgaggatcagtctagttgcccgcaaaccaggtagcaagaagcattcacctggtgccagggcaaaaattatgcatattttttttatctgttggaatttcatgtcttttgaaacaaaatttgaacctaaatttgttctttttgcaggctactccataagtgaatagtcaatggtcccttcaacgacaagaactttgactctgtttattctgtagaaaaggctagaggagggaattaagatgagcagccagtagttgctctttacataccagaaaaaaaaagccggttattttattcttttattttctcttagggtttattggttcctaagttatatatacagccttagctaggtctcgggtggttttcaaccatttcatgtggtcaatgtcttgttaaaacttttaatactctgggaaagatcatatacatgtatggattggcttggtttgatattgaaagggaaaaattactcgatttccactgtaactgaatgatcaagaaagttatgccaattccccctg

SEQ ID NO: 15487 - DNA, 289 bp, Glycine max
  unsure (1)..(289): unsure at all n locations
  Clone ID: PAT_MRT3847_113990C.1
gtcgcatgcacgcgtacgtaagctcggaattcggctcgagccttacataatttgtaaagaaaaacaagcagacttggaaaaaaatgactaccattgtccaacaccattttagatcaacatgaaccttgtcagtgcccctggttttcctcggtctttggtggtttaactgtctccatagtaagaatgcagcactgaaaatcatctcaganganttgcaccagatcttaactttctcttactgatagagcagagaagggggaacagagtggccaaggtttgactgagcaga

SEQ ID NO: 15488 - DNA, 1358 bp, Glycine max
  unsure (1)..(1358): unsure at all n locations
  Clone ID: PAT_MRT3847_113991C.1
tcattccacttccctgtcattaatatttaggctcctcgnaaaaattataaatatatccatccacttcatatcgaccagcaccaaacccatccacatggttgaaaatatagtacagctttgtctccagttgtcaaatttgtcattatcatttccccaggtgaatcaatccaagttcggccaaatatgaggttgttaacctttgtaggaggtggcaccaaatctaagacaacaccatctctcttaagggtcacacgagttcttccaacagggtaaacatcaacagaatttcccaaaaacttagttttcaactttgaagtcacatcatatgtaaaatgctcattctcggcatgcgcagcactcattgggggatgatgactcacctgttcagcaagaaatgtaattccaccatggttaaccatttcataagtctctccaaggataggattaaaaggcttccaggttcgttggtacgcaaagtacaccgatatggcccatgatgctgtgatgattacataaagtacatcattgcataaactaactgcatgtatggatcctctgattcatctgcttgatctaacaagtaggagtactccatcaactcagcaattttctgaatcatagtcattggttcaaatataataactggtagtgtcaccattgatgttacatccgagccaatatacttctgcatcatcttccagtaaccatctctttcctcctgtttccatcttcctctctgagcttcctcctccgaatcttctttacctccctctggatttatgacttctacactaagcccgttgaccgatcggttgacagcgctggtgaacatggaagacacggcggcgaaaaaccccttactttcgttcttcttcgaggggctacccatctctgtgtgtaaagcttaaaccctaattcagaatacaatcggattcacaggtcacaaccgaaggaaattgcaaacctccaacctcgtccaaatcaaattcaaactcaaactcaaacgattgaagagacaggagtgtgggttgtgccggcgggtgggtcgcggtttaatttcattgaacacaataagagttctttcaaattaggctcaccatattcacaaaattgataaccagaatcaccaaatctctatacaggacattctcgtggtgatgacctaaaaattatttagaaaacactcagatccaaccatatattataaaaagaagatgcttcactatggtgncananaaanagctcaagtcccttctcgtcaccaattttattagtcaagaaatgcgacggaatatggcgattttgcgtgcccatagggcattgnatgctgtcncggtgagaataaaatccgagcgcaa

SEQ ID NO: 15489 - DNA, 872 bp, Glycine max
  Clone ID: PAT_MRT3847_113992C.1
ataggaaagacaactaatataacttttatttgggggaggggggattctgagctttgaatggcttaattctaaaactttcactacaagaaaattgtggaatacacaaaactagtttaaactctacactttttctaaccaagcaaaatcctagtgcctcattctacaaactatttcgttactttcctgtaatcacagatcatcttattttgtgttacaaagcatgctaaccttgcatgaatttctcaactttaaggggaataatcaaacaaatttctcccagtaggatgcttgattcatgaggaggcacaaacctctcccttttattttgtttgtttccatctcgtgtctctatgcatgccccgaatgcagcagtgacatgcaagggtggcatcacttcctgattcaacttttgaactatcttaagctccagccaccacactatgaaagcattcacaccttccatttgttctaaaagtctggtatgccacttgaacgtgatgaatactcggtcaccaacttcagaaacacggatgacttatcctctaatagtcttgaaggagtgtcgaactctgcgactagaccatcactgagcacaagaactagatcactgtcaatgacagtaggtattcgatgtgcaatggtgcaaacagtgcagtctttgaactcacttcggataatcttctggataagattatccgtggcagtatcaactgatgctgttgcttcatccagtacaagtattcttgactgctgcagcagagctcggcccagagcaacaagttgtcgctgtcctacactccaattatctccattttctagaactggtgtgtcaagctgttgtcctttctcacggataacctctccaagctgag

SEQ ID NO: 15490 - DNA, 258 bp, Glycine max
  unsure (1)..(258): unsure at all n locations
  Clone ID: PAT_MRT3847_113993C.1
gacacacagatcgngaaagcgcctttctactctcttctcttctttgttagagctgtgtcacagtcacacagatcttggctgtgcctgcgcctacggtgatagaggaaactgaagcctttgtacatgccacggtggcaatagcagcattattactcctaaatttttcatgcttatcttgtgctacacactctctctctctctgctagagcgcgcgcttaaacttgtaataggtttaaaaagagcaggcaaaaagtgaat

SEQ ID NO: 15491 - DNA, 459 bp, Glycine max
  Clone ID: PAT_MRT3847_113994C.1
tgttggtttgtggagcctggaagaagaaaagactcatctggaccctttgggccgacagcgtgaagaaaaacgggggaaggggatgaacgtgttctttttcctgaagctaaggaagcgcaatgagaggccggcccccaatgttatggaacccattatggtctggggggtatccctccagttttctttttaaagaaaatggaaaggtgccccccctgcttctataagtttttttttactttggaaaagaaaaaaaaaattgagagggaggggggcgacttttccttttttttttaagaaaatagggtggaaaaaggggggggctcttttgggtccccgaacctttaggattgggctcttatgggctcccgggagttttggaactaggaggggtgcactgttttcttccggttttttttcccgcggggggccaaagggggcccaaagaagtttttttttttt

SEQ ID NO: 15492 - DNA, 454 bp, Glycine max
  Clone ID: PAT_MRT3847_113995C.1
cccacgcgttcgattgactgaagcttgtaactagtactgtagtggaattatagagtttatccatcaattccctacgtatatagcgtagttaaaaaaaaaaaaaaaaaaaaaaaaaaaaaaaaaaaaaaaaaaaaaaaaaaaaaaaaaaaaaaaaaaaaaaaaaaaaaaatggaggaaaaaaaaaagaaaaccaaatacatgacaacgtcataccaaaaaaataaatgtaacataaagaaaaaaaaatgggggggccctttaaaagggttcaaaattgggaaaccctgggattcaccctacttaatttttttgaggcccatcaaaatttatttcgcgtggccgctttttcaaaaaggcccgaagggaaaccccttggtatccctatttaaaattgtttggaaaaatatacctttttcggaagcggggtataaaaaaaaaagccccccccggtttc

SEQ ID NO: 15493 - DNA, 684 bp, Glycine max
  Clone ID: PAT_MRT3847_113996C.1
cccccgggggcaccggccctgaatccccgggttgccacgcgcccccccacgcgtccgtacggctgcgagaagacgacagaaggggaactaagtagagaataaaatcaaatcaggagagcatgcatatgaacatgatgatgaagaaggtgtgtgggtttgcaatagtgatggtggcagtgcagcttctggtggaggtgagtcccaaggcagaggctgtgacttgtacccctgtggagctgagtccttgtttgggggcaataacttcctctcaaccaccatcaacaatttgttgccagaaggtgagggaacaaaggcaatgcctctgtggttacctcaaaaacccaagtctaaggccatatgccaattctcctggctccagaagggttgctagctcttgtggggttccctttccaacttgttaattaccttcatatcatatcatatatagtatgtaataaaccctgttggctggaaattatatatatatatatataaagaatgatatcagtcagtattgcagaataagaaaatgatcgatgctagctagctgtttaagagtgactatatgtttgttagcttgaacaagttaatatatatatgtgtgtgtgtcgaagaaattcattgaataaatttgctgtgtatttcagttcttgaaaaaaaaaaaaaaaaaaaaaaaaacaaaaa

SEQ ID NO: 15494 - DNA, 412 bp, Glycine max
  Clone ID: PAT_MRT3847_113997C.1
ggctcgagtaagcattcaaattcaacctcgactcactactatagtacagcctggtcctggtctgaagaactttggaagctgctactcttctcttctcacagctcacacccacccaaccaataaacaaaacaaactcccatgccacaagggcaaaacggtaattccacattcccacccccaaccccaacaacggaaccaaacagccaaccaaaaacctttcttctcttcttccccaatcccccattcagatccgattaagccctaaccctaatttctcccaccaacaatgggggacttcaacctggcgctggtgatcgtggcgatcgtggtgtgcgtcatcgtgttcctcttcaacgtctacctcctcgtcaactttcagcaccccgacgacgttcaccaggcctacttccct

SEQ ID NO: 15495 - DNA, 262 bp, Glycine max
  Clone ID: PAT_MRT3847_113998C.1
gagaacttaaagtcttagaatggaaaaagtaaagacatatcgacttccaagttggcaagtaactcccaatgatttagtttttttccccccagtttgaattgggaagctgggggaagttaaatatgagccactgggtgtaccagtgcattaatttgggcaaggaaagtgtcataatttgatactgttctgttttccttcacagtatagagcttttggggaaggctagtattgaactgggggttggtctggcctactgggctga

SEQ ID NO: 15496 - DNA, 501 bp, Glycine max
  Clone ID: PAT_MRT3847_113999C.1
acatgttaaggatccttcataagaagctagtgagacatcagccactgaccatgagggtggacactggacagtacttcaaaaaattggtaacacagctggctgtcgagagagagcgtcttaagcagaagatatcttcactagcaagcgagaacaaaattttggtacagaagttaaagcagacatgttaaggatccttcataagaagctagtgagacatcagccactgaccatgagggtggacactggacagtacttcaaaagcaagctatcagcaataggtagtgaagttaaacccacagattctatgccagaagttaggagtgtgaggagaacagatacaggaattcaattcttgactttttacatcaattcttgttttactggtttcatctcatctgtgggtgatttttatttgtgttaagtgaatttgttgtatgtctatgtattattgctcagtagataacaggatttctttttctatttattcacaggaacttgttg

SEQ ID NO: 15497 - DNA, 856 bp, Glycine max
  Clone ID: PAT_MRT3847_11399C.1
aaacaattacttcctctcttttccggccaccaccccgcctcactcgcctagatctgctcagatcacaatcccaaacttctcaaatccgacgtcgttttacctcagcttatagaaacactaacagaaacgatttcctttcctcgataattcgcttactcgcgctctgtttctttctaattaaccttcgtgttcgcgcgtgtgtttgtttctctctttttgttgtttttggagcttctttgatttttccggcgacaagagaatgacgtccggcgcgaggcagccgacgtggaaggagcgggagaacaacaagaggcgggagaggcggaggagagctatcgcggcgaagatcttctccggcctcagaatgtacggaaactacaagctcccgaagcactgcgacaacaacgaagttctcaaggctctctgcaacgaagccggctggaccgtcgaagccgacggcaccacctatcgcaagggatgcaagcctcctgttgaacgcatggacatagtaggtggttctgcagcagcaagcccgtgctcatcttaccatccaagtccttgtgcttcctacaaccctagtccaggctcttcttgcttaccgagccctcgtgcatccccctatcctccaaaccacaatgctgatggaaattctctcattccatggctcaaaaacctttcatcaggatcatcatcagcatcctcttccaagcttccgcagctgtacattccaaacggctccatcagcgctcctgtcactcctccaatcagctctccatcgtctcgaaagccccgatcaacgctgactgggaggatctgtccactcgtccggcagcgtggggcggacctgcatacacct

SEQ ID NO: 15498 - DNA, 610 bp, Glycine max
  Clone ID: PAT_MRT3847_1139C.1
atgatttatcttctgaagtgatgcatggtcccacgcgtccgcccttgtgtccgctttcctatggcaggaccatcgtggttggtggacaaaagtagaattgcaaccaaaataaagagtgcctctggaacatgtggtaaagttatatggaaaagcaatccttccagagcttgcccaagctgtcaccatgttattgacaacagtgatgtagcacaagaatggcctggactacctattggtgttaaatttgatccatctgatcaagagataatttggcacttgcttgcaaaagttggtgctggaaattcaaaaccccaccctttcattgatgaatttattactactcttgaagtggatgatgggatttgttatactcatcctcaacatttaccaggtgtcaagcaagatggaagttcttctcactttttccatcgagtaatcaatgcgtataatactgacagtcgaaagcgtcgaacaatatgtggtcaggatcttggtgatgtccgctgtcacaagactggaaggactaaacctgtcatcttgaatgcgatccagaaaggctgtaaaaagattatggccctgtatataagcccagtgagagggagaaaatctg

SEQ ID NO: 15499 - DNA, 757 bp, Glycine max
  Clone ID: PAT_MRT3847_113C.1
tcttaagcgattacggttactaccaatttgtctctctcaatctcatgtactgtacacacaacaagctctgcctctcagagactcacaacaccatcctttctttctttctctcaattcttcacagtttctcggactctgctaaatgaccaaacacctctttctaatgaatctcaaatatgccaagtaaaggccatacaccaacattgtatggcctcggcaacagaagtagatcctttcctcgacgatggggaagaaaggagggagctggttctcgtcggtgaagaaagttttcaagtcctcttcttctaaggactcgccgctgccggagaagaagaaagagaacaacaaggaagaacagtggcagcatgtggcgccagaggaggtttctgtggagcattttcctgcagagagttctccagatcttaccaatgaagggagtgtcacgtcgtcaacaccagtgactgaagatacaaaccctgccgttgcctttgcagcagcaactgccgccgccgccgaagcggccgtggcggcagctcaagcagccgctagagttgtgaggttggcgggttatggacgccagtccaaagaagaaagagctgcaatactcattcaatcatactacagaggctaccttgctcgacgtgcattgcgtgctttgaagggattggtgaggctgcaagcgctggtgaggggacataatgtgcgaaagcaagcgcaaatgacaatgagatgcatgcctgcattggttcgagtgcag

SEQ ID NO: 15500 - DNA, 277 bp, Glycine max
  Clone ID: PAT_MRT3847_114000C.1
ggttggcttccccacctcaaagacctacaatgacattacctccattgttagcaacggtggaagattgcaatgcatgcatgtgtggccaccactgggcaagaagaaatcagagactcttttctacctaccatacctttatgatgcacaatcggcataggaagtataataccttcttaagaagggatggattccttgatgggaattccaattggaccacagtttagtgtaccatgatcactacaggttaccacgatactacgatggacgctactggacc

SEQ ID NO: 15501 - DNA, 470 bp, Glycine max
  Clone ID: PAT_MRT3847_114001C.1
ggacggcccgggccgaccgacgcgtacgcttaaaacgacgttgttttgaagggacaacacgggaacagcacgaaaaaggataacagagaagtccatttcatcatttttagcgaacatattggagttcgtatattatagtggagctgttactacggtgcaccagctatgcaagtggtttattatggaccacttttatataccgtaagattaatctcatcgacacacttacatggtgtcaacaccaattttttgtttctttctttctctgtttctccctcatccatgggttcacactttctgaggaaggaggaaacatcctgcgagcatgtcctccactggatgttccttggcagtgcaccactgtcgaacaagaacaccttgactactttaccaccattcatcgtcgtgtacgaaaggtcaaccggttggctatgacattcccaaggttgatgtttgaattcggcgccact

SEQ ID NO: 15502 - DNA, 342 bp, Glycine max
  Clone ID: PAT_MRT3847_114002C.1
aattcggctcgagctccgataagacaacacaacggagcgtgaccccaaactcacatcactgaaaaatctcacttcactttcacccgggactggcccccatcctggatacgtataaacaacaaagggatgacccagatggacgaaaccagaagcggtcaatctgaagaggatgaattccttagccattggcaacatgattgtatcagagacccctgcacggagctatactacctaaacccattgtccgctacggccgagcaccactgcaaaaatatcatcaagagatctgagacgaagatcaacaggtccctcttctcgttacacgacctaatcgctcccatc

SEQ ID NO: 15503 - DNA, 321 bp, Glycine max
  unsure (1)..(321): unsure at all n locations
  Clone ID: PAT_MRT3847_114003C.1
acgaggttgaattctattaataattgtattttatagggatattatatttgatttagagaaaacgggatatgtacaattaatggagtcattactctacttgtcctatgtttttgtgtacctgttattgctctcgggtgcagtcattactccactatatcctgcttgggaataaatgttgtggggtttactggttgtcgtcatcagtaatattgttgtaacgttggtggggtattattgtgtatcancattgggagggtggccctacttatcccatgcacgtatgtgtatcccttatggtacttcttgtacccaataataata

SEQ ID NO: 15504 - DNA, 362 bp, Glycine max
  Clone ID: PAT_MRT3847_114004C.1
gagttgaggtacattattttcttttcatgaatgaacatttgttaagccgttaggctcttgcgaacaagtgaaaagggagatcatttactattagaccaattagtgccctctaaattcagcatgttgataaaagaataaaacaacttgcactttttgtgcctgtgcattggagggtagggatcatctgcagggaaccgatctacattatatggctcttatgctgtatctgggtttctttttctttactgtttttaacataccagtgttggctatgttttccttcccctttctgcacttcttatgcacgaacatgtattttattacatttttaatcaatgattatagcatcaaattttactttt

SEQ ID NO: 15505 - DNA, 169 bp, Glycine max
  unsure (1)..(169): unsure at all n locations
  Clone ID: PAT_MRT3847_114005C.1
gtaggactgtggtatcagaattcagaatgataaacagacganttttgaaggattgctctgcttcanatccctttgtcaaagtcaatgtcacctccaaattctagcttgtcanatgacgagttcgtgacggtccacagttactggggtttccaatccttnagtacagtga

SEQ ID NO: 15506 - DNA, 403 bp, Glycine max
  Clone ID: PAT_MRT3847_114006C.1
gaatattttgggatggaactttcaaacattgatttattgtctccaaattttgctccctgcgggggagagacgaagacgttgttgggttgacttgggtctggattggatttctaatctaatctataccttgcttttgactatgctatgaacgcacaaatacttgtcccttctctcttctttcttcttcttctcctgacccttattattattccttgcccttacccttcaggcaaaggaaggaagaaagaatctctatattattatctttattgtaatctatctttgtattataatcatgactataagtattgtggatattataacttaaatatggatttctcgagtctctccaacgattcggttgttggatttaaagacaaggagaccatggttgaaccctttt

SEQ ID NO: 15507 - DNA, 626 bp, Glycine max
  Clone ID: PAT_MRT3847_114007C.1
tttttatctacacaatctttgaattcctatcattccaatgcgattcatccacagttttacaaacatagcacgctaaggataaaagtaacttcccacttaacattttgggaagtaaaaagaaaaaaccgcgtgtttcctaccgttttcatccgaggtaataatcaacaaatgaagtctagcaagacatgagagaagctaatttcattcacaagatctattaggatttaagagcaaataccatggtcttaactaggggtgggcaaaatagatagcacgctcaagaatttcacagggtagaaacatttcaagaaccttgaatattcctaaataccgcagtaatctccggttcacatcttggaaactttagtcttatccaaatttttatagatttttgctggtgtttgatagttttgaacaatgtggtcgacatgacactttaaacatctggaaaatcaataataactcacaggaaaaggttacaaaatttagggttcccgccagaagacaagagccagtgtaaacctgagctataagcaagaacaaatcaacaaaccctgatttagctcaggttctttcagcttacccgcttgatcagtatgaacacggaggttaaacaacacaagccc

SEQ ID NO: 15508 - DNA, 545 bp, Glycine max
  Clone ID: PAT_MRT3847_114008C.1
cttttttttttttttttttttttttttttttttttttttttttttttttttttttttaaaaaaaaaccatgacattcacggtagtttattaatcgaagggcatcccatacaattaatcatcttttttttttttgccaaggggagagggacatcctatagtaattatccgcatacagaatatgctgttctttttttaaagcatcttatatcctattttcatatcacactatcacctgcatacacaaataatcgcgacaaaggagtctagcatcttgtaccaagctgtataagcaaaaatgtccaaggcaggctagctctccttgtatgaccctgaaaatactacagtatttagtcgtatgaaccgaaatttacacctccgaattgggggtatcgcgggaagatgccgatgataaaaccaacatttcaaacagggaaaaataaaaggcattcaagactgctaccacccaactaaaaataaacaaattaacccaccaaattcctcaaaagtgaaaagacatttgacataccaaccataaactgggggg

SEQ ID NO: 15509 - DNA, 484 bp, Glycine max
  Clone ID: PAT_MRT3847_114009C.1
tacggctgcgagaagacgacagaagggatcccctatctcccacttcacacctcggaacgcaccgttcttatagagagaggcgctttcacatcttcttaggctggggagaggaaatgttcccattttttaggatactccggggaacagatatccagtggagatgacggggtggggcctgtagctcagaggattagagcacgtggctacgaaccgcggtgtcgggggttcgaatccctcctcgcccacaaccggccaaaaaagggaaggatttttccctctgggggtaggaaaatcatgatcgggctagcggacccaaagctatggaacttgtgagtactttgtagaaatggaatggccttaccttactgttttctgtttattaaaaaaaagattcataaatcgtggatattattaaataaatccagtatgtcctaatcttttaatccccatttttttttgttttacgcttcctcagccaggtttg

SEQ ID NO: 15510 - DNA, 949 bp, Glycine max
  Clone ID: PAT_MRT3847_11400C.1
agccttccgcccacgcgtccgacggctgcgagaagacgacagaagggggttgaacttcattgtttttggctaagcctcgaaatccagaaaaatcgtgagcgaagatgatgcacatgaccttttactggagcaggaaggtgaatctcctaatagattcatggaagaccaacgattggacggagtatctcatcactctgctcgcatgcctcgtcgttgccgccttctaccagttcctagagaatcgccgcatccgcctcaagctcatcggcgccggaaatcccttcccggcagagatcgaggccccgcttctgcgacggaagcttgccggaaaccgcgccaaggtgggcgtgaaggtagccggagcgtttctgttcgggctgagctcggcgatcgggtacttgctgatgttgtcggtgatgtccttcaacggtggggtgtttgtggccgtcgtcgtgggtcttgctgttggttacttcttcttcaggaacgagggcgaagattcccttgtcgttgatacttcgtgtgcctgtgcttaaatcttccaatttcctgtaataataataatataataggagtagtagtgcttgttaattatttttccgttcatttctagtattttccgtttttaatttagcaaacttgtttcaaggaatttgggatttgtgatttcgtatatgaaattgtaattaactgtaattgtaatcaagatagtacaatgggaactcttgattctaaagttgaatttattgtgtgattcagaggcaaaaaaaaaaaaaaagaaatcgagactagttccctttttgggggcatccccccagaccggcagcgtctcatcttcgccggaaagcaacttgaggacgggcgcaccctcgccgactacaacatccagacggaattaacccttcacctcgtccatcgtctccgcggaggcctgcacatcttcgtttag

SEQ ID NO: 15511 - DNA, 257 bp, Glycine max
  Clone ID: PAT_MRT3847_114010C.1
gttctttaacaattaacgtttcaaaagcatcttattcataatttgcatattcctagataaaatcattcttagagctccatgtaatagctttggattctgtgataactgcctctcaaccacaagcgctgattattcgattttaaactttttagcttctcataacagacttaaaagcaaagtgctggtttaacaacgataatattgaggtcacaactgatgcttgattatacatttaacatgtttaaacattcttttat

SEQ ID NO: 15512 - DNA, 1148 bp, Glycine max
  Clone ID: PAT_MRT3847_114011C.1
ctaaaacccttcgattttgtctccctgcttggatctgcagcttcctatttattccgattcgtccactttttttttttaaatttatttttttgaatttcgcgattcggttttctcagctcgaagtcaagcttctttttaatttattattctgttttggttttttgttccaataaagacaaaaatcgattgctgctgtctctgcttcttcttctttctccagggtattttttgcaatatttaaactagttaatagaagaatattatggctgtttccatgagagatttggatccagctttccagggagctggacaaaaggctggacttgaaatatggcgtattgagaattttaatccagttcctgtcccaaagtcctcttatgggaaatttttcactggagactcctatgtgatcttaaagacaactgcctcaaaaagtggtgctctgcgccatgacatccattactggcttggtaaagacaccagtcaggatgaagcgggtgctgcagctatcaagacagttgagctggatgcagctcttggaggacgtgctgttcagtatcgtgaagtacaaggccatgaaactgaaaagtttctgtcttatttcaaaccatgtattatcccacaagaaggtggagtttcttctggtttcaaacatcctgaggctgaaaaacataagacacggttgtttgtatgcagagggaaacatgttgtacatgtcaaagaggttccatttgctagagcttcactcaaccatgatgatatttttgttctggatactgaatcaaaaattttccaatttaatggttccaattcatctattcaagaaagggccaaagctttggaagttgtacagtatattaaggatacctaccatgaagggaaatgtgaggtagctgctgttgaggatggaaagttgatggctgatcctgaaactggggaattctggggtttctttgggggatttgctcctcttccacgaaaaacagccagtgatgatgataagcctactgattctcgccctccaaagctgctttgtgttgaaaagggtcaggcagaacctgttgagactgattctttgaaaagggaattactagacacaaataaatgctatattcttgattgggggtttgaagggtttggctggttgg

SEQ ID NO: 15513 - DNA, 283 bp, Glycine max
  Clone ID: PAT_MRT3847_114012C.1
cccacgcgtccgctttgctgctacatgaccattgtgctgggagaccaaactatcagagcaagttccatgcaccaaaccacagattttggctttggaagtctgaatatattggtgtatgtgaaattattaatatcattatttataaaatatatagttaaactttgttcaacaaattaaaatccttacaaagttgcaagaatgtttcaaacgacatacaaaatttaactatatattttataaataatgatattaataaaatatatagctcaattttgtatgtccg

SEQ ID NO: 15514 - DNA, 365 bp, Glycine max
  Clone ID: PAT_MRT3847_114013C.1
gttaatttgtatgacctttttattataactggggaagagtcatacatgggcattgagaccacctcatatccactatttacgccttcctccgtaacactgatcggcgcagactcccacctcctaataacttgtcttcaactccattgagcataccatctcatgggcagatatacaaaaacgcgtacacttgtaacacttctgggatcacaacctatacctgttctgattctattttatacgtgtaactttatatcaacggtactcatgaccattcctaaatggcccttacttcatataatgactgtgatacactcttatccccactcaccattgtagcataattatcttaaaccgtttttatatta

SEQ ID NO: 15515 - DNA, 117 bp, Glycine max
  Clone ID: PAT_MRT3847_114014C.1
cggctcgagattttttcattcatttgagttatccttacactaaatttctatctcctatgggaacaatacccggttaccatttatgtaccactatgattgggtatgaaaacagattaa

SEQ ID NO: 15516 - DNA, 452 bp, Glycine max
  Clone ID: PAT_MRT3847_114015C.1
aaaatctagcaatacattattacattatatagcgtaacaagtgcacttgagcacattaaagctgggtgaaaggagagcatcttacatatatgttatcccaacaaacaggaaattcatttcttacttgattgagagcccatatatctagtactagatataaatacacatatttgccaaaaaatcgacaacctaataatagatacattatacatgcatcaaactacttgaagaagcagggggttgaatttgatacttaattgccacccaaaataaagcacttaatcttgcatgattgccaaattaattaagtggcccatggtgtccttcaaaaaccttgtgatagaaagaatgatttatttatgtccgaaagaagaagacaagaaagagggctaagagctctcacagcctatctgattcttcaagagcaactggttacagttagccgggggatg

SEQ ID NO: 15517 - DNA, 358 bp, Glycine max
  unsure (1)..(358): unsure at all n locations
  Clone ID: PAT_MRT3847_114016C.1
nactcccacgcgtccggacgctcgcacaacagtgggggggtgatccaaaaagccagagtggaaaacatggcgcggatgatcacagaggtgtggtgcgcggaggcggtgctattatgcgcagagcccggtgcgtaatgggtggaggaggcggttaacccaatacgaatggtgtttcgcgtgcaagcggaggctgatccacgtgatcagcgagtgccggcatgcgttgaaacatgctaggctaatgagcaggttcggaaagagacaccatagtgaggaagagatgaaggagaggaacgagatattctagcacaatctcaggttcaaccgatcgcacaacaagaaagcgattgccctatac

SEQ ID NO: 15518 - DNA, 1021 bp, Glycine max
  unsure (1)..(1021): unsure at all n locations
  Clone ID: PAT_MRT3847_114017C.1
acggctgcgagaagacgacagaagggggaagaaaatagacggaaaaaatggcgtgcaggagcatgcttcgttcctcgattctggtggaacccttccaattgcaacctcttcattttagtaacagacccgttagggcttgtccgtttcgccgtggcaaaggagtgaccctccgttgctccagcaatgagacgccgtcgtttcaggacgatcaaggtccacctcaagaagccgtgttgaaggccatttccgaggtatctaaggcagaagggagggttggccaaactacgaacatggttattggaggcaccgtgtcggatgattctactaatgaatggctcactttggaccagaaggtgaactcatacccaactgttcggggattcactgcaataggaactggaggggaggacttcgttcaagccatggttgttgctgtggaatccgtaatccagcagcccattcctcagggacgtgtgaagcagaagttatcagcaaggggcaaatatgtatccgtaaacattggccctgtccaagttgtttccagtgaacaggtccaagctgtatataatgccatgaggagggatgacaggatgaaatattttttgtagtctgttagattttgaataaaatgcagtgttcccaagggatgaattaacacgtctgccttctagtagttaggctggttttgttatttgattaacccatgatgccattgcagtagatgtaatcatgatgcaaattggatctctttcgtattttgcgaaaatgtaattagcatgatttgttgttcccgatagttaatttaatataatcttataaccactatatttaatatatgtagntgatgggggatctatttttcataaatggtgctttgattgtagaacaatctagttttggagtgtcataacgagtggaagaaataattagagaaaatgttcagaattctttctacaaaaagttggatgtggatgccttgagacagngaaacggcctagttagttgatttagagtgcatgga

SEQ ID NO: 15519 - DNA, 585 bp, Glycine max
  Clone ID: PAT_MRT3847_114018C.1
atggttgttgctgtggaatccgtaatccagcagcccattcctcagggacgtgtgaagcagaagttatcagcaaggggcaaatatgtatctgtaaacattggccctgtccaagttgtatccagtgaacaggtctgtctgtcttgtttacttttctcttttgctaaagatggattttttcgtaaaagaacatgcaacatccatttgtgttatatatatatatatatatatatatatatatatatacactagaatgagtttccctgcaaatgattcttggtaaatatacctttgatatgcaatgttgtggtttttttcaggtccaagctgtatataatgccatgaggagggatgacaggatgaaatattttttgtagtctgttagattttgtatagaatacagtattaccaagggatgaattaatacgtatgccttcgagtggttaggctgattttgttcttttattaatccattatgtcattgcagtcagatgtaatcctgatgcaaattggatctcttccgtattttgcgaagatgtatgtaattagtatgatttgttacccatagttataacattataagcatta

SEQ ID NO: 15520 - DNA, 458 bp, Glycine max
  Clone ID: PAT_MRT3847_114019C.1
accagctgaattgtccctagcaaattgactatggctcttttgtgacgcaaggaacaaggttgttaaaactgagtgaggtgtgtggtttgtaaggagaatgaaatgacgtggagtcatttaagtgattgacacaccttcatcattacccttgaaaatatggtcagaccctcatagcggattgttttccatcaagctttctggttgtggtgtaacatgctgtgttgcactagactcacgataccaaacttaggaggtgtttgtttcacggtataattttgcattctcgggaatattatgtaattgtagaaaaattaaacaagtaaaaaagaaatatagtagaatgtagtaggaatatgtatttattgtagaaaataactttcattctcatgtagacatgggaatgtgagatacccacccctcctcatgggaacaaaatttgcttgaaacatgaagaggta

SEQ ID NO: 15521 - DNA, 3546 bp, Glycine max
  Clone ID: PAT_MRT3847_11401C.1
cttttacctagattttctctttgtattctgcaccagtttgtccactggttttccctgacacaaagcaagttgccaagggttgtgtggatgagatacgtaacaaaacagcatgctgtaatgctatggaaagctatgtgtctcacttgcaaaaacagagcctcatcacgaacttgcaagcgttggattgtgctgagactttggcaatgaaaatgaaaagatcgaatattactgcagatgtttatggtctctgtcacataagccttaaagacttttccctccaaggttaatttcttttctcttttcttattagtatgctaagctcacactcaatacccataatattttatacctgatgttaataattcttcttttctctctctcttattcaacttggtgggaaaattgacgatgtggatgcttcagttggaaatcaaggtaattccgcaatgtacattgtgtcaatataaattatatgcaagtgccatatttgggcgacggaaggggagggaaggaaggtaaggtaaggggggggggccggggctttgcaaattattcctgtgtagggcgtttatatgtgtgaaagtgaaacagggatttaaaggcattatagatgccttgttgaagaggaaatggctacattgttgtttatagccagtgaatccatctagttgccaaaagtatcttggttttacaaatgttagtcatttggagacttgttatatattgtatatgctatctacttatctctgaattattaacaaaatgatttttttatttatatgacacatgtttctacctgaacactcaagtcgggtcaatgattgtagaaatgttgtcctccggtggttagctagtaagcttgaaccttctcatgccaagaaagttcttagaggactgtctaattgcaacgtgaacaaagtttgtccactggttttccctgacacaaagcaagttgccaagggttgtgtggatgagatacgtaacaaaacagcatgctgtaatgctatggaaagctatgtgtctcacttgcaaaaacagagcttcatcacgaacttgcaagcgttggattgtgctgagactttggcaatgaaaatgaaaagatcgaatattactgcagatgtttatggtctctgtcacataagccttaaagacttttccctccaagttggaaatcaagaggctggttgtctattacctagtttgccttcagatgctacatttgacagtgtttctgggatcagcttcctctgtgatctaaatgataatattccagctccttggccttttacatctcaactgactttttcatcatgcaataaatctatcaacatccctgcttttcctgcagcagcatcaagtcaaagttgcctttacagccatgacattctgttctctgggcttgttgctttgttgtttctcttgatgccgcatgtaatcatatgagggtttccttgttaaaagaagctttcctagtttttcaacaaggatagtttttgcccgtgtagtatggcaaaggttaattaattgcgcccggttttatgaaaaaaaaatgtcagttggaggtgatgtccaatttgtttcggatcttattgattcatgattcttcttgggggcttgggtaataaattttttgtaaataaaaaatttagaacccgtaggttatccaggaacttccttccccattgtgcacagttcacacctaacacaaacccacttcctctcttttccggcggcttttccggccaccatgctcctccgcctccaccacccaacctccctcgcctagatctactcagatcacaatcccaaatctctcaaatccggcgtcgtcgttttagctcaccttatataaaaaaagcagaaaggatgtcgtttcctctataattcgcttactcgcgctgtgtgctgtgtttctttctaacattcgtgttcgcgtgtgtgcgtttctttttttgttcctttgttcttttcggagcttctttgatttttccggcgagaagaggatgacgtccgtcgcgaggcagccaacgtggaaggagcgggagaacaacaagaggcgagagaggaggaggagagccatcgcggcgaagatcttctccggcctgcgaatgtacggcaactacaagctccccaaacactgcgacaacaacgaagttctcaaggctctctgcaacgaagccggctggaccgtagaagccgatggcaccacctatcgcaagggatgcaagcctcctgttgaacgcatggacatagtaggtggttctgcagcagcaagcccgtgctcatcttaccatccaagtccttgtgcttcctacaaccctaagtccaggctcttcttgcttaccgagccctcgtgcatccccctttcctccaaacccaaatgctgatggaaattctctcattccatggctcaaaaacctttcatcaggatcatcatcagcatcctcttccaagcttccgcagctgtacattccaaacggctccatcagcgctcctgtcactcctccaatcagctctccatcgtctcgaaagccccgaatcaacgctgactgggaggatctgtccactcgtccggcagcgtggggcggacctgcatacaccttcctgccctcttcaactcctcctagccccggtcgccaggttgctgaaacagattggttttccaagatcaggattcctcaggtaggactaacaccaacttctccaaccttcagcctggtctcttccaacccatttggcttcaaggaagatgctatgggtggcagcggttcccgcatgtggacgacaccaggggcaagtggaacatgttctccagctgtagctgcaggctccgaaaacacttctgacattccaatggctgaagcagtttcagatgaatttgcctttggaagcagctcatcagttttagtgaatgcctggaaaggagagaggatccatgaagcttcttttggaacagatgatcttgagctcactcttgggagctccaagaccaggttgctccataagtgaatagtcaatggtcccttcaacaacatgaactttgactctgtttattctgtagaaaggctagaggagggaattaagatgagcagcaagtagttgctcttattacataccagaaaaaaaaaatagcagtttattttattcttttattttctcttaggttttattggttcctaagttatatatacagctttagctaggtgtcgggtggttttcaaccctttcatttggtcaatgttgttaaaacttttaatactctgggaaagatcatcatatacatgtatggattggcttggtttgatattgaaagggaaaaattactcgatttcaactgtaactgaatgatcaagaaagttatgcaaattccaactgaatgggcctattattgagattgatatgtaaacctggattgcagtcgaaaaaggttttgtaatcatacatttgaagtagtataggaatttccagtgctagaagtgttctttatcttcaaaatagaatcttctcccatcctcgaacccacaaaagataaaaaaaaaaaaaaga

SEQ ID NO: 15522 - DNA, 375 bp, Glycine max
  Clone ID: PAT_MRT3847_114020C.1
gtagctcggaattcggctcgagctattatttccagtttttttttatcatcccatgcctaccataaaatatggggggggcgtttgaattttatttgaacgaccccatcaatcctcttaataacagagatcaatccttagccgtctagcattccctgaccattagccatccagttttaaaacaactgcttagacaatgtagcccctgtccagactacatgaatagtatgatttccttttttcactatattagacccccatccccaaatccttaaccgtgaactccttataaacccctgtacgaaaaaccctctcaaacatcctttccccctacaatttatgatccttctgaacccccagcaccgtattttattggtt

SEQ ID NO: 15523 - DNA, 790 bp, Glycine max
  Clone ID: PAT_MRT3847_114021C.1
gttaactttacctaatacacaaaccccgttcctccgttcacgcactacctcagtcttctcttctcttttactaaaagaaccaacaatctctagaaccctctcagccaaaaaaaacaatgcagacccaccagaaccctcccacactggattccgacccgcagctcccgcagatcaaaatccaccacccctcctccccgcgccatcaccacccctcctccgccgccacccccacccccaccgccggcgcacgccgcaaaatcggcgtggccgtcgacctctccgacgagagcgcctacgcggtccgctgggccgtgcagcactacatccgccccggggacgccgtgatcctgctccacgtcagccctaccaacgtcctcttcggcgccgactggggctcgatcgacctctccatcaacactgaccccaactccgacgaagacgccgtcagcgccgtcaacagtaacgaccacgccaacgccggcaacagcaaacgcaagctcgaggacgacttcgacgccttcacggcgtcgaaggccgcggatctcgcgaagccgttgagagaatcgcaaattccgttcaagatccatattgtgaaggatcacgacatgaaggagaggctgtgcttggaggtggagaggcttgggttgagcgcggtgattatggggagtagagggtttggcgctgtgaggcgtggcagcgatgggaggcttgggagtgttagtgattactgcgttcatcactgtgtttgtcctgttgtggtggtgcgttatcccgatgataaggatgtggt

SEQ ID NO: 15524 - DNA, 1279 bp, Glycine max
  unsure (1)..(1279): unsure at all n locations
  Clone ID: PAT_MRT3847_114022C.1
tacacacacaaaaccggttcctctcttaaccctctgaaagccaaaagagaaaaaaaaaatgcagccccaccagaaccctcccgcactggattccgacccgcagctcccgcagatcaaaatccaccaccctgcctccccacgccaccatcacccttcctccgccggcgccgcgacccccacccccaccgccggcgcgcgtcgcaaaatcggcgtggccgtcgacctctccgacgagagcgcctacgcggtccgctgggccgtgcagcactacatccgccccggcgacgccgtgatcctgctccacgtcagcgctaccaacgtcctcttcggcgccgactggggctccatcgacctctccatcaacaccgaccccaactccgacgaggatgccgtcagcgccgtcaacaacagcaacgaccacaacagcaagcgcaagctggaggacgacttcgacgcctttacggcgtccaaggcggcggatctcgcgaaaccgttacgggaattgcagattccgttcaagatccatatcgtgaaggatcatgacatgaaggagaggctttgcttggaggtggagaggcttgggctgagtgctgttattatggggagtagaggctttggcgctgtgaggcgtggcagcgatgggaagcttgggagtgttagtgattactgcgttcatcactgtgtttgtcctgttgtggtggtgcgttatcccgatgataaggatgcggtcgcggcggccaccacggccgagcccgtggtggcggtcaaggacggagacgagggcgaggccgtcgtccagccggtgccgcataagaaagcggattagttggagccaactcatcacttcaaccctatctctgaagaatgtttctgatccgaagggattggtggaaatatggttgtagagtgctctctttctcttcctgtcaggttgtacttatagagcatttcctgcatatgaactgtggaaagattatggatgattttgtatggcttgatatgatctcggttccattaggctttggacgattgtttttggttccgaagtggtatatactctttcatttagatgtacaagtttgcctgtgactgtttttggggttattttcttcccattctgtatgttgttggaaatcggattatcatgacgagcacttgtttagctatttagataattctatagagctgtgttggtgggaaaaaaaaaaaaaaaaaaaaaaaaaaagaaaaaaaaaaaanaaaaaagaaaaaaanaaaaaaaaaaacaaaaaggggcggt

SEQ ID NO: 15525 - DNA, 520 bp, Glycine max
  unsure (1)..(520): unsure at all n locations
  Clone ID: PAT_MRT3847_114023C.1
gtagtatgccaaattttcaaactggtatgatatttaattattggttaacatagattaaggttattatctccaactattttttaaggaatgttatatgtataggattgcataatttcatacctgcagctttttactggtgtatctgattatctcatgtcaaaatggtcgtggcataagacttgcaaagcaaatatacatatatgattttttttatgaactcgaggatatttatgcatacgagccatagaatctgctgagtgtaacggcaggctcccaagtaagttacttttaaggatcctttaatgattgcttagtttcatggacaacagatatgggacaagttgggcaaatgtatgtgcttttgtgtgatgctcatgtatgaccacttccttgattcttgcaacttgtaactttggttcatttttaattggatttcatttctctcccatttttctaaattagtactatcggtttttcttgaagatgttgcaatgatgactgaatanaggtttggtcaaga

SEQ ID NO: 15526 - DNA, 445 bp, Glycine max
  Clone ID: PAT_MRT3847_114024C.1
cccacacttctgtttttgctggacctagccaccagaatgtatgcggggcgaaggaatacgccgctgtctgatgacccaccgcatcctcaccctaaaggcaacatgaacacccaaagaaaacatcctacctttgcaagcaacggacagcacatgcgacagcaccactcatataggaacgtatgtgtatcacccgtgtgcactggtatgccacatatcgccgcaaagaccctaccgcaagtaccacgctctgacgcgaaccacactgaacacgatggcacatagctgcctgcaactgcagcggagcttgctagaaccgtcccgatctacaccgacatgcacgcagagccctagaccactgtctaaatctgtgctacgacaccatcaacgaccgctatacctgcatcgcagacctacaccagtgcacttagtgaccgcatcgaaacca

SEQ ID NO: 15527 - DNA, 440 bp, Glycine max
  Clone ID: PAT_MRT3847_114025C.1
acgagtatcgttcaaacaacgcggaggcttgtcctgatgctgcagaagatgttcttgaccggtcctcttcacagagttggggatcatccaagttagaggaacaacccaaaactgcagaacaacttcctgcagaacagattcctctcagaaaagccagggtttccgtccgtgctagatcagaagctcccatgataagcgatggatgtcagtggaggaaatatggacaaaaaatggccaagggtaacccttgccctcgtgcttactatcgctgcactatggctgtaggatgcccggtccgaaaacaggttcaaagatgtgcagatgacaaagcagtgttgattaccacctacgaagggcattacaaccaccctttggcggccggccgcaccggcatggcgaatactacgtcaacagccgcaaccatgctgctttcaggttcg

SEQ ID NO: 15528 - DNA, 202 bp, Glycine max
  Clone ID: PAT_MRT3847_114026C.1
gatggggggtggagaacgaattaaggggctaatgcaagcgggcagagcggaagaccaaacgaccgaatcgaagatgttaaccaaagcgttagaggaagagcaaaggaaagaggagaaggatagcatggaaagccggaagtttttttttgagtatgaagaagaaccgaacagacaaagagattgagtcgatacagagagaaga

SEQ ID NO: 15529 - DNA, 230 bp, Glycine max
  Clone ID: PAT_MRT3847_114027C.1
aaaacttggtacattggttttaaacctctacactatactcttctactttctacaataaattaattaatctctcaattatttaatcttttaagacattatttacattccaacccttctctatctcataatatatatcataccattctaatttatacattttatcatcaactcaacacccctttataaaacatttttccttcataaagttatcaaatttactccaactcatc

SEQ ID NO: 15530 - DNA, 706 bp, Glycine max
  Clone ID: PAT_MRT3847_114028C.1
gccatgagtatgggactgctttaatgaaattacatatgtgattccttgccagatatatggaactcagaaggaaaaaaaggatcctcatgctgatgaaattttgtatctaatgcaaaacaatgaggcccttcgggttgcttatgttgatgagaaaaccactggaagggatgagaaggagtattactctgttcttgttaagtatgaccaacagttgcagaaggaggtggaaatttaccgcgtaaagttgcctgggcccttgaagcttggggaaggaaagccggaaaatcaaaatcatgccattatcttcactcgcggtgatgcagttcagactattgatatgaatcaggacaactactttgaggaggcacttaaaatgcgaaatctcttggaagaatacaggagttactatggtatccggaaacccactattttgggagttagggaacacatttttactggttctgtttcctctcttgcttggttcatgtcagctcaggaaacaagttttgtcaccttaggacagaggggttttggcaaatcctttgaaggttagaatgcattatggtcacccagacgtgtttgacaggtttttggttcttgactcgaggtggtatcagtaaagcttccagagttatcaatataagtgaggacatctttgtggatttaattgtactcttcggggagggaatggcactcaccatgaata

SEQ ID NO: 15531 - DNA, 266 bp, Glycine max
  Clone ID: PAT_MRT3847_114029C.1
acatacgggtgcgacacgacagaggggtactggctgcgagaacactacctaaggttaaccataaaataataatggaggtgcagcactggtggaggctcagattctacttcaggaatgcaaacatggccaaggggattccttaacataatcacatgaatcttcttgattcatgcttttctaatctctgcttacactcggaagagattctgcaatgcttactcagattcagatcaaataagttacattaagggaatctgagcgagatt

SEQ ID NO: 15532 - DNA, 1022 bp, Glycine max
  Clone ID: PAT_MRT3847_11402C.1
ctcggtaatcaaggctgctcgaggtgtgggtttcctagggaatccattctcattctcacagatgatatggaggagagaaacccacaaaaattcccgacgaaatataacattctgaaggccatgaggtggctaattgagggtagccagtcgggggattcattggtgttccagttctcaggacatggttgtcaggaactggatacgaatggggatttcgatgagcttgatgagcgtgacgaagcaatatgtccggttgattgggaaaagcagggaattatactcgatgatgatattaatgctgcaattgttaggccactaccatacggtgctaaacttcatgccattattgattcatgcaatagtggcactgtccttgatttagcttatgtgtggagccagagggacacatgggattatcaatatggaggtcctgataaagacacaagtggagggctagcaatttgcatttcaggttgtggcgattatcaatcgtccaaagaaatccctgtcttaagtggtggtggcggcggcaatgcggtcactggcgtttttacttatagtttcatctataccatgctaaatgaaccagctggactaagttatggtggcttgctcagttccatgcgttcaaccatccgtgggatgctaaataacccaaatgcttcgctgtttaatacagattttaccttggccccaagacaggatttgcagaagccacaactatcctcttccatggagtttgacgtgtatacagcccgggttgaactgtgatggtaaattctcgtcagaaaataattatggagattataacagtgtagacagttgacagagattaaagatgtactactattcgaaataaattaaacgagttattggagattcgtaacatctaagattcagaaatttatggtatatcttaacatgtaaaataatgaacatgttgcatgctgctagcgttctaattacatttgaattaacaatgtccagtgttatatctgtaatgaaaattttttaagtgtggg

SEQ ID NO: 15533 - DNA, 320 bp, Glycine max
  Clone ID: PAT_MRT3847_114030C.1
gacagttgcagcctgagcttgagcaaaacgaccttgaccatctatagctgtcggtgtcagtaagaagatttcgattgcaaagggaggtggcggtagcaaagcgttagtggccaatcccttcgtcactcattaatgctctcatttcaacgctgattccctccttcatctaccgtgtttcgacagcgccgcttcctttcgtaacaaagactgataatagcatcaggccgattcactcatccagttcatgaagactcattggatgctcgtcactgggatgcagagaactcctactgcatcattcggatgcaaacatcggattt

SEQ ID NO: 15534 - DNA, 379 bp, Glycine max
  Clone ID: PAT_MRT3847_114031C.1
cgtatacaaaaagttattacattcattcgagcaatcatttccgggcatgacattatcaaaaagcacactgtggacctaggaacaatctcctacttatccattatttgttaaaataaaatatgttttatgccaatggaccgctttacacttcaatggaataaaaaataacgttattatatacgcttatgtgatcaaatgcaactaaagatgcttgcaaattaattaaaactttatacttcccttacaaatgcttacaaatgagatctaacccattcattgactctttttaaaaaaatagacaatgcatttttcagccactttgtaaaggcaacttggcgaaccaaacttatcgaaccattttgcactggaattattttct

SEQ ID NO: 15535 - DNA, 281 bp, Glycine max
  unsure (1)..(281): unsure at all n locations
  Clone ID: PAT_MRT3847_114032C.1
gccaaaggacngctttgcagaanaggtcctctgcaaatcggatactgccactggccaatatgatnctgagtgggccccaattaattgccgagttcatcgacaaccaattcacatcactgaaggaaattatgtcagaaagcaagatgtcagcattgaatatgatgcatgtacaattccaaatgattggggctcattggttggtgcccagggtggaaatcacaaacaaatcggcggttgacatgtaggtggaagcaaaggaagactgcgataagcttcattga

SEQ ID NO: 15536 - DNA, 338 bp, Glycine max
  Clone ID: PAT_MRT3847_114033C.1
ggggcccccaaggggccccaattaattttcaatatttaacggaaaaaaacaaattccctcaattcaaattttaaaaaaagggggggatctttaaaaaaatagatggtcgaaggggaaaccttaaggaaaacccaatcttcttttataaaaaaaattcttcataaaataaacattttttccttttatgattcgggaggtattggtccttcaacaatttaaaaattgctaaccccccccaattttaagctttaacataaatttttttttccacgaaaaaaaaaggaattaaagcctaaattttaaggctttcctcaacaaaaaaatttttgccccctttt

SEQ ID NO: 15537 - DNA, 394 bp, Glycine max
  Clone ID: PAT_MRT3847_114034C.1
ttggggaatataccataacacaatatcctcacgtggctctggcataacttccatctgtggccgaatcacaactttcaccaccgtcaccggcaccgatcaccgccctacgacaaccggtaatctctctctctctctctctctctaacacacgcgcgcttgctttttgtgtgaatcttacgattttgctgttcctgttgttggatccctttctttctttcgccgaaacgacgatgcttttctagatccaactcgtcaatagtcttttcccttaattgttcggatcaatttattcgccttctattttggagcttcgtgtgtgaatcgctaaactgtggcgtgtggttgcttgtttgaaggcaagacacttggacatctgaatcattggtataaaaat

SEQ ID NO: 15538 - DNA, 138 bp, Glycine max
  Clone ID: PAT_MRT3847_114035C.1
gccacgcgtacgatcacgaagtgcacctagcaattccgctgctcacatacaactttggtctattccgttcgtattgactggaccatcgcatcaacacatcacgtgataaatcaaggaaactcataactaactaacaca

SEQ ID NO: 15539 - DNA, 336 bp, Glycine max
  Clone ID: PAT_MRT3847_114036C.1
cgggccccgggggccgccccggaaattccggcccgggcccggcgggcgtcccagttttccgtagagggagccgattaaaagctgggcgtaaccaggggcaaagcgggtcccgggggaaaaaggttaccccccaaaaatcccaaacaacaaacagcccgaaagcaaaaagggaaaacccgggggggcctaaagggggacccaaccaaaataaattgggggggccccactcccccttttccggtgggaaaaccgggggggccccctgcttaaataaatcgcccaacccccgcggaaaaagggctttcccgttttggcccccaggggggtttttctttt

SEQ ID NO: 15540 - DNA, 491 bp, Glycine max
  Clone ID: PAT_MRT3847_114037C.1
gttttaaaagtctctataccatccttgaatcacaaatagtcatgaatagtaaatttattgacttatataacaaatttattggctaatagcttttacattgacagtgcatgaattaaactcattcttaatgattttgaaatacacgctcataatcagaaaggtagtgtgtgtatgagccattgagcttcctttaaatgtattggagaacatcattacatgccatattaatagtggaaaatataaacacacaacaataaagagaagaaacttggaggctaaggctcctagtgctacataaggatttcaactgtttcaaacaggcacttcaattatctctgcagatctggcatacatgtgcctcctgcatatccatgcaatttgaccattgtccctataccttactcgccacagtccaaacttctctgcgatatccttccctgaggagcagcttctgtcccttaagaaatcaaccacccattgctgtgctgctc

SEQ ID NO: 15541 - DNA, 504 bp, Glycine max
  Clone ID: PAT_MRT3847_114038C.1
gcgacctggctcgaggcgagctcctcttctagattttggactccctgataatggactcgctacagaggcaatcttgggtggagccgattcgcaacccgccacctgcaactacgcctacaccgttctcgagtgtctcacgcagggcgaggagtgtgactattccgacgagcgcgacccgattaggtcacacggatgcgtggcgcaacagccgtgtgattctgtcgcggacccaacgaaccgaggcggtggcgggggaggcggttctgatcaccaatgagatacctcgcctgtctccgtggctcccgggagtgccacaaagggcggcccatcggggagaggaggaggggacaacagcacccagaaggaggttgccctctctgtggggaggagctgtttttttttttgaccaccccggggacccccctttttatttttggaaaaggggttttaaataaaaacccttgcctgtttttgaggggtttccaacccccccttttttggggg

SEQ ID NO: 15542 - DNA, 601 bp, Glycine max
  unsure (1)..(601): unsure at all n locations
  Clone ID: PAT_MRT3847_114039C.1
ggctcgaggttcaagaaagataaggatgatggtgattccaatagtaacgactcaaacagcgctgcaagagggaactggtggcaaggtaggagcaggatatatagtcttggaacagtagctaaaggaattaaaaatgttatctaagaagatattataagtcaaacaactacaatttactaactttagtgcacctctattatttttggtttctgcaggttccctttattattaacatcgcactacgtaaaaaataaaaacagcatcctgcagaccaggtatctttccctccctctctatcttctttggcttgcctagatacataaaactcaatagattaacacgaataattaactcgatgctcatttcacaaaaaaagtaacaagaattttaaattaaattgattgaggtattggaaataaaatagtgaaattggaactgtcataacaattggctagaagaatacgttttaaaagtagagtggtattagcaatagattcttttattatggattgaaattatntaaacattataanntttttgtaaattcacttacacgcataatttttttaattttaataattatactaataaaaaaacatgc

SEQ ID NO: 15543 - DNA, 187 bp, Glycine max
  unsure (1)..(187): unsure at all n locations
  Clone ID: PAT_MRT3847_11403C.1
gggtcggcccgcgcgtacatttaaggaaaccctctaccanatcttanctgttttcaatccctttaataatatggggaatgagcctattttgcttcctggcatcaacattaacaagttcacattctatcttgctggaactaatgtagaaaccaccactcatggtctatatttccttgatcagatttat

SEQ ID NO: 15544 - DNA, 177 bp, Glycine max
  unsure (1)..(177): unsure at all n locations
  Clone ID: PAT_MRT3847_114040C.1
gacacactatccagaagaaaagaaacgagtggttctgctgcatctccaaccctgggaacagcatctccacactcatttccaaattatcaagcactaatgaaattaacacaaccaaaaaaaatttagaaacagaagaaacatatcaataacttaagtcacatacattctgacacctnt

SEQ ID NO: 15545 - DNA, 104 bp, Glycine max
  Clone ID: PAT_MRT3847_114041C.1
ggaataagcaagacagtgacaggtgaaccgatttcgttatcagaacaagaattcgtggattgtgacacacgatatagcgaaggatgcaatggagggacttatgg

SEQ ID NO: 15546 - DNA, 250 bp, Glycine max
  Clone ID: PAT_MRT3847_114042C.1
cagaatgggtatgtgggatcatgtatatccacattcctcctgcgcaggttgattttagttggtaatctgtccctgattagtctccacacgaagaaagtgactttactagggaccttgaccttccacagctctgaaaaagtaccttcccaccaaacctgtacccattcccggctgtgtatacacccgatacatcttccttacaaatccacttatcttctcgatccaggtgaatgctggtgccttctaaatc

SEQ ID NO: 15547 - DNA, 491 bp, Glycine max
  unsure (1)..(491): unsure at all n locations
  Clone ID: PAT_MRT3847_114043C.1
ttctgaatannacctccacacatgggtgtaagnaannacaaatcaagacaacccatgaaacacaaaaaatannccttgccattaaaaaggatttcannacggtagaattaatctcacaancttgtangaagttnntgaagaaagggtctgagaaccccgtgtattgggcaataggcagcaaccagctcaaccacttcatgtggatgctgtaggagctcacnnaaagtggtcctttttacnaggtgctcttaattgcttgagttcatnntgccactttgcttcttccttctacattttactgtgctcatcagttattagggtacannagcaccagacggatcattgcttgatgcgtgtggtgggtgttggcatntcttggccattgcttggggcctttgggtggcttgaatcttcatgcttgtctactgcactgcttgggatttcagggaggtcacatttactcagcagtgacatttggggctgtttttggc

SEQ ID NO: 15548 - DNA, 247 bp, Glycine max
  Clone ID: PAT_MRT3847_114044C.1
tgatgaaaaactagcgactcagattgcaagtcgtgcccaatcacttgttgaaggatcgggatccattcgcgtatgggagtacatgcctattgctgatgtgggtggtctgcaagagttattggacatgtgacagcaatgagctagaactatggcgtggagtgaacgtatgagcgtgggatggatgcagcgagaactaatgtagatacttagctatgctatggggataactgaagatcagatatacaca

SEQ ID NO: 15549 - DNA, 112 bp, Glycine max
  Clone ID: PAT_MRT3847_114045C.1
ggctcgagcgtgctcgagctgctcctgagtacgtcatgactgggcatactgacagctagaagtgatgtacatggtttacgggtggtgctgcttgaaatgcttattggtagaa

SEQ ID NO: 15550 - DNA, 388 bp, Glycine max
  Clone ID: PAT_MRT3847_114046C.1
gcctgtctcccttttttttgtcgattcaaacaaataaaaacgatcatttgggagaaattaaacccgagtaatttctcattctgtggtgcctaaaaaaaaatattgctcatgcaagatcaaaatttagaacatttaagatgaagactaatatttctttctttcactagaaattgccgaactctgagccctagaaccccatacatagttcgaactgtctggaaccgtaggcgattttcgctcggttggcttggacaggaactggcgcctatgtgagtcatcaaagacccgcaacattttttaacagtggacacgctccggaatttgagcttgtactccttttgctcccgcctggcctgtgggtcaacaagatgggccaatgggtttacga

SEQ ID NO: 15551 - DNA, 629 bp, Glycine max
  unsure (1)..(629): unsure at all n locations
  Clone ID: PAT_MRT3847_114047C.1
ttccgatcattcttactnagtttgtgtcaaaatcaaaccaatgcattcaattttatttgctttgaattttacttgttttctgtctaactttgtacagtgcattgattgctaaatctcacaactcaaattaatcactgtttttgttcatatttcacagcttggcaatggtccatagcaacatagctaactactttaactgtagaatccttgccattaatcagcctcctgagtccccactgagtccaatggtaggagtccaaggcagttcaaccaacatggacttttcacagatcgacatatctggattacaattaagaaggtcaaggagaagaagatgaaagaaaagtcaacacctctagcatctctcgaagctgactgagttgatttggttaagaaatttttcttttaattaaaatggtccatgaagaattcggaccatgatctttttattttatttttaaatttcttatatattcgccagtcataaatacataaaaaaaatagtgcaattagcttctcttttttattttttatttttcgggacataaagagtgcaattagctttgtatactttggttgtttgtacctacatttattttgattgtataaagtatcttgtgacttgtggt

SEQ ID NO: 15552 - DNA, 500 bp, Glycine max
  Clone ID: PAT_MRT3847_114048C.1
gtagaatccttgccattaatcagcctcctgagtccccactgagtccaatggtaggagtccaaggcagttcaaccaacatggacttttcacagatcgacatatctggattacaagttcctgaacctcctccaccaaaggtaaaatatcggatttgtcctgatccaactgcaattatttgtagattaagaaggtcaaggagaagaagatgaaagaaaagtcaacacctctagcatctctcgaagctgactgagttgatttggttaagaaatttttcttttaattaaaatggtccatgaagaattcggaccatgatctttttattttatttttaaatttcttatatattcgccagtcataaatacataaaaaaaatagtgcaattagcttctcttttttattttttatttttcgggacataaagagtgcaattagctttgtatactttggttgtttgtacctacatttattttgattgtataaagtatcttgtgacttgtggt

SEQ ID NO: 15553 - DNA, 671 bp, Glycine max
  Clone ID: PAT_MRT3847_114049C.1
ctggacgcctgcggtaccggtccgaattcccggtcgaccacgcgtccggtcaccgtcactgtcaccggtcattcctcttccttgattctccgaaaatgaacctcaaccattaccaccaccacgttcccccttacgagcacatgctgaaggaatccatcaaccgcttcttcgccgaacaccgccgcggcgccaccgacttcgccgacttcacctccatcttctcccgcatgatccacgctacccccgaaccccccatcccactcctctggttctacgccgccctcgaattccgcgccacacgcgatccttctagaagagccagagacctgttccacttactcgtctcctgttccggtgcgcgcgggtccacgaaacaaatcgctgcactcgcaccgttactcttcgtcttacaccgcttagcacttcttcaaaaggggaattgttgaaaaccgagctgaatgggttggtggaaggggttgtgagttactgcagcatctgttgcggtagcgaaaattgccgcgacgatgacgtggcggggttggagtttggggatttgattaagggttggatgggggatgatcatgaccatgacgggggggggtttaagggtttttcccttttgtgagggggggaattaagaaggggaattgaaaaagggtgccagggtgggg

SEQ ID NO: 15554 - DNA, 741 bp, Glycine max
  unsure (1)..(741): unsure at all n locations
  Clone ID: PAT_MRT3847_11404C.1
ccgctcgaggcggncggggtggggtccgtggtcgtttttggctaagcctcgaaatccaaaaaatcttaagcgaagatgatgcacatgaccttctactggagcagaaaggtgaatctcctaatcgattcatggaagaccaacgattggacggactatctcctcactctgctcgcgtgcctcgtcgtcgccgccttctaccagttcctcgagaatcgccgcatccgcctcaagctcatcggctccggaaagcccttcccggcggagatcgaggcccctcttctgcggcggaagctcgccggaaaccgcgtcaaggtgggcgtgaaggtcgccggagcgtttctcttcgggctgagctccgcggtcgggtacttgttgatgttgtcggtgatgtccttcaacggaggggtgtttgtggccatcgtcgtgggtctcgctgttggttacttcttcttcaggaacgagggcgaagattcccttgttgttgatacttcttgtgcctgtgcttaaatcctaattacttttaaatctcccaatttcctgtaataataatataataggagtagcagtgcttgttaattattttcctttttttaatttagcaaacttgtttcaaggaatttgggatgtgtaatttcgtgtacgaaattgtatttaattgtaattgtaataatcaagtcaagatagtagtacaattggaatccttcttgattataaagcctgaatttattttgattcggaggc

SEQ ID NO: 15555 - DNA, 433 bp, Glycine max
  unsure (1)..(433): unsure at all n locations
  Clone ID: PAT_MRT3847_114050C.1
cgctttttcactgccgtattgnnnnnttncnnggnnnnnnncnnnnnnnnnnnnnnnnnnnnnnnnnnnnnnnnnnnnnnnnnnnnnnnnnttttnnnnnnnnnnnnnnnnnnnnnnnnnnnnnnnnntngnnnncanattntggtgcttctggttggaacagctactcctctttaaccggaggagctagaggtccaatcctgcctgaggattatcatatcgtgtacaagctagcatactttgacacgggcacgtgtgccataacgtgttgtgcatgcctggtgagctagcgcaaagggttcctatgaggacacacatgacatatctcacctgacatgttcagatttacttcgagcccctggagtacagacgcctgtcagtgctcgttcctcaactgtcattcatgatcgtcgtagccctgagaccttgtagg

SEQ ID NO: 15556 - DNA, 412 bp, Glycine max
  Clone ID: PAT_MRT3847_114051C.1
cggatttcggctcgagggagaactttacggtgcagaagatatgtgttatggatacagcacaagatgaagcccaagcttaagaagacgagggaaggaggaccacaatttgagggtgtgagatcatccccccctcagttgagacacggcgctgcagcagtccctcttggtttttcccccttccatgcatgatcgctcctgagcataccctgtgcgccactcttgtgtgcgtgcctactgacctctcctgcgcatgtatggcatacaccagcgacactttcatcaacaattatgtcccgggcgtgtttcacaccgacggggcaattgcgtggagccccgtgtaaccaaacgcacgggagtgtgtgtgattctggttgagcagcagagtaccagcgcacgttgcttctgcaatacc

SEQ ID NO: 15557 - DNA, 306 bp, Glycine max
  Clone ID: PAT_MRT3847_114052C.1
gaaaaaggcggcaagacattttagtgggaggcttcctcgtagagttattaatgtaactcctcaaatgcaagatgcatagggtagtaagtgcaggtggtgttacagatctgaagcctggtccagtaaaaaatgtgacagttgagagggtagctgtagaaagaggatctgtttagcagaatacttcccctataacttctacatcgtacacagtggcttatctccaaagtgcaacacttagctttactcaagactagattatcttgcgaaggtatctcttggcctagcttacaggtctgattctccaaa

SEQ ID NO: 15558 - DNA, 183 bp, Glycine max
  Clone ID: PAT_MRT3847_114053C.1
acgctcacgcttaaaagatattaacgacatcactttcacatctaattatattcaatatttctcagcagtgtttgctcttaccataccatagtcaaacaatcatgcttcttaatcgccaattacttaattttaaacatctctaatttcccatatcaatccaacactatatgcaattactttttt

SEQ ID NO: 15559 - DNA, 327 bp, Glycine max
  Clone ID: PAT_MRT3847_114054C.1
ggtgtccttgttttctttgttttctcttcttttttctggggaacaccgtttcaacacgacacaaaaaaagggggggaaaacccaaagggattttttactttcccccgaaaacacctgatacactaaccccccgggtgcttctttccccgggccaccacaaaaaaacccccccggagtatccccaaatttgccgcggaaagggttttcccccaaagcctttttttccctcccccccagataaaaaaaacagggtggttaaaaccccccgggccaaaaggaaccagattttcagtgcccccaaaaaaatcttcccctttgtcttaaaaa

SEQ ID NO: 15560 - DNA, 208 bp, Glycine max
  Clone ID: PAT_MRT3847_114055C.1
gcagtacagggcaccagaacagttgaaagacaaggtgatgttgtagagcaacagactgactctgcatatgggaatattagtaaagtttttaaagatttggacaatgtgtctggatcagcaaatgaattgaaatctgagaaagttgaagcagatctgagtccaacagaggttggaaataagcaaaatagtgaagatccgcactatatga

SEQ ID NO: 15561 - DNA, 135 bp, Glycine max
  Clone ID: PAT_MRT3847_114056C.1
aaagaaggctcttcctaaactccaagattttaaatatagattttccaccacgaaactagaaacgggagacgccagagccttgtactaactaaagattagctgaaagcaaagaaacctagaacacattattagaaa

SEQ ID NO: 15562 - DNA, 420 bp, Glycine max
  Clone ID: PAT_MRT3847_114057C.1
cccaatcgaagccttattggtgaaagggttgaaaacatgtccctatccccagaaattaccgacgtcgacggcaccgactttctcaaagcccaacttctccgaatgccaccaaattataataaggttgttgctgtcggtaatggtggcgctaattcaaagcccccatggttagatcatcatcatcatgaaggcaaaaccctactttgtgatcatgataacattattaatactttcaagaacctaattatatgtgaccacgacgtcgaaccaacagacgaagatgatgatgatggtggcatccacacctgcccaaacgtgtttgagaccgaaagtgatcagagaaagaagatactgatggccataatccgaaggagacatctctctgctgcagcgggaattggaaacaacaaaagcaaagtc

SEQ ID NO: 15563 - DNA, 688 bp, Glycine max
  Clone ID: PAT_MRT3847_114058C.1
gaaccgtacctctttcttcttcgccttcttcgttcgatccttctccctttcgatcctcgatttccttttaattattattcctaattcttcaatcgagtccttgtctcgttcaattcccattttcctcttccgtttgatcccttaatcgttcccctttcgtaacctttgtagtttagggttagggtttcgattcggtctttcagggtcgtaagattgtcgttttttgttgtgtttcccccaaaactcctggttttggttcttattcgcttgatatttcgtcccaatttggcgtaatttcttgtcgcgtttacgattctagggtttcgttccggtcgatttttagggcttttttatctttgaatttcaggaggggttttctgtaaattgattgaggggtttgcttccttcccatacctgacgaaattctagcggtcctattgctttttatttattgatttctacggtgagtcaagaatctagggttagggtttgaaatacaattaggtattattctaattagtgaaattcaattgggggtatgttctttggtgttgaggaacaacctttgttgtttaattctgtatccaattctcttcaattaggccttttgattttcgtttgtccctaaatgttccgaagtgctgtgtttggcgggttggcttgagtttgaattttgaaagatacaaga

SEQ ID NO: 15564 - DNA, 428 bp, Glycine max
  unsure (1)..(428): unsure at all n locations
  Clone ID: PAT_MRT3847_114059C.1
ccgcccttttttttttttttttttttttttttttttttttttttttttttttttnnttttnnnnnnntnnaaaaccccaaaaaccaacccaagaatttttggggggttaatttaaaagggaaactcattggttgggcaaagaaaaaaaatttttttgataattcccaagaggaaaatttgaatggccacgggaaaaaaaaaaacctaattttaggcctaaggtggggcttaaagctccaagaggagggggggataaattacttaaaaaccggggccaaaaaattgaatgggaccgggacggggggaaaaatttttaagggcccattcatccgggagggggggaaacttttggaggggggccctttaaggttcaaacatgggttttttgaacaaggggtggaatttaccaggcgtcctttccaaatcca

SEQ ID NO: 15565 - DNA, 459 bp, Glycine max
  unsure (1)..(459): unsure at all n locations
  Clone ID: PAT_MRT3847_11405C.1
agcaatgttcttctaaacctttctttctctagttagaaattaaggagaaacaattaactcaatggaaaaacaaatgtttccaacaaagtttcttctagttcttaccaccatatggtttgcactatccaattttgcctttaaagcttcagcagatgatgtcactcaaaccccaataacatgtctgaattgttccaaatgtgaatacccttgtcaacaacaaccctcacccccacttccttatgttgctccaccaccaccacaatcccctacaccttatggttactctatctatggngcaccaccaccaccnaaagagaaagagaaagaccctagcaagtgccctcctgctgccggtgttcagtgctgcncccctcccgatccttgtgtcttttctccgccaaatccttacactcctgtgccctctggtgaaggccaacgctcggcttcaatgcttcttca

SEQ ID NO: 15566 - DNA, 217 bp, Glycine max
  Clone ID: PAT_MRT3847_114060C.1
ataaaaagatcaacccaaaagagacatctttggctggtctaattaggggaataagcaaatggggttggaaccaaaacctccacttttaattggcagttttcaccggctggtttttttggggaaaattaaaaccaaaaaacccttccaccggaaaaggttttacctttccggattttacctcccgttactttttattccgtttgcgaaccttcttaag

SEQ ID NO: 15567 - DNA, 561 bp, Glycine max
  Clone ID: PAT_MRT3847_114061C.1
ggctcgaggtatttatgcagaagaaaagttggggttatatttttgatctcgtaatttttcatcatataatagcaaagatgagctaaccattgaggaagaagctgagagaaaagtcggatggctattgaagacgatattttttgtgactgcaggggtagcaggataccatttctttccttatatgggagataatttgatgcaacagtctgtttcacttttgcgtgtcaaggatcccttgttcaaaaggatgggagcttctagattggctcgttttgcggtagatggtaagttttgctatctatatctttctgtcactaattgcttgctattgttattttatgacccttatttctttggtgcatgacatatattgaacttttattaatcattagtcatttgcatattagagtagttgttttctagaacggattcctattcttgtaacaagcataatttcattatccttgtgctttacactagtgacatttagtcatttagtattaatctcagcttattcttgaaatgacaaaattatggttgaaaggagagttgatgggagat

SEQ ID NO: 15568 - DNA, 303 bp, Glycine max
  Clone ID: PAT_MRT3847_114062C.1
cccacgcgtttttgtgtattcacgagagagaatgagggaagcgacttgctgtttttcattttggggagctgcaaggtgttacctgctaatgcaaagaatggagtgaacaccaatgcatattagtttggtggctgtgtttgccgatctgctctagagaacacctgctaaggacacctacaatgcgggtgtgtggactgagattgctgatgggattctaagagaaccgttgcatgacaaatgaacctgggagatgatggcgggacaggtactgtgggctttccgccctcggtagcacggtacccc

SEQ ID NO: 15569 - DNA, 283 bp, Glycine max
  Clone ID: PAT_MRT3847_114063C.1
cgcacacagagacagatttatttttcactatgacacggataacgggtctgttttttaagcctactcagattaggcaaataattatttctaattaaaattgcctcatataagggtacttgagttaattataaaatatttttagaaagaaaatttgactatttattaaaaaaaaaaatgagaattttaaaaagtcatcctttttttaaaaagtgtaatatattatgtgattgactcaccttaaccctctaattttatgtatttttgaaatctttcgttctttatt

SEQ ID NO: 15570 - DNA, 415 bp, Glycine max
  Clone ID: PAT_MRT3847_114064C.1
cccacgcgtccgcccacgcgtccgatctagttctaatatctgataacacaatttcataattagatgttaaactagtatactggcagtggaagtttgccttcgacagaaaaaaaatgtatagggattttaggaggggaaagctatgctctcaccatttgagtttgctcactctcttttatcatcattttttaaattgttgttaaccacttgtgttttgataccattgtggatcagtagtgtttgatctatgtacattagattcacctacttcaggtatttttttcaagctgacttataggcatacctttagtgatgttcatcttttggaaattttggcccattttcttgtggtgaggactgaggccatctttgtagtttgcttttacttttggaagtgaaataacagcataccata

SEQ ID NO: 15571 - DNA, 1037 bp, Glycine max
  Clone ID: PAT_MRT3847_114065C.1
tgctccggaaagtggaacagtgaaactcaccccctttctcactctttttctcctttccttttgctactcctcaaaacttcccttcttattatcactctcccccggttaggtccacacctccatcggacccacccaccatggcctccaaccaccttctcaccctaacccgccgcctccgccgccgcctaccctccctccgcctcttctccacctttccggcggccaccaagtccccctcccctcctgcccctacccctcccgacgccatgctctacgaccgcctcgcggaggcgaccaaagccaaactccgccggctcgataacccggacccacgcttcctgaaacacgggtccccggtgcccgcgctggcggaccacacgcgggtcctgggcgcgcccgagacccgcgtgacgaccctccccaacggcctccgcgtcgccacggagtcctccctcgcctcccagaccgcgactgtgggcgtctggatcgacgccgggtcgcggttcgagacggaggacggacgcgtgggcgcgcacttcctcgagcacatgatcttcaagggcaccgcgaagcgcaccgtcagggagctcgaggaggagatcgagaacatgggaggccacctcaacgcgtacacgtcgagggagcagacaacgtattacgctaaggtcacggagaaggatgttcctaaggcgcttgatattttggctgatatattgcagaattcgaagtttgatgaaaaaaggattagccgcgagcgtgacgtgattcttagagaaatggaagaggttgaggggcaaatggaggaagtaatttttgaccatttacatgcaactgctttccagtacactgcacttggtagaacaattcttggtcctgctcagaatattatgacaatcactaaagatcatctacaaaactacattcagacacactacacggctcctaggatggtgggtgctgcatctggagctggcaagcacgaagaaattggtgagcaagggaaaacattggttacgagaggtgaaacagatgccacc

SEQ ID NO: 15572 - DNA, 168 bp, Glycine max
  Clone ID: PAT_MRT3847_114066C.1
ggccgcccttttttttttttttgggaatcctaatacgatgtttatccaattaaaaagagttgatatgggccctaatacagggaattataagattggggaaacccaaatatctttccacgccttgcatatccaagatgcaaatttaatagggggttaacaaccttttcc

SEQ ID NO: 15573 - DNA, 421 bp, Glycine max
  Clone ID: PAT_MRT3847_114067C.1
attgtaggtctttttcattttgtttttttgtccggtgttaaaaggggaaaattccaccccctttttgtgcgaaatcccagggggtctgtttacaaaaccccaaaggaaaaacgggggaaaaagcttggcttttggaaaaaagggaaacatattttcaaaaatataaaaagcaaatttttttttaatatccaagaaaaacctggaaaaaaaaaccctctttatataaaaggggaaacaaaagtgtgacccccccaccggaaacattcttttatgcaaaattccttggtccaagcaagatttctccaaataaagaaggggggtgatggtttggcctttggtgggaccttcccttcttaaaaaaggggaggtttttggaggggaaccctaaactaaaaaccccttttttgctaaacacttttcc

SEQ ID NO: 15574 - DNA, 222 bp, Glycine max
  Clone ID: PAT_MRT3847_114068C.1
ctgctatcacttgcgatatgtcggattttcgaaaggattggctatcacttttattgatagtcacgtcttcacgttcatctataaacattaggcacttggagaaagctacagtttccactggcaaagaaggactattatcagtagggaatgctgcttacaattggtccagatgtgtagatgaattggaatctgtgctttcaaagcatggcagtcttaggaggc

SEQ ID NO: 15575 - DNA, 932 bp, Glycine max
  Clone ID: PAT_MRT3847_114069C.1
gtccgaaactcctaccctttttttcatttccttgccatttcatcacttataaacctttctttggatcattgcaccctttttgcccctctctcataaataaatttctttcttgttttccaactatggatgttaaaatgaagggaataacagcattgcacacgcttttgcaatttcttctgttttctgccattttcccactctctttctcagctcaaccccgcaacgccaagaagctatcttctgataatcatcatcgcctttcctcctcagctgttttcaaagttcagggaaatgtttaccctcttgcaggtattacacggtgagccttgccattggcaatccccccaaggtttatgatcttgacattgacacaggtagtgatctcacttgggttcagtgtgatgcaccatgccaaggttgcaccatagtaagtttcaaacgttctcaactacttttacttattattactaattactaaccaatcatcttatgatgaatgatgatgttcatttccttaattggtgcttttttagcctcgaaatcgactttataaacccaatggcaaccttgtgaaatgtggggatcccttgtgtaaagcaatccagtcagcaccaaaccatcactgtgctggaccaaatgagcaatgcgactatgaggttgagtatgcagaccaaggatcatctctcggtgtgctactcagagataatattccccttaaattcactaacgggtctttagcacgtcctatcctggctttcgggtgagtgttttctccccatctatttcacagtgcttgcgtttactaatttcaaattgatcataatgctgaaacatttgtaaagcttgattatgcttttgatcaataagacaatgtttcttttaaatctcttaaaaataatgggctcttttactcattcatttataaaatgtgt

SEQ ID NO: 15576 - DNA, 199 bp, Glycine max
  unsure (1)..(199): unsure at all n locations
  Clone ID: PAT_MRT3847_11406C.1
ttttttttttttttttttctnttntttttntnnnttttnnnnnngggaaaaaacacaaaacacattaactttcctttggtgataaaaagtaattgaggggttttcagtaaaaaccaggaaaattgctttaaaagtactgctttcttctgtaaacaaattaatttttctggtgaacgttgttttaaaacaaagtttaccc

SEQ ID NO: 15577 - DNA, 379 bp, Glycine max
  Clone ID: PAT_MRT3847_114070C.1
atatacaaggcatccattttttatatctacccatgtaatcctctctatataaatataaatttctatctatacatgtgaacaatttgaattggtcagcataaacagaaatgtaaatgtataacttgctgctgccaagacttcccgaggagtagctacagcagagggacttggtaacacaagtgtcatgcaatgcttcttcttatgagagctaccacaactgttgcacatctgaatttcagtgttcccatcccttaacaaactccagggtctcaaggaaggtgtccccatctaatatacataaaaaatcagaagacaaaggggcgcggctcaaggcaagagcctcttataaaacatttacttcagggggctaccgggtact

SEQ ID NO: 15578 - DNA, 362 bp, Glycine max
  Clone ID: PAT_MRT3847_114071C.1
attatcaaaggactaactcatgataaatttattgtcagagtacatgatctgagacttgggtctttgagagatgacatcaaactgtgtaacaaaaggtgcttatgttgacaatcttgaagaataaaatagctaaaaaaaatctccaatgccatttctataatgccaaatgtctgtgggaagacattacctcctctcaaattcagattcttggcaatgtggatctaaccaatccttggttgattcctttgcattgttgatgcataattttcccccacccacaagctccctcaggttatccaccttattctccctgcccgtcccactaattctcttgtcagcttccttgcgccttacgggtttac

SEQ ID NO: 15579 - DNA, 1123 bp, Glycine max
  Clone ID: PAT_MRT3847_114072C.1
gaatcatacaaccttggctcctttttaactagcgcttcattccctttccgtttagtttcttgtcctttattatcataggactaactcttgataaatttattgtctgagtacatgatctgagaattgggtcttttagagatgacatcaaactgtgaaactaaaggttcatatgttgacaatcttgaataataaaattttcatgtcatagagattcgacaaagtataacgttggctgtggaaagactaacacaaccctctcattttatccgggcttgggaccggctaagaatagcaaagctaccctaggcaggaaatcttgaagaataaaaaagctaaaaaaaatctccaatgccatttctataatgccaaatgtctgtgggaagacattacctcctctcaaattcagattccttggcaatgtggatctaaccaatccattggttgattcctttgcattgttgttgcataattttcccccacccacaagctccctcaggttatccaccttattcgccctgcccgtcccactaattctcttgtcagcttccttcagtttttgcttgaacttctgcttccggttggatgaatttagctcttgctgttttgctagggaaggaggcgctccatgtgggcccaaatagatgttttcttccttcttagcctgtgctgcagaattagaagattctacatcatgtacatgaggtttattttgatctgaatcttcaattcccaaacttggaatcacaaatccatcagtgtcccactcgtcttcttgttgttcaatctgatgaaagggatccatggtaaactgacgaccatggatttgaaggcgcagtgagcaataaggcccgattgaacagagaacaacaaaatttcaccaacaccaatcttgagagaataaaacacaagaaatcaatcaatttagagaaagatgctttctcggtggagggaattgagaggacatttaaaccctaacgctagggtttcgctgtgcacgcttggtttgatcgcctaccttaattgccccaccgggcagaattgtttaaactttaaagattgaaatgtagtttccccttctgtcgtcttaacgcagccgtacccttctgtcgtctcgcacccgtaa

SEQ ID NO: 15580 - DNA, 258 bp, Glycine max
  Clone ID: PAT_MRT3847_114073C.1
ctctctcgcagaccatctaggtaagctgactctatgtcggctggtcatagcttgagatcccgcacctgagattgcttctatgatcatttcaggctcaggcggtcggtagtgctcacgacgtgcagtattacttaatactgcgtcgactatgtggccgtcttcgctgatggtgccgtgcgtctaggattgtacgacgacttctagaatatcgtaacatgactatgctgactactactttggcgttttgtaggcgtctac

SEQ ID NO: 15581 - DNA, 141 bp, Glycine max
  unsure (1)..(141): unsure at all n locations
  Clone ID: PAT_MRT3847_114074C.1
cccataangtttgacgaacttngatgtntaatgggtctgtaanaatgtcccttgancataagttcggtttgtgtngaantcaattgtgncccattaatcntagtactctaatatcccacctacgtnngtnatgaatgtgtg

SEQ ID NO: 15582 - DNA, 480 bp, Glycine max
  Clone ID: PAT_MRT3847_114075C.1
gagaaattcctcgaggaagaaatggaagaagaatgcagaaattcttcaacattacctcagaatgaaagcatacagaggcaacttggccaagaaaccagcaattcttcaatattgtctcaggcggcacagaatattatcatgcatcagttccaaagtttaatggctcaagggatcagtggatcatctcatcaacctttggtttcttgttctgcagtgccagttacagtacaaggacttccaagttcaagctcacagcctaatgggaattttggccaagaaagcagttcttcaagaagacctcagaatgaaagcttagagaggcctcatttcaatgtcaatgagaggcaatttggccaagaaagaagcaattcttcaatattacctcagactcagaatattgacatgcatcctcagttccaaagtttaatggctcaagggagtactggaccatctcatcaacctttggtttcttcaataaga

SEQ ID NO: 15583 - DNA, 450 bp, Glycine max
  unsure (1)..(450): unsure at all n locations
  Clone ID: PAT_MRT3847_114076C.1
ccctcgcgttcgtttgagatagagttgattgaattacatattagagcgttgaaaagaaggaaaatgaccagagttataagcaatttgttgttgctactcggcatcgttgtcgcccttttttgcattattcgggcttccgaagaaccgcccaaaattgaagaggaagaaaatgtgatcgttctgaccaaggacaactttgagcatgtcaccaaaacatacgaatttgttttggtcgaattctacgctccgtggtgcggtcactgcaaagcgttggcgcctgagtacgcaaaagcggcgactcagctcaaagaagaggaatcggacataaaacttggcaaagtggacgccaccattcactcggacttggcctccaactttgaagtgcggnggtacccaacgctgaaactctttaaaaacggaaagcccaccgaataccgaggcggaagggac

SEQ ID NO: 15584 - DNA, 484 bp, Glycine max
  Clone ID: PAT_MRT3847_114077C.1
aatgccaccattcgtgccaatattgcatatggaaagaaaggtaatgaaactgaagcagaaatcataactgcagcaaaactagccaatgcacatgggtttattagtggtttacaacagggttatgatacagtagtgggagaaaggggaatccaactatctggtgggcagaaacaaagggtggccattgcacgtgcaataattaatagtccaaagatattgctactggatgaggccacaagtgcactagatgccgagtcagagagattgtttaaaagatgccttagacaaagtgatggtgagcaggaccactgtggttgtggctcatcggttatctacaataaaaaatgcagatgtgattgcaagtggtaaaaaatggagtaatagtcgagaaagggaggcatgagacactcattaacatcaaggatggattttatgcttcattggtccaacttcatacaagtgctacaacagcttgatatttctc

SEQ ID NO: 15585 - DNA, 1058 bp, Glycine max
  Clone ID: PAT_MRT3847_114078C.1
ccgtttttccatctatgattagatggacaacaggcagttgcaaaatgatagaaggcaggccctggctaattatacttctcaattgaaagcagctaaatactatgtaatatggccaacaactttcactcattgctcccatatctaaaagttgattgatccttagaatcttatcttctacatgaggaatagatactgtgcccacttccgttggtgaatggaactcttgattctattcaatctcccttctccaaccctctttttggctttcctctaccaccattctataatcacgcaaatggcatcctttggctttggcattgaactcctcgggctttcctcttctacgattctaaaatttcgcgaatggcatccaagagaatactgaaggagctcaaggacttacagagagatccaccaaccagtgcagatcctgccctgtggttccttgtgagtatccatttcccgccccattatccttggtccaaatgacccaaccctatgctggtggtgttttccttgtgaccatccatttccctcccgattatcccttcaaacctcccaaggtagcattcaggaccaaggtgttccatcccaacattaacagcaatggcaatatttgcctggacatactcaaagaacaatggagtcctgctctcaccatatccaaggtgctgctctctatatgttctttgctaacggatccaaatcctgatgaccctttagtgcctgaaattgctcatttgtgcaagaccgacaaattcaagtatgagtctactgctagaagctggacccagaagtatgccatgggctaaaactctcttccctcttgcctcctccaatacacgttttggaattgtctttttgctcttcaaaaacctccccttttatggtattatatataaatatgaccatgaagtttgggcatattattgaaccagttgcatacatatgagaattgttctcaaaggctttacctttgtgattcgagcttgctctatatgaataaaatgctactatcatttggagcttttcttaaaaaaaaaacacaaaaggcccct

SEQ ID NO: 15586 - DNA, 172 bp, Glycine max
  unsure (1)..(172): unsure at all n locations
  Clone ID: PAT_MRT3847_114079C.1
caggagacggaactttctcagattgncacacaccntgaagnagcagtggntncgatantantaatacanagcaagntgctgcngatgtgttgatttctatattcngantttncaatggcatgacattggatgtgagagctcancnatgtgntataaggntnnatttgangaa

SEQ ID NO: 15587 - DNA, 437 bp, Glycine max
  unsure (1)..(437): unsure at all n locations
  Clone ID: PAT_MRT3847_11407C.1
tggcttggaacctttgggctgattgatgtgcttgcatggtcgtgagaagatgatagaaggacatggtcgtgagaagatgatagaaggggggaaggagttggcatagtagtggaagtcgcagtccgggtagtgaactataacggtgagaggaccgaagaagtacccgaagaggtccaacgttttaaagtaccggacgtccgataaatcgggtggcgtacccgtcttcaagtttctactcggattatataaacttagggaacgttcgttatctacatctaccccgtgaaattggtcgaagcacgtctcgatacattgcgaagctaccgtcacctcgacgtagtgatacgcttcccgcgacggtaaagctaggatagataagatacacntcgtcggccctacggacgccgcactaactttcaaataaacgagaatccttg

SEQ ID NO: 15588 - DNA, 940 bp, Glycine max
  Clone ID: PAT_MRT3847_114080C.1
gagagagagagagagaggactccgattccaatcccggctccggcccaagccttggatcttactctgtctgagcggttactaagtaggaaaagagaaatggaaaagaaaagcgtcactaccatccagatccgtgattgagcaaatcgacatcgtgctgctgcgaatcagatcgaagttgcaacaatggcgaagcctgaatcgcaagagcatccatggatctcgaatgcagttcctttgttggtggttcttttaattgcacttcacgtcttcgccttggtgtattggatttacagattggccactgacaataagccacaacagcagcagcaactacaacagcaacatcaacagagaacaaaggctcattgaccgactacaacaacaacgttctcattcaatttcattttcttcaaacaattgttgtatgaaattgtgtgcagtaaaggataggattttatttttggtataacagtgatttatgaggtttcgtttaattttaaattttagtgttactgatatagtcgatgctgtttgcttccactagctagtagtgtgctttctgttgtgccaaaattgaattatgtgtgtggaatatagtcaagctacaatgcaatttagttcatctcatgttagttgtattgtatgcttagagtatgtttatatcaataattcaatacaagatgtatcacattaacaggtgtcaaaagtattagaaaataagaaaatcaagtgggagggtgggggttgtccatcttggtgtttaaggttgtttcatcattttgctctagatggattctgttagaggcttagagcagggagaatgagctaattatgaacagttgagcactaaaatgtttaaagatgttttcctagagacttgatctgtaaattgttagttcagaatgattgcattgtgctaaacaaaggtattgctttattt

SEQ ID NO: 15589 - DNA, 421 bp, Glycine max
  unsure (1)..(421): unsure at all n locations
  Clone ID: PAT_MRT3847_114081C.1
acgagctttaaacaagtatgctaaaataagattttgatacgtagtgtgaagaaggaaatgttatgctaggtgatttgaatttcctatccttgggtttacttccatttctaaatgtttttttaaattaggaatataaggaagttaggcatattatttgtctgggatttgtctccggtggaaaattggcaatgcaaatggcaactttagcctatgtagattagaagatgtaataagttttctttggtagctttgagcctgtgctgaccacacttaatgtgtcatttgattgttgtatggtatatttgatagtttttgtgttgtaccagcagcacatgcaattgatgatgactctttttncattgataatgactttgaatttttttttttcttttgaataacttaaagtgcagctttccttagt

SEQ ID NO: 15590 - DNA, 146 bp, Glycine max
  Clone ID: PAT_MRT3847_114082C.1
aactctccaaccaggtgcatgaacagcgcgctaaatagtgagagaacttgacctcttgcatcaacacaagcatatggcagcttgaccagcagaatgtgtgaggatgatatcaacaccgggccttcggaggcacatcagtgattcca

SEQ ID NO: 15591 - DNA, 137 bp, Glycine max
  Clone ID: PAT_MRT3847_114083C.1
tcgttgaaggggggggaagctatctctccatgatcgtgaagacatgcagatgacatatgtatggcagcagagtttataaggatttaactaggatccaaaatgtcagattttggactggctaaggatgttgggagtgg

SEQ ID NO: 15592 - DNA, 2262 bp, Glycine max
  Clone ID: PAT_MRT3847_114084C.1
gcttgcttgccacgctaagatgaaattaatctcttcacggtttcgttggtgagccgccaccacacttccaccacaaattcatataaggccgtgtgatgactacagtccctggagattgggaagcattggtggctagctaagcgaagctaaaaccaaactcttcagcagtttgtttttgcttagcttcttcttctgcttttgctttctccaccaccacaaccaccatgtattctgccactgcctccaacactttcttccttctctcttgtttccttctcttctgtctcctctcagctccttcctgtgtttccatgttctctggtattgagacaggagatttagaaaaaagagatgatttgtttccacagattctaagagacgaggcagttgcaaggctttatgagcttgggaaggtgagtgatgctagtggttatttggagaggacattcttgagtcctgcattcatgtatggcaattgatcttattcgtaaatggatggaggatgctggtttgagaactcaggaagaagcaaatgggaaatgtacatggtctggttgatggagcaaatggaaatgctgaagctgtatagattaggatctcacatggacactgtgggtaatgctgggatgtttgatggatcactaggaattgtctctgcaatatctgcctggaaggctatgcatgtcaatggaaagctgcaaaagctaaagcgccccgttgaggtgattgcatttagtgatgaagagggtgtcagatttcaaactactttcttgggaagtggtgctatagctggtattttacctggtacaacattggagatatctgataagagggaggtgatgattaaagattttctcaaggagaactcaatggacattacagaagaaagtcttttaaagctcaagtatgacccaaagtctatttggggttatgttgaggttcacattgagcagggtcctgtgctagaacaagttggtttcccacttggtgtggttaaaggcatagctgggcagacacgattgaaggttacagttagagggtcacaaggtcatgctggaactgttccaatgtccatgcgccaggatcctatggctgctgcagcggaacaaattgtagtcttggaaagcctctgtaaacaccctgaagaatatctttcttatgatggtcattgcagtgattcaacagtgaaatcactgtcaagctcacttgtttgtactgttggagagatatcaacatggccaagtgccagtaatgtcattccaggccaggttacatataccgtggatatacgagcgattgatgaccttggacgtgaagctgttatctatgatttatcgaaacaaatttaccaaatatgtgacaagcgttcagtttcctgtattattgagcacaagcatgatgcaggtgctgtgatttgtgattcggatctaagttcacagctcaagtcagcagcttattctgcactcaagaagatggagggtgacattcaggatgaagtgccaacattaatgagtggagcagggcatgatgcaatggcaatatctcacttaacaaaggtgggaatgctgtttgtgcgttgtcgcggaggcataagtcactctccacaagagcatgtgctagataatgatgtctgggcagctggtttagcaaccttgtcatttctggaaaacctatcataagtgatacggtaactgtgtaaagcaataaatagatattatagcttgtaattataggttaatttattgagttaattcatgagttaactcttttcttttagttgcttgtgtcttatagttttgtaattgaatttttggttttagttatcctgttatcaggaaacggctccaagttgttatgcatgttctttgccagtgtcagattaaaacttatgactgattttatttttgaatttaataggtatataattttaatttaaagtgtcaattagggcatttgcggtcgttggactccattctggtacccatgcttgatctaggtggtttgacctgtgatgcggctcgcggtccgctgcccgtgtctgcggcctcttccgcgctccaggtgctggggggtgtcattctggtcggagtgcccacctcaaggcggcggcctgggctgcacgcaagggcatggtcgctctcatccaaggtggggtgcctgcgtgtgcgtgggcgccggggcatgaggcattcgccacatctccctgtgctaggctgggatggctgggcggccggtgtcgcgaccttgtcatttctggaaaac

SEQ ID NO: 15593 - DNA, 355 bp, Glycine max
  Clone ID: PAT_MRT3847_114085C.1
atcttgcctccaatctagacacctcctaataccccaactcactcttacctaaaaacccatgcttgccctatcctcacttccgatccccaccttccctcgcgtaaaactaaaatacttgaactgcggcaccgtccgtcgctccaccatctcctcgggagccagagtgtcagccaccgcaggctccagctacgctgttgccctgtccgacatggctgccgtgaacagcacgctctacgcgacaaccgctgacatcgagaaaatcgacgagatattctctgacgcgcatgtgttggactacttcgacaaccgcaccttgtcctgggataagaagctgaagctgatagatgagattgcg

SEQ ID NO: 15594 - DNA, 123 bp, Glycine max
  unsure (1)..(123): unsure at all n locations
  Clone ID: PAT_MRT3847_114086C.1
tcttccccaaatgtaataataganacctttgtnggcatttgtatgtatntattgnatnggnganggaatnaattacttanagaatgntatanagttcaaganttggacganagacaattgtac

SEQ ID NO: 15595 - DNA, 144 bp, Glycine max
  Clone ID: PAT_MRT3847_114087C.1
ggtagttgcccttgttcatcaccaattccatttcggattctggttcacccgaccatcacaaatagatactcactatcgcaaaactaacaaactacgaacccagataagggaaaaaggttgttatctctgctaagtttccgtgtg

SEQ ID NO: 15596 - DNA, 358 bp, Glycine max
  Clone ID: PAT_MRT3847_114088C.1
atcgcgactctagagaggagtgcagggtacttgctttgattacatgattatttgaacaagcttatagccatttaatgcgtttaatttgtatttatggccatttaatgcgtttcattctctgttacctcgccaccatcccaaaggaagaatgcttccaaggattccacctcttcatcttcatcatgtaaaccacttcattcattcactcattcattgactcgtcttttttctttctctcaaatagcttcctaatgttgggatttattttactgttttggttaggaaccagtaagtaggataggattttacttttgtagctgatactttttgttagaacacttaaaaaattcaacttttc

SEQ ID NO: 15597 - DNA, 384 bp, Glycine max
  Clone ID: PAT_MRT3847_114089C.1
ttaagatacggttatgttgttgctgattgctggagtcgtcgtaggtctctccgtcgtgtcgtttgtagtgacaaaattccgtgctccaggctttaacgtcgagggcaaacacgtgttcattacaggcgggagctccggtttggggctggcattagccaaaaagtatgcgcaacagggagctaaggtgtcgattgtggcccgtagtctcgacaagctggaggaatccaaaaaagagattgaagacattcgcaagaacaccgacgctcgcgtattcatccagtcgtgcgacgtcacggactttgccagcgtccagaaagcggttgatgctgctaatgagtttcatggccgtgctacggaccatgtggtgtgctctgcaggctttgc

SEQ ID NO: 15598 - DNA, 465 bp, Glycine max
  Clone ID: PAT_MRT3847_11408C.1
acgaggtggctagcctgcggtcgccctttttagtccatcatactataaaaggaaaaatgataaataaaaggtgcacatgggggccaaccatatacacgagccgtgccaaacactattaacctcttatatagatccaaaggctggatacacatgcgtgacagagcttgagagggaagaagcgtaacaagctaatggaggatcaattaacagctcaaaatatctcatattagtacattaaggcacgctacaagggaggagggatacatatgaagccgagagtctggagagacgcagtgatgccaaggaactgatcggctcatgcaggaccgccgcttacgggatcgtaggggaatggctcgaatacacataattaattctgggcaaaagtggggtgaagatctgacacgaagccggcaactcaaccatgagaacaaacagctgctgatcatcactaaaagtgtcaag

SEQ ID NO: 15599 - DNA, 429 bp, Glycine max
  Clone ID: PAT_MRT3847_114090C.1
ttaggattagggtttatctcaaatcgccctctacaattttaaatccgaacttctcttcgattcattccccctgcccaataaaaccggcgcgagaaccaataaaggttaggattagggttttaaattcgtttgcatttgattcgaatgaacatggagagatcgttggacagatcgagagaacctggtcccaagaagcctcgattgatcgaggaactcaacgcccgacagttacctcaacgccctacggcagttactacgttgccgtctacgaggtttcgagcatatggcagagactccgaaatcagcgatttgggtcgtggcggtggcggcgggtaccagccgcagcctccgccgcaccaagagcttgtgactcattacaagactgcgcttgctgagctcactttcaattcgaagccgataattaccaac

SEQ ID NO: 15600 - DNA, 343 bp, Glycine max
  Clone ID: PAT_MRT3847_114091C.1
gagaacaacttctcttgatttcttagatctttcacattgtggtttccaagggtcaatccctccctctttcttcaacctcatacatctcactttcctggacctctcagttaacaacctcaacggttcaatcccatcctcactcttaacccttccacgctatcttttatgaatctagaagctaaccacctcagtggtcaaatcccaaatgtctttcctcaatcaaacaactttcacgaattggatttgagacataacaaaatagagggtgagctgccatcaacactttcaaatcttcaacatctcattcacttggatctttcacataataaattggagggccctc

SEQ ID NO: 15601 - DNA, 572 bp, Glycine max
  Clone ID: PAT_MRT3847_114092C.1
tgcccacgcgtacgcccacgcgtcctagctcatgggctgcgaccatcgcgtgatgtatctgatttccgagatctctggctcggagtctctcaggaacgagggccgtatagatgctatgactgtgtgcacgcacgtgtcggcccttggcaaccatgttgagtacaccgatcccgctgaccctactgtcgaatgcccatactgtgcagccactggtgccatcacacctgatgttccgacgaaaatcgtgactgctctgctccgtctggctgcacctgtctatctgtgcaagcttgttgcagggacgaaccgagcccattgcagcatctgcggacctgtttgtatccatcacatagaccctggcctgtatcccgaccggacccggcggctccgatcgctccctgatctggcctttgctcattgcggctgctcattcaaccccctcaagctcgtctagtcaagtgttgaacgagcgagctccggctgtggacgaatctgcggtatctggacgcttcggtcgcatgtgccagcttttgaacgagtcttggcgtctgacagatgattgcgacgagatc

SEQ ID NO: 15602 - DNA, 371 bp, Glycine max
  Clone ID: PAT_MRT3847_114093C.1
ttattttttattttttttttttttgtaaggattcattcaattcattcattcattaaagtattacaaaattgatgtttttataccaagatagaaaatatctaactggaggagccaacactaacttactcaaataacttttagtgactataacttgggtaaccaactaatttataccaataacttctaataactgactaaattaattttatggctaatagaaaatacttgccggttttgattgagcatatgggggttcatggtcataaatattggggcggctagctagggaaaataaaacttcattaatacttaatttaaaggggggataactctggaggtaaatttgggttaaacaatgcccccaaggggtt

SEQ ID NO: 15603 - DNA, 508 bp, Glycine max
  unsure (1)..(508): unsure at all n locations
  Clone ID: PAT_MRT3847_114094C.1
aagcaccgcgggcgaagctcggaacccggctcgagaccttccagcccctcaataaataagcgganncccncgcccaccacggggggggtttttgagaaaggaccacggacgcccccgccaacggcgcccaccgaggaacagccgggaaacacacgagaaaaccgacgcacggaccggcagggggaaggccagagaagcccgccagacacagggaaaccgacgccgaagacaggcggggccggggggagaaccgggccccccgcgaaaccgacaaagcccaccgcaagcccacccacgcccacaacgccgccggcgacacgggccgccccaacgacgaccggagcgaggcccacaaaggcgagaccaaccgaaccaacgagggcggaaccccgacaaccgccgacgacagccgcgaccacggccacaaaccgaacaaccacgccacccggagcaaaaacgagcacgacaccgaaacccccacggacccggaaccgggaacaaagaaacc

SEQ ID NO: 15604 - DNA, 316 bp, Glycine max
  Clone ID: PAT_MRT3847_114095C.1
gggaaaaaaaaaaacatcgttattttcttttttcatataaaaaagacaaacccccttttttccaagaagggcattttaatttggccccttcgccaaccccacttagcccctttttacattttctttacccccaaaacttaggggtaattttacctttgaaaccaaaccccttaaggcctttttaaacataatccccttaactaagggggaaaaaggccctgcgttttttggtccatcccaatcttttgggcaccggccccacaactatttctttgggggggtatttttacccttttaacccttttcaaggtttttg

SEQ ID NO: 15605 - DNA, 333 bp, Glycine max
  Clone ID: PAT_MRT3847_114096C.1
acacttattatttttacattctgtttttgatgccaaatttgttgatttatttataaaagaataaccatgccggggcgaccaaaaaaaaatgatcgcgaattgggatagaaacataccgcggggggggaggcgaaagaggaacttgatatgtctgggaaagaattttttcgacgaaaaacttaagaaaggaccatggtttcaactgccggaaaaagaatctggtgctgtgggggggcttcttcaaactcccaaagaagaggaaacgcttctcagaaattatgaatgctgttcagggcatgaccagccccagggacaaaatctggggggcccagg

SEQ ID NO: 15606 - DNA, 447 bp, Glycine max
  Clone ID: PAT_MRT3847_114097C.1
gagtttgcagctgtaagatttctttctctctcctccaccaccaccaggctgggtctgactcccttttccttttctcttaaaatactgtaaaaatacgactccttttattttcctttctacatttttgtaattaaccaacttctctgtcacaaacaaccatcaaataataacgataccacacaccatcataaaccatccaccacccttttccccttagcccctcttctcaaattcaatgattcttctgtggtgaatggtggaggagcacaactacaactacaaggcgcaagaagaagaagaagaagaagaagaagaagggggtgttgttgaatggtggagcacaactacaactacaagacacaagaagaagaaaatggcagagacaaggtaattataattagagatcagaagaagaaacaaggacacacacagacacacccttttgag

SEQ ID NO: 15607 - DNA, 371 bp, Glycine max
  Clone ID: PAT_MRT3847_114098C.1
cgagggagaggccaacgcaagaagaacggcgtttcattttttgaggttaccaccaacacagattgcttacaataggagaagggggaagcttgattccaaggttttgttgcggcctacttgtgctcatatcaaacccagaagaatttctaacctaaaacgggcaaagggaacccacgcttcttgccactcccagacacaatatgcagacaggggtgaatccgaaacacgacctgataccattgaccataaatcctcaacccaagaaaagtggaagaagcgggaccacaaaagaacaggggctaaattactcggcaaaaaggaacttgaaagagcttgcaatggggaagactgggaaaacaaaacccccggga

SEQ ID NO: 15608 - DNA, 377 bp, Glycine max
  Clone ID: PAT_MRT3847_114099C.1
gcaatcgagaagaagaacaagaagcagatggtgaagtatgagatctggagcatgagaatagcgacggcagtgtttgcgtttgctctgatggttccatcggactcagcagacgacgtcgatgtgctctctgaagataacttcgagaaggaagctggtcaggacagaggagctctcgttgagttctaagctccttggtaacacaccaatcttatcgatctatttctctctgtgtatatcagacaattcgctattccatcgttactttgatttcttgaaatcgctattaaggagggcttattattaaccgagtctgatgttatactttatagactatgcctgaacagattgcatgagctctttgcgtgtaacggctcaac

SEQ ID NO: 15609 - DNA, 522 bp, Glycine max
  Clone ID: PAT_MRT3847_11409C.1
atggcatcctgttaatgcttttccaaaatgctcatggtttagctgggtcttcgtatatggatgctgccagtgccagctctttgctgattcattctttatcaagctgtttgtggaatggtatcctgtctcgtgatatattggttgctctgggttatggtctaaatccattttttttttcctaactctatggtgctcacttgtggttgtgcactgctacgaatatccaatgtggaggtaggccaacctctgcacatttagctgaacaaaggtgtaacagcgtgatgtttcttgttctgttctgctcgaccattcttttggttgaacttgattctccctgctgaaaagagataatttccgtctttcaccttgaaccaaatacttgtctcttaattcaaaactgctacatgccacctccagaaacttggcttagatagtgaatgattactttttgtaactattcttattccttgttacaactgagttgttttacaaactggactaatctttcaggttccatctcta

SEQ ID NO: 15610 - DNA, 780 bp, Glycine max
  Clone ID: PAT_MRT3847_1140C.1
gggccggaattcccgggtcgacccacgcgtccgcaaataggtggctttgtcgactacttctgacttcatcatgcttaatatcttggatgtttttgtggcttaagacaactcaaagttgtgtttatactttataccatgaaaatagtttcagtcttgagatgcagaacagaaatggaatggattataccattataagcttggcttgctggggggtttatctttttgtttcatatgttttcttgcttttgtttttgttgatttgggtttaaaccatgtcttgacacagagggcaatggtttgttatggcaggtgtgcatctttgcatatggacagacaggttcaggaaaaacctatactatgatgggtaagcctgatgcgccagatctgaaaggattgataccacgttctttagaacagatattccagattagccagtctctaaaagaccaagggtggaagtacacaatgcatgtatcactatatgaaatatataatgagaccatcagggatttgttatcattaaatcggtcaagtgggaatgatcatacacgaatggaaaatagtgctcccactcccagcaagcagcacactattaaacatgaatctgacctcgccacactggaagtttgtagcgtggatgagatttcctccctcctacaacaggctgcacaaagcaagtcagtgggaagaacacagatgaatgaacagtcatccagaagccactttgtctttaaattgcgtttaggtgggagaaatgagagaacttgaaaacagtgcaag

SEQ ID NO: 15611 - DNA, 964 bp, Glycine max
  Clone ID: PAT_MRT3847_114100C.1
tacggctgcgagaagacgacagaaggggaaagcagataaagaaatggcttcttctaaatcaaaggtcagaagggcatgttccttcaccaacctcctccttagctgtttgaatttctcaatcttcatactttctgcttcctcatttgcaccaactattctcctaaagatgcccccaacatcatttggcatggctctcctaatggtctctggcatctcactcctctcatcttttgtgggcttctactcccaactcacacacttctgtttcctcacccacatttctcttctactagcctcattaataggacaagtgctgaccatattagccttgttcacaaaagagaaagctagcatgtcccttctgaagtcaccaagggaccccaaagaagccaaagttttggtgaggctggagtgtggggcattgatggcaatgtgcatgctgcagtgtgtggtgctgatgctgagttgtgcagtgcatagttgctgggtgaaggattatgaggaactggaagcagagaaagcggcctccgcgaggaagaggagtagaagaattgcggaggtgcaagaggagtccatggctaatgcaaccaagatggcagaaatcaaagctaaggagttggatgagaaaatgaaaagcaagtatgggcagtgggtgaagactgattttgaaccctgaggttcctcaacattttactgtgtcttctttcttctacctcgtactagtgcagtgcagatatttgcatcattgttttttttatttgttctccttttgttggtgttggttgtttggggtcactgtgggtgtggccattgaatttgaatgtcgtgagccattcaaggtacgagttacctgggaatttctgttgtttaacgaaaatccatcgtgttgtgtaataacaatatgcaaagtcccatttgccatgtttttttactgaatgcagtgagtaaatggatcttccctccc

SEQ ID NO: 15612 - DNA, 573 bp, Glycine max
  Clone ID: PAT_MRT3847_114101C.1
tatgacccatttggtcttagcaagaagccagaagatttttccaaatatcaggcatttgaattgattcacgccagatgggcaatgcttggtgctgctggattcatcattcccgaggccttcaacaaatatggagcaaactgcggtcctgaggctgtttggttcaaggtttgcaagctttataacaactttcactgtgtcaagttcactaatacattatttttttatgacactcaacaaatgaaattcaatagatcttacaagtgctaatgaaagactcttcagtttctcttctacgagcaaattatttgtgtaaatgtccattctggtgcaaattcaacatagacggagagaatgtttctttcccttttattttacccatctcatcatcaaatttatagtgctcattgttaaccatgtcttaaattaatcctgataattgcacaataatctgtttttgttttcactaaagttacttactctcaaagtttcaatttagcacatagcaatgtattttgtgagtgtattctttacattaagggaagttaattttctttatgcaatcgatgcagactg

SEQ ID NO: 15613 - DNA, 531 bp, Glycine max
  Clone ID: PAT_MRT3847_114102C.1
ttttatattttatttttttttttttatatcgttaaatattatatagtagttattttttttttttatcctttccattaactaatatcttttcccttccggcggccagaaaaaattaaatatattattaattttttttattttcctacaaaacaagggcgcataatttattgaagccactaaagagaaaacaacataattaatttttttacataacttattgacacacatcttaaacaacataaattgaaactagtgcccctatttgaacccatcttattacatataaataaatacgaacaacctaaattattgaaaagtgaaagaactacttaatttattacaggggattaggaagcttaaaagtccttctttctcctttttggcctcccaggaaatcgctccattggtctccaataatcccaacaatattatatccctaccttatcaaattctctctcgctgctgttttcaatgaaactgcatttgtaatggaaagatcttaaggatcctttaaaattaatttttcccatc

SEQ ID NO: 15614 - DNA, 445 bp, Glycine max
  unsure (1)..(445): unsure at all n locations
  Clone ID: PAT_MRT3847_114103C.1
ctcgagccgaatcggctcgaggtgaccagcctcgtgacctgatcacaaatttgtgtatacacccctcaccccctacgcgctgccgtcactccagttcaccctgtcagtcagtcacaaaatcgcgccagcccgccgttcaaataccgtcgtcattgtcgaagtggattattcagctagctggcaagttgcgtcaccgtcaaggagcaagtcgtgaaccctagctggcaagttgcgccacgccgcgacgccgaagggttcagtaaagaggaggaggagggcatttgctactttgatcacgcagatgatacttgtcatataatgctgtaggcatttgattttgcagactaaaatcgtataatctgagtggcaagaaatatatattcagggaatgaagatatnatctatatttgttctcacgcacataaaagaaaaaaaaactccacat

SEQ ID NO: 15615 - DNA, 247 bp, Glycine max
  Clone ID: PAT_MRT3847_114104C.1
cttattataaaaagggacttatactttacgccttataatcaaacccgaaccttaactgacttacaattacaaaagcccaacggggacaaaaatatgcatgtaatttatataaaggggtgggccacacccgcaacactaatatacacaaatgtgcacactcaaaacgctttccgcctgcggaaccaaaaaatgggggaggaggacccaaattccctaacttaaagttaaagcccaaaaaaagccagcc

SEQ ID NO: 15616 - DNA, 188 bp, Glycine max
  Clone ID: PAT_MRT3847_114105C.1
ggatgaaaaaagcggattctattttttttaactctaataatttactgattcaaataaaaagggaattgactaattatatgggcctctaacaaatatgaaggctaaattacacaatgtaataaaacatgctggtacaacaaaattttgctgaaaagtgctatttttttttatcccacaacttggaaaat

SEQ ID NO: 15617 - DNA, 816 bp, Glycine max
  Clone ID: PAT_MRT3847_114106C.1
atgaatcaatggggctgcaagttgagaactaaattttgggaccaaattgagacatgcagacaaaaccttgaggccatccatcatcttaaaggccctgcgaatgttgctcactatacaaaaattcaagagaagttgaaccttcttattgctaaagaagaatcatattggaggcaaagatcaaaagtcttttggcttagagaaggtgacattaattccaaattcttccactcttctacaaaagctaggaaaactgtaaataagatttcttctctttctcgtgatgatggtgttatggttcatagtcataaagatatgtctgatgtagttgtttcttattttagcaatttctttcaagccaatgataattgtattgatattcttcccattatcaataattttcctcattctgtgtccttttataacaatgacatcctcttatctccttttactctggaagaatttcgtgtggctttattccatatgaattctcaaaaatccctagaccctagtggacttaaaacaactttctataaaatattttggcatctttgtggccctgaagtcttctactctagtatcacatggcttgaaacaggatcttttccaccagagggattcaacatgggactttcttcacttataaagtaccatgagaggagaggtgacatccatggagtgaaggcttctggtcaactcatcaattttcaaaagtcagaaaccgaaaaatacttgggtctcccatcaattattggaagaaggaagaaagcaatatttggattccggaaggataggctatggaatgatataaatctttag

SEQ ID NO: 15618 - DNA, 444 bp, Glycine max
  Clone ID: PAT_MRT3847_114107C.1
atctaccctaaattaaatatcgctaagacgtctcagttttttctgaaaaaggtctaactcatacgtgtagagaagtgaagacccagactcatctcgcaactacaaacactctctgaccttgacagacaggtgtgccaaacccaacatcaggcacatgctaccaccattccactgcctctgtatctctccgcacctgtatcatatcttcaaatccatcactgctctttgctgaaaaaaagggttaccccgtttacatattttacctttcaaactgtctgtctctggatgtatatataaagtctgtttctcatgtttccttacttgggagtagcgttaattaggcatcaagttaattgcctgaccaaagcaaccatctcgttccctttagtgctttgttgaaatgccatgacagttcaaatttgtaggaagcttattggaagaaaa

SEQ ID NO: 15619 - DNA, 628 bp, Glycine max
  unsure (1)..(628): unsure at all n locations
  Clone ID: PAT_MRT3847_114108C.1
ccacgcgtccgttctttgtcttccatttccaattctctgtgtagaagccatgtctaagggtcctggtctctactctgacattggcaagaaagccagagatctcctgttcaaggactaccacagtgaccagaagtttaccatcactacctactcacccactggagttgtaagctattatttattactattattattttttaattattattattatgaggatgatgattatgatgatgctatatttctaggactgattgaaactgggtttattcctttttgggttggggtttgtttgatatgagagtatttgggaggtgagggtggttgttccattggaagatttgcttgtgtggggaatggtatttgtgatgttgtgttgctttgggtggtattactgtgatagcattagcaatgttgtgttgttagtgcttcaaatcatgtgtgggacatggataggtattaggtgttgatgcatggttctgagaatgttacttactttgttgctatctccttctgtgttttgtgtgtgatcctgctttaggctataacatcctncgggaccaagaaaggtgacnncttttgtggcggatgttaacacccagttgaagaacaggaacattaccactga

SEQ ID NO: 15620 - DNA, 1433 bp, Glycine max
  Clone ID: PAT_MRT3847_114109C.1
aacaaaacgacgttaagtattaattcggcagcgtgtgccgggagtgtcgtttaatcgcccgccaagacattttcctttttcatttcatcgctgagtccaaaaaacgcagtgaaatggtccttctatacctcccaaggtttcctctctacctcgttaccttatctcactccctccctcgtcgaacctactccaaaaccaccctcttacgcccacccaaatccactctcacaacctcacaacccttaaccgttaacccttcccccacagagctatccctcgagaagctcttcgttccgccggagaccaccgtgtccctcgaaagttcaagagtcttgaacggttctaacattctgctgagtaactacgccaacgatgctcaggtattgcaggccgagtttgtgaaaagcagtgtgaagactgaagactgtccctccgatggaattcccgagttcgctctcgttggccgctccaacgtcggcaaatcctcgctccttaattccctcgtccgccgcaagaaactcgccttaacttcgaagaaacccggcaaaacacaatgtataaaccattttcggattaataatagctggtacctggttgatttgcctggttatgggtatgcatctgcaccacatgaacttaggatggattgggaaaaattcaccaaggactatttccttaaccgctcaaccttagtttcagtattccttctaatagatgctagcattcctgctaaacaaattgatcttgactatgccagttggttgggtcagaatcagatcccaatgacattaatctacgctaaaagtcataagcggaaaaagaaaaagaatggtggcagaaggttgggtcagaatcagatcccaatgacattaatcttcaccaaatgtgacaagcggaaaaagaaaaagaatggaggcaaaagaccagaagacaatgttaatgattttcaggatttgattcgaggtttcttccaatcagtgcctccgtggatcatgaccagtagtgttaccaatcagggtcgtgatgagatactcctccatatggcccagctacggaactactggctcaagcactagttctgagaaacatgatatcgttagagcagatacgcatttccagatagacttgcttgattaccagctaatatggttatcaatttatctattttcctggtgtgccttctctgtattgcccaagtacctacaaggcctaaagctagtgacatgaaagctggataaagaaaactatttagaacaaagcttgatactgtacaacaccatgcctgcgtgaggttctctactcccagccctgtacggttgttctaatgaagtttgttttggatgttcacaaatggttattatcacctatagggcttggagataggattatgctgtgctgatcgagggagagctcctagatgcgcatttcgagac

SEQ ID NO: 15621 - DNA, 182 bp, Glycine max
  unsure (1)..(182): unsure at all n locations
  Clone ID: PAT_MRT3847_11410C.1
tcggngcangcgtacgtnagctcgganttcggctcgngtttgtantcattgtcttgntgatgcccttagtttnnttantcancantgntttntntatnttcaccattaaaaccatttcntanntagtttcctttagtgaaaagccaaaccnttantctngtttcagcnttnttccntacaag

SEQ ID NO: 15622 - DNA, 1567 bp, Glycine max
  Clone ID: PAT_MRT3847_114110C.1
atctccctccctcactctcgaggcctactccaaaaccaccttcttacggccacccaaatccactctcaccgcctcagaacccgtaagtgttaacccttccccaacagagctatccctcgagaagctcttcgttccgccggagaccaccgtgtccctcgaaagttccagagtcttgaacggttccaacattctgttgagtaactacgccaatgatgctctggtattgcaggccgagtttgtgaaaagcagcgtgaagactgaggattgtccctccgatggacttgctgagttcgctctcgttggccgctccaacgtcggaaaatcctcgctcctcaactccctcgtgcgccgcaagaagctcgccttaacttcgaagaaacctggcaaaacgcaatgtataaaccattttcggattaataatagctggtacctggttgatttgcctggatatgggtatgcatctgcaccgcatgaacttaggatggattgggaaaaattcaccaaagactatttccttaaccgctcaacgttagtttcagtattccttctaatagatgctagcattcctgctaaacaaattgatcttgactatgccagttggttgggtcagaatcagatcccaatgacattaatcttcaccaaatgtgacaagcggaaaaagaaaaagaatggaggcaaaagaccagaagacaatgttaatgattttcaggatttgattcgaggtttcttccaatccgtgcctccgtggatcatgaccagtagcgttactaatcagggtcgtgatgagatactcctccatatggcccagctacggaactactggctcaagcactagttctgagaaacatgacatagttagagcagatacgcttttccagatagacttgcttgattaccagctaatatggttatcaatttatctattttccatggtgtgccttctctgcattgccctagtacctacaaggcctaaggctaaatctaaaaatgaaagccggataaagaaaactatttagaacaaagcttgatactgtacaacaccatgcctgtgtgaggttctactcccagccctgtacgattgttctaatgaaatttgttttggatttacacaaatggttattatcacctgtaaattagtaatgatatttttattcaaatacttggatacttcgaaagttctattgtcgttgattttaaagaacccatgtgagattgtttcctctcccccgaatcacttcatggaaaaccatcacttttcatgaacgttcataacatcctacttttagcaggccactgcatattctttttttttttccggctggagatgagctgaagaatcaaaatacacgcaaggatgcaactggaaaacagcacccgtgtaaaaacttataacatttttctctttatacgacagtgagaagaatgagatatcagatagtagtatcattttcccattgttgttctttatcaaatctataaattatcctttatgctctcgatgtttatcagattgttgcatttttcattgaagttgaagattgaataaatgttttgtgaagttaaaaaa

SEQ ID NO: 15623 - DNA, 531 bp, Glycine max
  Clone ID: PAT_MRT3847_114111C.1
ggggaaaaagaatcaaaagaaagaaatggcaatctcatcctcatcagagataggttggagttggagggttttgtgtcagagagttaacccagcaataccaaacacgcccttgttcctccaaatcccaaagtcaactcgcttcactgggtcttcttctgttgttgctcgcgcttgggaccctaaaacggcctcttcgcaagaggaggatctagtgtacgtgggaaaactagtggcgggttcttttgcgggtggggctgcaatcaagtacggcagtgctctattccctgagataacgactccgaaccttgtgctggctctgctcctcattctaactcctgtgcttgttgttgtttttcttttgatcaaggaaagtcgtacaaacccataataccaaccttttttttatttacaatcccgatcatcaaattcgttctactatgtaccaaccattttttagattcggatccctttcatcaaatatcaagttctatgtctccattttttctcagaatcggacatcttttcaaacaa

SEQ ID NO: 15624 - DNA, 290 bp, Glycine max
  Clone ID: PAT_MRT3847_114112C.1
agacggggatctcagatggaatttatgcaatcacatattccgattaatagtatcacctccgttgtatttgagaatcccggctatgtatgttcttgctccgagtccactcggtggaagacgaccacactctggatccctaatagatcttccactctaagtccacaatcccaatcccaatcgcaatccaataaccctaaattcatctaacgcagaggtgcactccatgtgttcggttcctcttcccattcctcgttctgaccccagtcctcacttgcgtctctcgtcttcat

SEQ ID NO: 15625 - DNA, 168 bp, Glycine max
  Clone ID: PAT_MRT3847_114113C.1
aattgaaaggtgctgggcatcagatcaaaacaaagctctttgccccaattgggactttgggcaaatttaattgtggaaatcgcaacttgagaggataatagcaaattaagtttttaatggcctgaagttaatggctaaatggaatgaaagggtgaccgtcaaagaccc

SEQ ID NO: 15626 - DNA, 470 bp, Glycine max
  unsure (1)..(470): unsure at all n locations
  Clone ID: PAT_MRT3847_114114C.1
tnngggggntgtntttntttttttttttttgtcaaaacataaatatatttccttatgtgatattgatattggtgttgttctctattcacaattcataagtggagtttcactaatccaagtaataaaggtttatattaaaggtctgcataggttactgaagtaaaagtgtaaaactctgatttttgattggagaataatgctaaaaacacttgcatctgaattatcttctttttttcttcctttttctccttggtttgggaggatttacttacaataaaacctttaagattaatagaggggtatttgtttctatctttgtctcgatcaaagattaactctgcaagctgagggatatagtgacctggaaaatatggacattaaaaatgtggttatgctaataatgtaagcgacagagaaatatcattatgaaggtaaacactaaccaccatagctttctcctgatataaaaa

SEQ ID NO: 15627 - DNA, 252 bp, Glycine max
  Clone ID: PAT_MRT3847_114115C.1
gcctcctgtactaacactacatggtatttttaacgttaagaacgagtgtcggaaaccagggctatctctgacccaaaattgctctataaaaacgcggcactgtcattgtgggctacaaaggaccaaaaatggagggagggcgtttgacgattatgatccatagggatggatatagtccgtgaagttagtactacatgcactgtgggagcgaatccaggccggtcttgaatggggccttagacaattattgtg

SEQ ID NO: 15628 - DNA, 502 bp, Glycine max
  unsure (1)..(502): unsure at all n locations
  Clone ID: PAT_MRT3847_114116C.1
ggccacctctgctattcagcaatcagcattcactggtcaaactgctctgaagcagctcaatgagttcgtccgcaagaccggtggcgccggcaaaagtcgcactaacatgcaccacaccgtcaagagtgctcctcagaacatttggtatggccctgaccatcccaagtacttgagtccattctcaaagcagattccatcatacctaaccaaagaattccctagtaactacaaatagaacactactaaattatcatctaacccagaaaccttcacctaaaaccaaaaactaaaagtgattcacagcagataaacaatacttaatacccttaactacaccttcccagagatgcttaagaaaaataatatcaaattcaacgaaacgcatataattcaaaaccaatacacacatcttctcagaaagaaccttaactacttaatcaacccaaacctnatccatactcagaacatccttactatctaaactatttcaattatactcata

SEQ ID NO: 15629 - DNA, 612 bp, Glycine max
  Clone ID: PAT_MRT3847_114117C.1
acaacaacttgtggcattcattgaattgtaccttcatgtctctttctttgttcatcgtccaacggtagtagttggcgatgatgaatctctgtctgaccacgtttttggtagtgtatttgagtatgagagagtctcatatctctttggattctttgtaggagtagtagacatcgaaaagatcattacaaatgacacttaaccaagtgtgacaacataccttattggcctgaacccattgtcgaagttgattggcatcaacaacgacatcaggtctaggagtggaagagcgaagacaactccatgcatgtctaacaaggtatgaacatgttcctccaatgacgaaagttttggccaacgaagacctcaattttttgagacgtcaggcaacgacttggcaaaggttgcagtcggtggcatggggttgaaagcatcaacattgttgacaggttttgcagcttcaaccaagatataaaccttttagattattgttgctgaagtcaaaaatctcgaacacgattgaacttgttgagacatgacacttattgatctaaaaggttatccgcggtgtcctacgcaaacctcccaagatacaataggaatggcttagcagag

SEQ ID NO: 15630 - DNA, 709 bp, Glycine max
  unsure (1)..(709): unsure at all n locations
  Clone ID: PAT_MRT3847_114118C.1
actctctctctctctctctccttctcaggggggacagtttagaaaaccaagttgatctagttcaatcatacatagagaatacagtgtaaagaatagattttctcccctaccaaaaacaagagggagctgagatattgtaaggtggtgtgaaaggaattaacaaggatctgttttgggatatatgggcataagagaaagagatgacatggtgcaatgactcagatgaggagaggggaattgatcaactggttgcactaacaattactcctacttcaactaataacactactgttcttactgatcatcacacaaaagcaagcgaaattcgcaccttaacttgcccctcatgtggtcataacattgaattccaagaccagactggaatcaatgacttgccggggttaccagctggggtgaagtttgatccgaatgaccaggagatattagagcatttggaagcaaaggtattctctgacgtgccaaagcttcatccacttattgatgagttcataccaacgcttgaaggagagaatgggatctgttatactcatccagaaaagcttccaggtgtttgatattttatttttgctttcaatttnttttattgnnaatttcgtcatgcttttggtatttttggaaacggggttttagattacaggttatgataataattggaaactttatcatctatctcacttccatcatattt

SEQ ID NO: 15631 - DNA, 421 bp, Glycine max
  unsure (1)..(421): unsure at all n locations
  Clone ID: PAT_MRT3847_114119C.1
gntgtnngcctttagccgctcttttccctcaaaaaagtgttccacccctttgaatnttttttgtnncacccacataggttgccttccctggttttgttgttggtcgtttatggcccgagtttggcccccttggttttgaatcggggggggggngcctcctttcttcacctttcaagtccaccctccttggnactgcccatccctgcttgngagtnnntgtgttcttgtccttcttcttgggcccctccaactgcncattccctttaggcccggcttccctcctccgctccttgtncttttttacccccttgaccctgcctgggtcctttttggcttccttgggcccacccggcctgtttctcccgctttccccttgggtggcctttttggcattcgggtgctgcccctctcggggccccct

SEQ ID NO: 15632 - DNA, 736 bp, Glycine max
  Clone ID: PAT_MRT3847_11411C.1
gtacacccgcggttctcggtccggaattcccggggtcgacccacgcgtccgtaaaattctacaattttaaatttattttttaacttggcatcatagtttgttggtttagtttaagtatgttggtacatgcttgagtgaacttggttagcttgtatgacaaaaacttgtgaaagaaaagataaatgcttcatgctaccagtgtaagttgtgtccatctttattgtgagggagcaattagttttgctttcttggtttaacatgattctttgaactttttgagtgcatacatgatgtggacatgatcaaggccttgttggttttattttatttttagtcgcttagccaaaaagccaacctttgtgtgtaatgaatgatgaatcccttgtaaccctttgagcctaacacaacgaatgaactttcttcttaaaccctgaattgaaatgcaattatgttcaccttaccttaaggaataggatagcatcacttatgggttgaggcaaattctggtgaagttatctttgtaagaccttgcacagggatgtaagaaagcaacacatagtgtgaaaaggctacaatatatatatatatatatatatatatatatatatatatatatatagggttgccaaaaaactagtaatgagaaatgaaagtagaaaactcacaaaaagatcctctctatttggtggtaaattcttggggactcgacacaatcgggcttaccatttattactac

SEQ ID NO: 15633 - DNA, 181 bp, Glycine max
  Clone ID: PAT_MRT3847_114120C.1
tatgaaccctgatactacgagagctacaccgtttcgttcagtatatacgatcgacaggtgcatggggatcagacgttccttcagagcatcgttgtggagcctgtaccgttgaccacctgctgagtaaccgaagatccatttcgactcgatgtttacacctctcatcagggtgttaaccttc

SEQ ID NO: 15634 - DNA, 408 bp, Glycine max
  unsure (1)..(408): unsure at all n locations
  Clone ID: PAT_MRT3847_114121C.1
acgcctcgcacgggtgntacggggtggcggaggggtcagnccgaccagcttcaggggggaactcctgccccgggtccggctgcagcgctggcggacctcggctgccactcacctcaaaaacaaagggccaacgccttgggcgtcccacgctaccccccccggcctgggggggggggccctctcccatggggacccccggccgcgcggaaagggccgcgggttcccacgggccccccggggaaacccctggcgtcccccaccttaagagcccgggcccacaccccccgccggccccgcggggggcgcgccccccaaggcccgcccgggccggctcccccagcccgtgcaccgccccgctggccaagggaaccccccccgtccgggccggctcagccccccggcgggggg

SEQ ID NO: 15635 - DNA, 517 bp, Glycine max
  Clone ID: PAT_MRT3847_114122C.1
ccctgctccagccaagaatcaatctcaaacaaataagataaataacctacaaccttggccggtatgaaatactcttatttgaatttggggtctagtaatattactgtaaccctagaaaaataccaaaataaatattacttataagaataagtgtagaggcaataaaaataaattaaatccatgattttaatgttttaaaattagatttaagtgtagttttagcctttgtgatcattttattttcatgtttctctctgtggtttgatgtgttaggatgtttgcagggtttaagagatcagtcttattgaatctattattgtaatttagattctttaagggaatttaaattaagtttatgtagtgatccttatgatagactcccaacattcattccactctgagatgattagtgaaagccaactggcaatcccattctcgccagtggttcatttaggaacaggtgtgttacacagttctggccaatgaggtttcaggaaaagtccactgtgaggcttct

SEQ ID NO: 15636 - DNA, 539 bp, Glycine max
  Clone ID: PAT_MRT3847_114123C.1
gtgcagcaataaacaacatattctggaatagtcgaaaggctatgttcaaagatatgctgaatcaattcctgaaccctaagagttacaacgtcgtagggataacaagaaaatacatatgattaccatgaaccctcattggattcactacttacccgaaattaatcgtatcctacacaaacctacaaaaatcttactaatgccaaatcatgagggggatagagccttgaaccttaccaaatgccatcgatgcttggcttcggatgaaacgaatgcccatcaactatgtgtgctcaatgaccgtttttttcttttgatgacaagaacatactgatatcttggtggtgcctctaccggggccgattgtaataagctgtccataatgcagacttagcaagactgttgtacttattgcgtaccaaacataccgttctgaagggtgaatgattatgtgatgggctgactgaactgcaacaaaaatggaaggcggactctatacccaccctttaaaaaaatgcaaagataccactgcacatttacga

SEQ ID NO: 15637 - DNA, 192 bp, Glycine max
  Clone ID: PAT_MRT3847_114124C.1
atacctgcctcttatttctgcgcatgggaaaatcatgtaactcaaatacccataatggcacaggaggaaagtctggcttctagtgcaagtgatttacagtactgcaatggtgagtaaaaatagcaagccttaaactactgcaaatgcatgagggagctatagaaatcatctattgatagtatacgcaaagtc

SEQ ID NO: 15638 - DNA, 694 bp, Glycine max
  unsure (1)..(694): unsure at all n locations
  Clone ID: PAT_MRT3847_114125C.1
cgaattcgacctcgttacccggggatcctctagagtcgacctgcagccagggttagggttttggaattgtttcagttttactttcagagctaattttctgtgcaatgtaaaagaaagaaagaaactcaggtcatgaattttggtttcgtacaaatgatgttgctgtttttgacatgttattggtctttaatcatattaacaagggagcttgtgtgtttagcccttataatatggagttcatcctccaaaattagtttacatcatgttaatcattaatcggtacagttggatccttgattttggagacttagtattgctatgctagacaaccactacgtcccccataaaattttaagagtgctgngcatcatgctattgattgaagtttaactctatcatgcattatcatcatcatcctctgcttcagttcgacaaataactttggtattcggttgcattaattttggatacatatttagaagtgtcaattgctgtcgaacaaanttggctgggttggcactgtaatgtaacagacagttgaaatagaatgaaatttggtgtctggaaacttttattggtgagaattaattaatgttgaattggagatacctttccatgcttaagtaccttttaactatgagataatgtctcacttcacatccacatgctttgaactgcgggctggtattacttc

SEQ ID NO: 15639 - DNA, 347 bp, Glycine max
  unsure (1)..(347): unsure at all n locations
  Clone ID: PAT_MRT3847_114126C.1
atcaattcttggggcaagggattacaggctgtttctgattcattgttgctgtacaatacaactcgagttctaaggtctaatgngtcaggactnttcctctcactctgttgngcatttatagaagctgctatcctcattgtgcaacttgtnttgggcggtgctanctgggtggagcaactctcatanggatgcanagaatgnatnnatggatcagccgctattagagattcctctgcnagagaacncccccanaaccaggaacaatgnngatccnagcacgtgtgagattgtgatcnccanaatggtnatngggaacactgtgccaagattgaagcgtaatatgngng

SEQ ID NO: 15640 - DNA, 665 bp, Glycine max
  Clone ID: PAT_MRT3847_114127C.1
ccacgcgtccgtgaacttgtttggctgaacgaagaaccctaacctctcaccagcgcaagcttctcctgcaaccctccagacgatcaactgggatcccaaccgctctctcgccctcgccaggtgctgagtggctttaattgtaaatcttggcgctccatgtgtgaacctttgttgggtggtttaggctcagacttgctttgtttgcagatttgattggatcggcttcctgcatacttggactcgggaatttggaccaaaaacagttctcgaaatcttgcttgtttctaagtcgtgttcttgtttctaagtcgttaatgccagtgcattgaagtaatttctggcaagttgatagtagaggttcgttcattgtggcaggggaaggggaggggttcgaatttgggctacaaataaactcggtttacccattttggtggctttccctttgtcattggagccatggaaaatgttgatttgattgtctaaggcaaggccaaggtatgagtgcagcctatgctgtatctgctttgtaactcaagatttacggaccatggaagccaatggaatcactcatgacagtagcctaggagcgggggagaagggataagaagagaggtggggagacaaaacgatgggaagatttaagtaaaatacgtacacagccctgc

SEQ ID NO: 15641 - DNA, 175 bp, Glycine max
  Clone ID: PAT_MRT3847_114128C.1
ggggaagggaacagggagttttggtaaaagaaggaacaaaactcacactctctgggtgaggtgtggccgccgcaccttccatctccagaagaagtggtggcgccgtttgtgccttcccccgccgccgcccctaggaaataatactgggggcgtcagggcaattcggaaaaagacc

SEQ ID NO: 15642 - DNA, 483 bp, Glycine max
  Clone ID: PAT_MRT3847_114129C.1
gcttttctctctcacttccctccgataaattcttgagagaatagaatagaaaagttttgaacttttgacagagagcaatagaatagctgcatcatggggaaactggtggagattcttgaccaagggttcaggattgctgcaaggttttactctaactgcccccaaacaagccgcaagtactaccacccttcgtccctctccgacaaccacgatcatcactaccactgtggtgccacaaccagcggcggcggcggagtcaaagaggctgtggcggcgtggagcgttgacataaaatctcggtatagatgtgtagattttaggtgtatgacaaaaaataactgagaaatttgttgacgagattagatctttaaaagtcatataaatcctcacgtgggaggtattggtcaggcaaaaaaatttccatgaactcatcaatcttttttttttttagttttccgtatgtctccttctttgtaggcacgc

SEQ ID NO: 15643 - DNA, 523 bp, Glycine max
  Clone ID: PAT_MRT3847_11412C.1
gaaggcccgagcaaccttttcctggggttggggttttttttttttttgtttttttttttttttttttttagggaaaaacccttttttcaagccaatttccccaaatttttttttggccccccccccgggccaaatcctttttgggcaaaaatccctttgtgcgggggcccaattaccgtttttccccctttcggggggaaccccccccccaaacttccaaaaatttatttttaggggcccttgtcccccaaaaaaaataacccccccccccccggggcccgggggtccccccgggtttttcggcccggtccctgggggggtccccgctttcccttttggggggccttttaaagccgggggaaaacaggggcaaaggggttccccggggaaaaatgttttcccctcccaattccccccaactttccacccggaagcttaaagggtaaacccgggggggcccaaggggggggccccccccctttttttgggggggcccccccgccccctttccgggggggaaacc

SEQ ID NO: 15644 - DNA, 417 bp, Glycine max
  Clone ID: PAT_MRT3847_114130C.1
gggggggggccaaaaaaaaaaccgggggttgattcattttttttgaatttaaaaaacttaatcaaagaagggacctgaaactaatcctttgttgtaattggtggaagaacaaattccaccttggccccctttttaatacgattcccagcttttgttacctgtgcgccccaatcagttttggaagggattaccgcccgccctccggtttgaataaatgttccaaaaaaaattccaatccaaaaacccttgatttggaaattaaaaaagttaccaaacccaactcctacaggaatacctttggtgtaaaaaccccctttgttcaaatttgctacaatattttgcccccctggttcaataacaacccctgaaaatacagggtgaacccttttttttaaaataaaaattggccacaaaggg

SEQ ID NO: 15645 - DNA, 410 bp, Glycine max
  Clone ID: PAT_MRT3847_114131C.1
gagccaaaaacttccataaaaatgggcattcatccaaaataggtttttttttttggctaactaactctggacgaaacggtgggctatccccagggggggggggattaaaaatatattggtctttatgccctcagcatgccttacagtttttagccaccccgacaaccattgggtaaaaaggcatacctacatggaactaaaaaacaatggattttttaccctttactattttttggatttacaaaaggaagggtttcttcaacacaactaaataaatacgagggggggaacctaactacatactcaaaagcaccttttatcctttggttgggcacaatggagggctgtagcgaaaatgctgctcataaaaattgatcaaaagaaggggattaaatgtttttagatacttg

SEQ ID NO: 15646 - DNA, 257 bp, Glycine max
  Clone ID: PAT_MRT3847_114132C.1
aacagagccacaatctaagtaagtgttgagagaagagtgcgtttgtttgttttaaattaactagtaaaaatgtttgcaatggggggaggattcaagggagtggcgggtttaacgccaacacaatataataaatcaagggtacccaaaaaccgtattactgtgtaccgagcatatggtggtgtgttgtctggcagtgctgtttgagagagaataattctagctttcttgggtgaagagcaaaaatttgtttaaaaggt

SEQ ID NO: 15647 - DNA, 2523 bp, Glycine max
  Clone ID: PAT_MRT3847_114133C.1
ggaaatggcaacaaagatggactgttctctgtgctactgagagactatagagcacatgctgctgcatcttgcatgaatcgtttagctaaattgagtgcacgatggattggcaatcatgggttctcaataggcattgatgatgtccaaccaaaagagattctgattaacaagaaagatgaaacaatttcagaaggttatagggaatgtgataaacacatagaagctttcaataagggaaaactagaactcttagctggttgtgatgctgcgcagacattagagactcggattactggggtattaaatggacttcgtgatacggcagggaaggtctgcatgcaaaccctacactggagaaatagtccattgatcatgtcacaatgtggctccaaaggatcttctattaatatcagtcaaatggttgcctgtgttggtcaacaatcagtcggtggtcgtcgtactcctaatgggttcatagatcggagccttcctcatttccccagaaaatcaaaaacccctgctgcaaaaggttttgttgctaattccttttacagtggattgtcagctactgagtttttcttccatacaatgggagggcgagaagggcttgttgatacagcggttaaaactgcagacacgggatatatgtctcgtcaattaatgaaatccctagaggatttgtttttacattatgattatactgtaagaaatgctggtggctctattgttcaattttgctatggagatgatggcatggatccagcaggcatggaaggaaaaaatggaaaaccattgaattttgagcggttgtttcttaaaagcaaggccatatgtcccaatgatgaagatgatgaaattttatcttcctcagatgtgagtaaagtagttcatgagaagctctcagaatttgatatgtctaggttagcagagaaaggggtttttgaggtgggcttctctgctgacttcgttgaatctctacaatcctttatcaaagataatgcaaaattaacggaagaaggtttcactgatgagcattctcaaaacctgaaaaaatttgggcagaggatatctgggatcactcgtaaacagctagatgtttttttgaatatttgtctatctcgttatcattccaaaaaaatggaggctggagctcctgttggtgcaactggagctcatagtattggagagcctgggacccagatgactttgaaaactttccactttgctggagttgcaagcatgaatgttactcttggagttcctcgtgtcaaagaaataatgaatggaaacaaaaaaatcagtacaccaattatcactgctatacttgagagggatgacaatgcaaatactgcaagaattgtaaaaggtcgaatagaaaaaacaaatttaggccaggttgcaaagagtataaaagttgttatgacttcaagatcagcatcagttgttatcacccttgacatgaaaagaatccaggatgcacatctaaatatagatgctaatattgtaaaagaatcaattttacgaactaaaaagacaaaactgaaaccagagcatatcaagattttagatattaaaaagcttgaagtggttccccaagatgtggatagaagtaaaatccattttcagcttcactatctgaaaaatttgcttccgacagttgtagtgaagggcattaaaactgtggatcgagttgttatcagtaaagacaccaaggctgaaaagttcagattactggtggaaggcacgggttttcgagaggttatgggagttgaagggattgatggacgtaaaactgttagtaatcatatccacgaagtgagggacacactgggaattgaagctgctagagagagtattgttaaggagataaagtatacaatggtggatacacatggaatgaatatagacatacgccatatgatgcttctagcagatatgatgactgccacgggtcatatccttggaataaatagatttggaatttcaaagatgggcaaaagtgtattaatgcttgcatcattcgagaggacagcagatattcttttccaggcatctgtacgtgggagggatgactcgattggtggagtaagtgaatccataatcatgggtataccaattcaaataggtactggaatgatcaaggtcaaacaaaggttggatcctccggagttgcctcatggtaccagtcctattctatcttgaatttgaaatatatatttccagcaagaatgtggatcatccaggtcggagtgcattgaatgctgtcagcttaagttgggaaatttgaaatgtatgtgcgtatattttgccaaaaactattgcagaacatttctctgcttagagatgcatgcatggaatgagatttcctggcttccaaatggtctttagctatcaccagagttcaagcacatgagaaggggataggaaagaaaaggagacattattttcaaccgagcattgcttgtatcttttagccaaaatatgattttaatgattagtaatcattgtgaaattttgcatttt

SEQ ID NO: 15648 - DNA, 200 bp, Glycine max
  unsure (1)..(200): unsure at all n locations
  Clone ID: PAT_MRT3847_114134C.1
tttttttttngnnacctccggaaaaaaaaggttttttatggcaaaaaaaaagccaggggcattttagccatttataaattttgctgggtgcccctagcaacactccattaaaaaacagcactcataccattcaagagacaatttagtcactaaattaaacaaagcaggtcttcagccacaggtgttgatatcatgatcag

SEQ ID NO: 15649 - DNA, 224 bp, Glycine max
  Clone ID: PAT_MRT3847_114135C.1
cttcatcttttataggagaaaactgcgagctacgtgaggcaaataacattttgaaggccatacatgtggtgctcgaaccaggactctatactcgattacactgcctcctttgtgaatgctgtcctggactgactgacggagctgtgcctgatggttctaaagacgcaccttatgctgctgtacagagttgatataacattccacctcatacaaggagacatgac

SEQ ID NO: 15650 - DNA, 1119 bp, Glycine max
  unsure (1)..(1119): unsure at all n locations
  Clone ID: PAT_MRT3847_114136C.1
ctattgtgagaagatagttttttctctctccaagttcatggattcttcaaactccaatggagcatcacagaggctcctggacttggctcaacggctccgcctgtacaaacccccaccattccctgaagacatcttggatcagatcatggaagagaagggagataaggttgtctcagaagtgagttacacgaaatcagccaccccaattgctcaaaacacagcaaaaatcggatacaagagagctgctgttttgatctgcatctttgaaggggatgctggggatctgagagtgatactcactaagcgctcttccaagctttccacttactctggtcaagtggccttgcctggtgggaaagcggaggagggggataaggatgatggggacactgcaaaaagagaggcaatggaggaaattgggttggatcctgaacttgtcgatgttgttactgttcttgaaccatttttttcgtagtacctcatgagagtggttcctgtcattggcattcttcatgacaaaaaagcgttcaaacctgttctgaatcctgctgaagtagaagctgtatttgatgcacctttagaaatgtttcttaaggatgaaaaaaggagtcaaaagaagatgcagtgcatgggagagaattatctgatacatttgtttgactatgaaatcgaacataaaaaattccttatatggggtttgactgctgggatcttgataagggctgcatcagttgtgtaccaacgacctccagccttcatggagcagaatcctaaattcaagcttcctcgggatttaactatgtaataatgcattgaatttgacatttaatgtatttttgcccttaacatgtgctcattctactattcatccacaattgtagatttcaagagtaggtaggtatttatatgtactaagaaaggaaaagtgtccaggcacttggaattcaaattcctacttacagaatgtcatcagtaagtttcattggtttactccaaaagatgtactatcaagaatcttagaatttagaataaaccattgatttcatttttaaaaaaaaaaaaagggcggccagtgtgagagggcgnccgccgaataaattgctcgtcgacacgggaatt

SEQ ID NO: 15651 - DNA, 129 bp, Glycine max
  Clone ID: PAT_MRT3847_114137C.1
gacatatatcttagtcagtctcagctaggtactggtgtgggcgttattcggtcatggatctgtgacaagtatgcgatacggacttatgcttctcgactgaagatatcagggtgaactgatcatcctcta

SEQ ID NO: 15652 - DNA, 419 bp, Glycine max
  Clone ID: PAT_MRT3847_114138C.1
ggctcgaggggacagctaaaaattgtgtgtttaaactaggtgacagggtaaaatatagttcatcttctgggggcttgtatcagcttcagacaatttcttcaaagggtccagctaatggaagtcgggggaaggttgtcttactttttgatgataatcccttgtcaaagattggcgtaagatttgataaacccatacctgatggagttgatcttggaggtttgtgtgagggtggtcaaggatttttctgcaatgtcaccgatcttcgattggaaaacagtggcattgaagaacttgacagattacttattaatacattgtttgaggttgtggttagtgagagcagaaatgcacctttcattttgttcatgaaagatgcagagaagtctatagtaggaaatggagatccattttcatttaaa

SEQ ID NO: 15653 - DNA, 495 bp, Glycine max
  Clone ID: PAT_MRT3847_114139C.1
ggctcgaggctaaacaaagtcctacagccacagacatggccaggtgcatggatccatcagctagtgaaccagaaacgcctaactcctcaaatgcacctactccatggctttgagtctcaacctaagttggaagctgataatgtaccatctacctccgggacagctaaaaattgtgtgtttaaactaggtgacagggtaaaatatagttcatcttctgggggcttgtatcagcttcagactatttcttcaagcaatcgcatattcaggggtccagctaatggaagtcgggggaaggttgtcttactttttgatgataatcccttgtcaaaaattggcgtaagatttgataaacccatacctgatggagttgatcttggaggtttgtgtgagcctggtcaaggatttttctgcaatgtgactgatcttcgattagaaacagtggcattgaagaacttgacaaatacttataatacattgttgaggttgtggttagtg

SEQ ID NO: 15654 - DNA, 531 bp, Glycine max
  Clone ID: PAT_MRT3847_11413C.1
gcaacaacagggcaacgcgctagatatgactctggtgacctggtaatacacgatcctatatatggtaggccggctccagaggcaggtgcatcgtctgatatggtcatgtcaccatcctttgacaaggacattgccacctataaatacccattgttaaaaccgacattactactcttgacaaggccagctttagacaaccttggatgggagtctaactgtggttacgatggcgtacccattgaacatattctatctattatttataaatgcctgtcaggtagatcctgttcacgagcacaggatctgacaaacgttgacatacaggtggattactggccagttgcaatacttgaagatagtggactcagctctggcacagctgtgctattggaaacgcatggaatgcaggtatcttctggatggtatacgagagacagaattgctagataacgatctaagatgggcttcggtgaggtgtacgtgactgttgggagcgaaaacgactgtactgtgctacaaattctcgatcag

SEQ ID NO: 15655 - DNA, 827 bp, Glycine max
  Clone ID: PAT_MRT3847_114140C.1
ccccgccgccgccgcctccactgcccctccctcccccacttcctccccagaaaaaaactctggttgcgattttgagttctcggcccggttcgtttcgagcgggtttactggttccggttcgatgagctcggcggacgagctgttcttgaacggtcagatccggcccatgaagctctcgacccacttggagcggccgcaggtcttagctcccttgctggatctcgaagaagagggcgaagaaaacgaggaagttgaagccagtgtacggggtagagatctgaggctgcgcgacaaatcactccgcagaaggaccagatccctgtcacctcttcggaacaccgccgttagagtggacggagaacgagaaaaaaacggaaaagaaggaaaacgtggacccttccgtttcgagcggaagtggaaggagttccaagaggtgggttttcttgagggatttcttaagaagcaaaagcgagggaaggagtaataacaagttctggtccactatttccttttcccccgccgcaaaggacaagaagccccaaaatcagggaaatgggccgcagaagcccaagaaggtcgccggaaagcccactaacggcatcgggaagaagcgagtgccggcggcgtcgccgcacgagttgcattataaagccaacagagcgcaagcggaggagttgagaaggaaaacttttttgccttataggcagggcttgcttgggtgcttgggatttagttccaaaggttatggtgccatgagtggctttgctagagccttaaaccccgtctcttccaggtaaaaaaaaaaaatatatactggagactagttc

SEQ ID NO: 15656 - DNA, 362 bp, Glycine max
  Clone ID: PAT_MRT3847_114141C.1
ccgcctacgtcagctaggctcctgtgcggcggccgctttttttttttttttttttttttttttggcggaaaaaacatcaaggtttatgtattggagaaaaaaaactacctaagcctcgatctactgttatgtgaagtgtctgatgggccatcaaagtctactgttaaccatggtgcgaccctttaccccttggcagaacctccccatatggataggtgaacccttcctaattttggtgccccaagcacggaccgggtagcaagaccaaaacttttacctttaaacgcatgcctattggtgagttgacatgagctctataattcaaattggccaaaaacctccgtaatggttactcgagggca

SEQ ID NO: 15657 - DNA, 148 bp, Glycine max
  Clone ID: PAT_MRT3847_114142C.1
atcaaataaaatatgataagttcctggggttcactacccaggaagattttgggcagacaaacaagttatttttgtagccttcttgaatttgtctgagcctagagaaaaaattaagaaaaaaccacgctcattggagatgaatggggag

SEQ ID NO: 15658 - DNA, 358 bp, Glycine max
  Clone ID: PAT_MRT3847_114143C.1
ggctcgagagctccgctaccaccgaacacgttcgtacaatggcgggggtgacgaggagatggaacggggaaaacttaggtctaccctagcacccatgatcctgaagctcgtgctgagctgcgcaatccaaacggcggcgatctcattctatcgctagccgaacccagcatcgataccgaccctgggcggggctggacggggagagatcggaccagaggagctccaaccacgagcagagcgagacaagaatgtggcccgagtgagactacaaccattgactggttgtgatggagtttccatacggacctgcacacactcgtgaacaacggagtgacacttacgttgacacttgtgccac

SEQ ID NO: 15659 - DNA, 350 bp, Glycine max
  Clone ID: PAT_MRT3847_114144C.1
ggggctgttttgacaagacgacatattgacacagtggccggaacacaagcgaacgtaacgaatgctggattacacacatgggagccggttattataaaagatccacatgttatcactgcaaaagcactatcatacagatcagctgtgagagagaatctgatgaggccgggatacagaatagtaggaatcattgcagaccaatggagacatctgattggacaccacacaagacgaagcaggacctttcagcttgctaatacactgtactacattgagtagcaccttgacctctctcaacaatctagctagaagttgctgctatctatatgtgatcaggcatgctgatatgc

SEQ ID NO: 15660 - DNA, 395 bp, Glycine max
  Clone ID: PAT_MRT3847_114145C.1
gaattatatactttttataaccaccccaaaaattgtgcagtgatgcagcaaattttcactttaggggacaaaccaacaattacccgctagccattcctgcccttctcagggctatcagctatgatagccactgtgggtgggcgggtccaaaaattttttaacctacctaccaaacagacgtttgatatacacctgatcccattgattccaggtccaagatcttccctaaggggaacaagcaatccctttctcaagacggaagcacacgcttgaactgcccggatggcactgccaaccatatcaccacaaattcttgttcgcatgattagctgattgcccaaagggcccctatgtagtaagctcccaagacacaggggcgggtcccgagacaccga

SEQ ID NO: 15661 - DNA, 430 bp, Glycine max
  Clone ID: PAT_MRT3847_114146C.1
gggaagagaggactgatagaatagaattaactatctatccttctatacctcatccttctttttttctttcctcttacaatcaaacaaatcttattcttctgggtttctaattcttttctacattcaaagatatccataagcagttggggcttatgacactataaacacttttgtcataattattgtccctccagtgctcttcaagcaggcggggggaaacacatttcttcaaggcatattcaaccaaatcaggggaatctagcttagttggttgataaaaaaaatattcaaccaaattcgaaggtccaaaattagaagatttaatagcctgatccagaccaaattgaaaaaaagtcttacacccaaaataagccatgtctccaagcacattaagaagagccataggggcagtgaaggatcaaacgagcat

SEQ ID NO: 15662 - DNA, 329 bp, Glycine max
  unsure (1)..(329): unsure at all n locations
  Clone ID: PAT_MRT3847_114147C.1
tnnnnnnnttttttttttttttttttttttggatcgaaaacaaaactaggtgcaggcacggaggaaaccgatattatgtgcatttatggcattgaagaagccttattccaagcttaattcctacaggcgtatataaacgctcctctcatccaaaacagccggtaatcggattggtgcactgaaccttgaaagtcaggggggcatgcaggagatatggaaccatggccagggtctgcacggtgggcaaagagggtgacaaaaggaccggcggcggtgtagatgcgctggaaccaggcacccatgacaggaagcttgggcagtctgccata

SEQ ID NO: 15663 - DNA, 641 bp, Glycine max
  Clone ID: PAT_MRT3847_114148C.1
ttcttttttttctgtttgtcttgtgtagctcaggagcaaaggttgtcgccattgatgtacatgcagcaaagcgtctcatccagaccggttccatttatcttgatgttaggtaacgcatccattcactttagaggatacaaagttaataatctaagtgattaatgagcgaaaatcagctttctttcaacaacaaaaatgacaaacatgttataatattaacgggtttttttttttcattaacttaatgacatttcttattactttatcttttcttattttagaggagtaattaaaattcatttaaaggaatttttttaggtatttttcttctctcttttaaacctaaatcatttggtaggacggtggaagagttcaagaaagggcatgtggatgcagttaatgtccttaacattccatacatgttgaatacacccaagggtaagaaacttttttaatccctattaattactcaaactagttttcgatccatacacatctctatatttattatttagcacatgacagtatcagtatgttgtgttacaaattttctatggttaaaatttaagatgcttgtgattttggagagcaggcaaggtaaagaatccagacttttctgaggaaggttcatcagcttgcac

SEQ ID NO: 15664 - DNA, 265 bp, Glycine max
  Clone ID: PAT_MRT3847_114149C.1
ctcgagccgattcggctcgagattcatcatatcatagctaaaaaaatacaggagagagaaagcgaaaaaatacctttttttacgagagagaaagagaaggtagccctagaaaaatatgcaaccagataaggacttttgcagctgagacactgcaaaaagagttattatattgagagagaaaagaaagattatctttcttttttttttttccccttttcaatttggaagcttcctttttctgagcattttacccccttttttccat

SEQ ID NO: 15665 - DNA, 351 bp, Glycine max
  Clone ID: PAT_MRT3847_11414C.1
gggaccggaaatgaacatcatttaaaaaaaggaagctttaggcatacttacccgttatatgcaagcaaaaatatacacgttgttcaattaaaaaaaaaaagggtttggggaaggagctaaacaaagggaattgggaaacttaattaaatcttgccccggggacctaactttgggggaaggtgggggccctttttgattgggaaaaaggcacccgaaactggggaactgaaatatgccaggggggaaccaccccccaagaacaaaaacttgggaaacaaacccctttttgggaaaggggagggaaatggctcaaaaaacttgctcttaaaagggttgtagggggaaagggca

SEQ ID NO: 15666 - DNA, 495 bp, Glycine max
  Clone ID: PAT_MRT3847_114150C.1
ctcctgcaaagcttccaacactggtggacatgccagccaatgtctctggctgcggcgacggtgctgggaaccagagaaaatttgatttcaaattcattcgcatttccctctaaatttcagagattatcgtcctcgttatcgctgaacattgaaagccctcatttcatgacctatctcatttctcatcatgacctagctccaggctttgctccacgaaagtgttgttgttcaggtgaggtttatgttgtatcaagtgatggcaatttctcctctcctttcaatttcaattgtatgattatgggtctttgggtttatgtgtaaggcattaattggagattgtttgggtttagttagaagaaaagtatttgaaattgtgagatgttgttgtttcttgcataattgacttgctctgcgagacgttgttgtgtggattttaatcaaattactgtgagtttgtgctttcttttgtgctcttaagtggtttggagtaaggca

SEQ ID NO: 15667 - DNA, 1034 bp, Glycine max
  Clone ID: PAT_MRT3847_114151C.1
acgaggttgaggtgtctggcttcgtatagtatcccttcctccctcccactgcgcagcacacagacgcacagacaccaccaagccctaaaatctccaacaacactcagaaccacacattttagggttaaagaggagaatccttagcctagttcctctctgacctctgtcgtgaattgtagctacccttgcttgatttctgtatccaagtgcaatcgcctcatgtcgaggatatgcgtgaagaatttgccgaaagatgtcgccgaggatgaactgcgggaattcttttctggaaaaggaggaataatcaccgatgccaagcttatgcgcaccaaagatggtaagagtcgccaatttgcttttattggatatcgtactgaagatgaagctcaggaagccattcgatatttcaataaaaatttccttcggacatctagaattatttgtgaggtggctcgaaaacatggggatgaaaatcttcctcgtccatggagtcgacattcgaagaagaaagacgataaagtgactgccccagatgtggagaaacctgctagagctaataagggacaaggagagaattcaaagggcagtgttggtgatgatgttgatgacccgcagcttcaggattttcttcaggtcatgcagcctcgggttaagtctaaaatgtgggcgaatgatacatcaattgcaactaatgttgacaacaggcaggcaatgccaaataaggataacgacggggcatcggttgcaagtgatcagagtggctcattagaagatggttttctggaggattctgaacccaagaacaagtcacatgagcctgaacgcgataaagtcatttctgatatggattatttcaagagtagggtgacgacagagtggtctgattctgaaagtagtgatggtgaagatgatgatgatgacaatgattcctcatgcattgacagtgatagagatgatcatagtaatgctggtaaagatgaagacaattgtgattcaagaaatggtgctcgagaggtagatgtagatctagaggg

SEQ ID NO: 15668 - DNA, 432 bp, Glycine max
  Clone ID: PAT_MRT3847_114152C.1
acataactatcttgtgtgtcaaacggatgcatactggatacaggtgtggaggataacatacgctaatacaacggaggaacggtttcttaccattgcgttgaggagggctgaggcttattgaattatttaaattggaaagcaagattgaatcaacggtacacatttattaatggaacgaacttatacgcttcctactgagaatgtttggtgcatgtcactcaatctagaacgtataatacttgatgcgatgattctcatagcatagtgacaagatcttatatggaaaactgatgatgtgagccttaacagcacttatgaatgctgtattaatatagcacagagatgtgctcaatgtgtacgaaacatgaaacatgtatttatacaggtatgagtcctggtggttggaaggtactggttgaatactatgatagc

SEQ ID NO: 15669 - DNA, 464 bp, Glycine max
  unsure (1)..(464): unsure at all n locations
  Clone ID: PAT_MRT3847_114153C.1
gagaatagcaacaaaacacctaaaaaactgcatctaagttttgtccttcttgaaatccaatttactgtccaacttggtgctctagatatatatatatatatatatacacacacagacacgcactttgttatcgttctgtctgcaattatttttcaggaccaatagctttttcaaaaagtagatcaagatatactaatatttaattcaaccttggcataaactttcgagattttctatcaatttgttgtagagatgcgttctttaatttaattccttttgcaatattatctggaatctctagttatctgccgttcaaaagctccaagagaagtctttttttttcttcttttaagcttttgtgctttgtgatactaaacattgtgtngtcttctgtagcttgagaaatggcacnagaaacctttctattcacatctgaatctgtaaacgagggtcaccccgacaac

SEQ ID NO: 15670 - DNA, 257 bp, Glycine max
  Clone ID: PAT_MRT3847_114154C.1
gaaaaattgtcggcggcgcgaaaaacaacaacagaaaacatctgcaccgcgacgaggatgtcatgttcttcagctccacttcgatttcctccacagattcctccagccttggattctcctcctccgacaccgaatccatctcacgcgcctcgtgtttcgcgccacaggtggggcgcggaggaggaggaagcgcttcattccgttccgagaaacagggaatgcgcatcttcgacagtttctgtcgaacctcctcccat

SEQ ID NO: 15671 - DNA, 517 bp, Glycine max
  Clone ID: PAT_MRT3847_114155C.1
agataatggtttaattcatatatatgttatcctgtcaattgaaaaaataagtgatgctaggatgtttcagtatgtgttatatcagggtagttaatcacactggatttctgtcacatggcctccccatgatgcataagcagatgtgtggtgtgttgacatggcagcaaattgcagctgcaatagtgctttgcggctgttactccagactgtaatgaacttgtcctatgctgatagttgccttaatcatttaattaagaagtccagcgcaagattgaccttgacccctctatatctggtgcagactttgtatgtcagatagctgccaagcatgtgtgatactggttttgattttattattattttttacattttccaatttctgcctagtaagttgagtttgtaatatctcttgctaaaccagctcttcatctaaagtcttaacaaacaattttgaaccaggatgctatttgtttttcaatgtatacataattggggttcacttgggatttttagaacc

SEQ ID NO: 15672 - DNA, 1372 bp, Glycine max
  Clone ID: PAT_MRT3847_114156C.1
agcacgggttcgcatgcgagcgacagcaggcttttccatcacacatggcctccccaagctccaacaggaacagctgtcacagggcaccaacttcccccatcatggaggatctactgctcacactgctccgcatttgtcttcttattctccaactcatcaagcatcacagtttaacagccagagctttattggacaacaagggaatgcagccccctatagctcaccaattaccaatcaatcatttgcttctaatgcttcacaatccaattcttttgtttctaaaccatccaaggacaagttatgagacgaaatcaacagtttgggctgatacactaagcaggggattggttaatttgaatatatctggacctaaaacaaatccattagcagatattggggttgactttgaagccaattaataggaaggaaaagagaatggagaagcccaactaaccacagctgtaacatcaactgtgaactatgggtaaatgctatggaatcgggttcaggtatgggtcggtctggtgctggttctctatggtctcctcaaaacccaatgatgggttctggcatgggcacacagagtgctgtttgtaaggcgaatggtcctagtgttggtatgggtatgggaggctatggaggaggcatgaatgcatcaatgggtatgggaatgggggggatggggggaatgggtatgggacaaggataccagatgcaacccccaactggattgcctcccggctccaacatgccaggtaattataataactccatgatgggttcaggtagttatggtcagcagccatatggtagttatggtcagcaaccatatggcggctaccgatgagatagaacattatgcctagatagcaaggtgaagtacattactgattgttttgctacaagttgagaaagagaaatgccaatacagtgctactagtagtagtctgtattttgaatttatagcggtgtatcattaaagctgcagtttgctgtaaagtgacccagtgtgatgtatgtgtatttcttgttataaatatgctgttaccattctttttgggtcaccctttctgtaggtgctttgagcatcaatgttgtgtaccagtgactggatataataaccttgcttgggttattgctttctttgcttgttcctcatttttttaacaccaacaggtggtttgatattaatataatttttccattgtacctttcgctgcggagtatgtgtgcttattcttgttttttgtactatgctttccattcatttttataggtgttttgttgtgcaccagggaccccatcaaataaccttacttgggttattggtgtttattttttaattaatacccccaacgccaaccagagttgt

SEQ ID NO: 15673 - DNA, 517 bp, Glycine max
  Clone ID: PAT_MRT3847_114157C.1
gagagaactagtctcgagtttttttttttttttttttttttttttcttgtacatgagatgtagaaatgtgaactgcaagagcttacttcctgttgatgactgtgactgcaagatctgttcagggaataagggtttttgcagttcttgcatgtgtcctgtttgtatgagctttgattgtgcaagtaacacttgtagttgggttggttgtgatgtttgttctcactggtgtcatgctgcctgtgccattcagaggaatctaatcaaacctggtcctagtttgaagggtccttctggaacctctgaggtgcagtttcattgcattggctgtggacatgcttcagaaatgtatggctttgtcaaagatgtctttgtgtgttgtggcaaggattgggggctagaagccttggcaaaagagcttgactgtgtgaggaggattttccagggaagtgaagatcggaaagggaagggattgcatattaaaacgggaaatatgctgttaaagctgtcggctaaactg

SEQ ID NO: 15674 - DNA, 665 bp, Glycine max
  Clone ID: PAT_MRT3847_114158C.1
gtcgaataaggttgatgagataatggatattagtcttgatgttttccatagtaactcgcttaaagactccatgcaaaagttctttcagcctgaggttttagatggcaacaataagtacaagtgtgatagttgtaagaaattagtggccgctaagaagcagatgtccatacttcaagcacctaacatccttgtgatacaactaaagtgatttgagggtatattgggtggcaagattgacaaggctgttgcatttgaagaggttttggtgctttctagcttcatgtgcaaagcaagccaggatccccaaccggaatataagctctttggcactattgtgcattcaggctactcccccgaatctggtcactactatgcttatataaaggatgcaatgggtcggtggtattgctgtgatgattcttgtgtaactgttgcaacccttcaggaagttttgtcagaaaaggtttacattctttttttctcgcgaactaaccaaaggccagtgtcaagtagtaattctcttgcttcaaatggtgtaaagcctcattccaatgggagccaaacatctgaatgcccaaaggttggtgtaccaccaaaagcagtgcatgcaaaatcgaattctgagctatcttcttggaaggatataccaagagtttctaagactg

SEQ ID NO: 15675 - DNA, 495 bp, Glycine max
  Clone ID: PAT_MRT3847_114159C.1
ccaatacgtgtttaaaaccgtttagtccaaaaggggtattggggacattggcaacactttttctaaccaccaaaagcaccaaattgggttcaaaaggggggaatataataaaacaatattaaccggggggcaccttaaacaagcgaagaggggggccttctaaccctaaataaacactatataatctaaaaactctcgcacccaaaggggccccggggggccctaaactaaaaaggaaaaaaaaaataaatcccttatctcccgaattaggggcccccccggggggccccaaaataacctatttaaactgagccaattaaccccccccaaccttttggcccttgcccctggggggaaattgcccctctggaactacatttaagacaggtgcgccaaaacaaaaaaaatggaaactaaggttccttacagcccaaaaaacggatgttcactttaagaggtggggggcaacaaaaaaaaaaaggggggggcaagggc

SEQ ID NO: 15676 - DNA, 810 bp, Glycine max
  Clone ID: PAT_MRT3847_11415C.1
gaattcgacgctcgtacccggggatcctctagagtcgacctgcagccagagggcagattcagagggtaaggtatggagagggtttgatgggccccactaagatagctgggtgacgtcatcccaagagtggagaattttaggtcattggaaatcagaaatgaggaatcaatttgccactgttgggattctgccttaagatttttcactagggctcatgataatatacgtgggaagtaaggtatgatgccactgatggtgtgctgctatttggctttggtgggtgggtggacttgacttgacttgatagataacacaactaaagacatactactaagcccactcctctagttaagcaacacagcttccacctcttggtagtggcagcactcacatctaaatcaatatatgttaatatggatcctgctattttaaagtaagcatgtacgtaaaataagtaatctcaaacaaacaacaacaaaagtcacagtgcattagtgcatgtttaggttaaagttaacaaacttaattttggagtagtttttattttgcaaactggattcgcaaaaaaagctttgatcttgcttttatgaaaacttgattttagacaaaatatatacaagtgtccgaacgtacgtttgaaaataatcaaacatgacacaaaaactgagtttattatccaaatttgagtttggaacactacaaatggggaatccaaacatgcctcttatcttactaaggtaagtaattttcgaacccctattaggaaaataaatagtcaataatacatacatatgcatatcaaattttgaa

SEQ ID NO: 15677 - DNA, 255 bp, Glycine max
  Clone ID: PAT_MRT3847_114160C.1
acctttttaattcctgctaccatgtcaccaccatctgcaattcacaatggcggtgccgaagacaagcccaccttcaccacgcacgagccgggcttgagcgaggctgttgcgaacatgaagctagtcatcccaaagccacctacgttcgatgacccgcacgaggagagaaaatatctgaagcaaagactcgctgcggctttcagaatcttcggaaaatatgggtacgacgagggcgttgctggccacatcaccgtc

SEQ ID NO: 15678 - DNA, 1833 bp, Glycine max
  Clone ID: PAT_MRT3847_114161C.1
cgggttccgggtcgcaagcgggttgagctacaaaaggctcttggaaatcaccttgcatggaaagataggtatcccgtgttctttgacgatatagcggcacgattacttccagtcatccccttgattatttatagacttattgaaaatgatgcaatggatacagcagaaagactgttggccatgtattctccattgcttgcttattaccctctaagatttacatttgttcgtgatatacttgcatatttctatggtcatcttcctggaaagctcattgttcgaatcctcaatgtacttgacatcagtaagattcccttttcagagtcattcccgcaacaaataagtttgacgaatcctgtcatgtgtcctcctctggattattttacgactctgttactgggaatagtaaacaatgttattcctccattacataacaattcaaaatctggatctatgggagatgcgtcaagcaatacacttcgaactgcacaaagcaagcctccagcagtatctcagtctgggtcagcaaatgcttcagagggccaaaaggcattttaccaaattcaggatcctggcacatacactcagttggttctcgagactgcagttatcgaaatactttcccctcccatatctgcctctcagatagtacaatcacttgttcaaattgttgttaatatacaaccaaccttgatccagtccagcaatgctcttcatggtggttcaaacagtgtagggcaaggttcagtgttgccaacatcaccttcagggggaagcacagattccttaggtgcaagcagatcaactccttcagtttctggaataaatacctctaattttgcttctcgaagtggctatacatgccaacagctgtcttgcttgttaattcaagcttgtggcctcctactggctcagcttccttctgattttcactcacaactgtacttggagacaacacgtattataaaagagaactggtggcttaaggatgggacaaggtcacttggggaaatagactctgctgttggctatgctttattggatccaacatgggctgcacaggacaatacctccacagccattgggaatgtggtggccttgcttcattccttcttcagtaaccttccacaagaatggcttgaagggaccaatgttattatcaagcaacttcggccagtaacatcagtcgcaatgttgaggatagcattccgtgtaatgggaccactccttccaaaacttgccaatgctcatgcacttttcaacaagaccctctcatcactactaactatattagtggatgtatttgggaaaaactcccagacatcaattgccgttgatgcatcagacatagcagatatcattgacttcctccatcatgttgtccattacgagggacagggagggcctgtgcaggctagcagcaaaccacgaccggaggttttggctctcattggaagggcatcagagagtttacgtccagacattcagcatttgctttcacacctaaatcctgatgtcaattcctctgtgtatgcagcatttcatcccaagttagctcagaatccaacttaggtgcaggagtataatatactacgaagaaacctgcacatagctctatttgtagttcaaaaatggtacagagcaacatttcttattgtggattcttcaggttatatttcctgtataatcacttggttggagacctgtagcggatgacaattacacaacgcaatttagaaattgtaagagtcaagagttgtatataaattaatgtatatgctattcatttttgccaaattagcatcagaaaagcttataaatgtattgcatatc

SEQ ID NO: 15679 - DNA, 152 bp, Glycine max
  unsure (1)..(152): unsure at all n locations
  Clone ID: PAT_MRT3847_114162C.1
ngttaatangcggggtaggnaggnatcggctcgagganggntctctctctntnncaantncaatnatttnctgagaganangnananaatacaantcgcgttcagatacactcanacncaaacacaagcnncaatcgcnantctctaacttt

SEQ ID NO: 15680 - DNA, 2134 bp, Glycine max
  Clone ID: PAT_MRT3847_114163C.1
attggggcgtccaaaagtaaatatgataatcacgtgaaagtctatctcagattacaatgaatctcatgtacaatgaatcccgtgtacaatatacaataataatgattatgaattcacagctaactttcactagaaaaaaaaagtgtaatggtacaaaataaattacaagtattgaacaatttgatttcctaaagacgattcctttacatttatagcttaatatatttcgtcatgttaccgttttcacttttgggttctacctgtttacacatgcaatctggcatgggaaaagtatatagagacccaccagccttttttatttcagttcccttttgatcactatgacgaagcatgtctgtcatttgctgcttgaatacttcccatcttatattaggattatcgaataatagagccaatcttcttttgtcgggttttattgtctttgcatgtccaccatacatatagcgcctgtgacccatcaagaagtgggggaaatttccaccttgggttgtaacaaatacttcactatgaaggcaaacagtataatcaagagcggccaacctagtcgaatgccccataaattgagcaagctcttctggtgttgccagcgtattcttggtttgtaatcgtggaaacatctgtttaagtggtgccatgtacttctgttctttataaatctttcctgctgcaacatatactgaggttgtgttatcaaaacccatgcctctaagcatcattcccacctctaaaggagtcagtgggcatcttccatccacgcgatttgcaccaggctttattatcctatgctttcttctgaatttacctcgccaactcctttcacgagcaatatccatttcaagtttctcctccttcccaccatcatactcacagcatgaaaatgcaaccatatcctcctcgaaacgaagatgcaccgaaacatatttccctccactatgggagctatatttaaccatccgatcaaccatgctttctgcaagtgttcgtataggttctgaaaatctaagagctccaaaattggcaaagcacctaagcccttggatttttgagggtactgcttgagctaatctgttggagaaaggtgcaatgcgaacagcccccatttccaaaagctgaggaaggaccttctgaagatagtgagctgaactggaccaaccttttactctaagattgacaatattacttatgttattgtcaaatcgttgaagtatgtcatcagggagttctctcaccacatgcacacgatttccaagtgattgtatgaagaaattttcatcgaaaatgtcaccaaaattgcttgagtctcgccatacactatttaaatgaaatataggaataagaagagttgcatttagtagtccagccacagcaactgcatcacatatcgacaagcgttgctgattcaatccaccatttgcttcaattataaggaacccatttgactttggcaattctgtttcaggaagacttgcgttggcacagggcttccactctctaagctcgtttttagtccatgctttcatcaacacattgagtgtagttccattatcagcctccatgagaggccacaagttttgaaagagctgaggactcctataaacagacccgggaggagcacgcttgtgtacaagaacgacaccgttctttatactgacaacatcgaagctcaaggaacccatatacaacagcattcccgaaatgtacaacaaaggcgcgaagagaagcaaacctcgccttctgaaaactgccgacataagaataaagaccaacttctccatggaattgctctccttcgacgaaccccagcctctgctcttgctccgaccgtgccggaaccgcggcgacgacggtggcgaccgcgctgctccgcccaggcgactgtaaccatgcatttggattggaggatttgattagagatccgacaacgccaacgagagagagagagatcccaatttcagccaaaattaccacccagacagacacattacaagggatttgagtgcgtgtggttgaaatgggaaaggaaaggcgaaaattgggctttacaaaataaaaagttccgagaaaagggaaagtgtttgtcggtaaagaatgagcgtgcgagagcggacgcgtg

SEQ ID NO: 15681 - DNA, 485 bp, Glycine max
  Clone ID: PAT_MRT3847_114164C.1
tacggctgcgagaagacgacagaagggctcatctataccatatgatttttttattaacaaatattaattattaaattttgtttaccaaaaaaatcgaatccataatttttccatcatttctttctttcttaaccattcaattaatcttatatttccacgatataaaattattgacacacatgatttaaaatttcaatacaaaagaacaccattacagtgaataaaagtgtaaaactgcaatttgaaattttatttgtatcgaaagtaattttttattgacgggtgttatttagcgtgagtggaatttactagaataaaaagttaaatacctgttttttgttaaaaaatatctatcttgtttttaaatgctgggaaaaaaaagaaaataaaaaaaatagtaaaaacaaaagagttaagctcttataacaaagacttcattgcatcatagtaaaagaggggatgcaatgcggagagaaataagtaaa

SEQ ID NO: 15682 - DNA, 377 bp, Glycine max
  Clone ID: PAT_MRT3847_114165C.1
aaattaacatcaatagtataagcaataaactggggatgttttctcaacaaccgcgattgtattattttgcttggggttcgaggccgaggcgaatacattcgccaaattttaaaattcgccaaagtgccatttgaggaagtgagcataaacattgaagactggcccaaatataaagaagaaatgccccttggccaaattcccgttttggaggttaacggcgttaatttctcccaatccctggccatttcccgttaccttggagaaacttacggactatcgttcaatgatccgctggaacgtgctcttctcaatatgatcgccgatcaaaattttagacactcagaacagcgggtgtcttcaaagaatggcccatggtc

SEQ ID NO: 15683 - DNA, 973 bp, Glycine max
  Clone ID: PAT_MRT3847_114166C.1
tacggctgcgagaagacgacagaaggggacacaaagaagcgaaatcatagttagaagtcttaaacattcaacctcaatttgcagagttctaatattacattgcagagaaaatgtctttgattccaagtttctttggtggcagaaggagcaatgttttggatcctttctccctcgatgtgtgggacccttttaaggattttccttttcccacttctctttctgctgaaaattcagcgtttgtgagcacacgagtggattggaaggagacaccagaagcacacgtgttcaaggctgatattccagggctgaagaaggaggaagtgaagctggagattcaagatgacagaattcttcagataagtggagagaggaacgttgagaaggaagacaagaacgacacgtggcaccgcgtggagcgaagcagtggtaagttcatgaggagtttcagattgccagagaatgctaaagtggatcaagttaaggcttccatggaaaatggggttctcactgtaactgttccaaaggaagagattaagaagcctgatgttaaggccatagaaatttctggttaaactatgttgctctgtttcttcgttattgaaaagtcgtgtgtttatgttttcttattctgaggatcatttgtatgagtcgtgtaaaaaatatgtcagctattatgttggttaagacttaagaagcctgattatgttagggcaatacaatgatacaaatctctggttaaactgtgttatctgttacttggttgaaagattgtgtgtttggttttcttcgacgagttatatgtgtaagaaagtaatagaataacagttttatataaaaattctatgttgctataaaagatttattatcttaggatctggtatttgcatgtacttgcacaagccggagcagatgtacatgcaccatcccaatgcatgcatgaaaaagcaaataatatactataccttcccagtcc

SEQ ID NO: 15684 - DNA, 365 bp, Glycine max
  Clone ID: PAT_MRT3847_114167C.1
aattcggctcgaggaaaatatttgtgttaaattaacaaaattaatttaagctctttaaaaagttaatttaaatatataaaagaaaatatatatcaacatatcattattaccttctattgtaggtaaaataaaatgatttagccgtggaccacttaaaacttcttcatggtagacaaacatgagaacacacatgtaaaagagtgagaatattttgtccatagattaatcaaattaaacacatctaaagagtcattttcatcaaattaaacttattaaaccaaccaaactataaattttttgtttgagtggtagtgaattcaattttcataaagttttttattccagtattaattgcagatgaaaaa

SEQ ID NO: 15685 - DNA, 248 bp, Glycine max
  unsure (1)..(248): unsure at all n locations
  Clone ID: PAT_MRT3847_114168C.1
gtgagaacgaaaaaagaaaaaanaaaccctaacgcactacgagaccctganatttttcancttcgtttctcattctnctttttgatcatggacgtcgaggtgcggcanatcttcaacaattcgacaagaacggcgacggaaaaatctcggtaacggagctgaaggactgctcgcggccctcggatccaaaacgaggntncggattgaaagctgatggaggagtcgaccagaaggcgaggtttcntcga

SEQ ID NO: 15686 - DNA, 259 bp, Glycine max
  Clone ID: PAT_MRT3847_114169C.1
ccacgcgtccgtacggctgcgagaagacgacagaagggaatcagcttttccccatcctgtttgttctcatcttcagtctcatcatgcttccctgtttccatctccgattgtggttcaggcgaattctgattcttcgttgacgaaggcaccgtggattccggacgccctcgcccccgctacgagtttgcatattattattgtcattcatgaacaaaaaaaaaaaaaaaaaaaaaaaaaaaaaagcggccgctctagagga

SEQ ID NO: 15687 - DNA, 396 bp, Glycine max
  Clone ID: PAT_MRT3847_11416C.1
cacgcgtccgatatctacttgttatgagtttcttacccacacattaaacgatgttcagggttaatctatttgctgagctaaggagaccgggttgactattatatggactgcgtgtgctaattttcatttgagagacactatgatagtgactcgtatgggtactaaccacttgagtcctgcactagcggaacctatagcagggacaaggaagactgcttatactaattgactctccggatgagtgacacctgactcagtgaaacatgggatgaacagctattactcactgttgccatgtggaggagtgacaaactcgcagtcttaagaggatagatcctagcttggtcgggaagacttaaaatatactgagtgaaagcttaagcagggccgaactga

SEQ ID NO: 15688 - DNA, 384 bp, Glycine max
  Clone ID: PAT_MRT3847_114170C.1
aattcggctcgagcacccaactttcagagcatctttggttcctggggtgagagaagccagaccccagcaccagtcctatcccacagggagctcggtgctgccacctctgcagctgcagaacccggcaggctctggagagctgctccccggtgggaggtagcagaatggagccagcgcacccctttcccgatggctcgaggcccttctgctcaaaattcttttgtaggcaccggtaacctgattctaaggtccccaggagatggatcacctgatggcatgagaatgtcttgtttttggaaagcctggtcatgcaatttagcaaatagtttgcggtgaggtggaaggcatttatttgctttgtcttgctaaccctcaaaatcaaag

SEQ ID NO: 15689 - DNA, 250 bp, Glycine max
  Clone ID: PAT_MRT3847_114171C.1
ctccctttctacccccagcctttttagcaggaggagcagtgtattttaaaaggggcgataagttataaaatagacattttttaagaaaatgaacaagttataggcatgaacattttacttcaaggtagtggaaaaaaatgccatatgtaatccttagtaagttttgttttgttttaaattttgttggtaggctgagacaattttttgaacagatgttataataaaaggggcatgtggcaggtgtttcata

SEQ ID NO: 15690 - DNA, 339 bp, Glycine max
  Clone ID: PAT_MRT3847_114172C.1
atggtccatgacatctttgtcaaggtgaaactggaagtaacaaggacattgtcgcaacatgcccttttgcgggcgagcgaggcgaggctcacgagtgcgctttccaaaggaggaaagatgcgtggagtcgccaccaacgaaggtattagcacctctcacgtcgacaaaagcggggcttttgctcctacataccctcctttggagaggaaatcagacctacgcagttctttctttaaaggggaggagcttgccacccagctcgcccaggtgagcaaggttgcttcctccagaagcaacagccttctggaggaagaatctggaaggcccaagtgggtctga

SEQ ID NO: 15691 - DNA, 117 bp, Glycine max
  Clone ID: PAT_MRT3847_114173C.1
atggtcagaaagacaaaatctatctactcctcatatgcattaccccaagcgcatcagcaagtacccgaggaagaagacccgctggacatgatgacagaaggatttaatacgatttga

SEQ ID NO: 15692 - DNA, 126 bp, Glycine max
  Clone ID: PAT_MRT3847_114174C.1
tggggtgcattgttcgtcgttgtcattccttcttctacgtctgttgttctgtgtatgtgcttgtcctctagcacgagctatcagggcttcgaatcgtcgccgtcgtggttgccgaggattacctcc

SEQ ID NO: 15693 - DNA, 573 bp, Glycine max
  Clone ID: PAT_MRT3847_114175C.1
ctgggttttgggtggttttttttttttttttttttttgggtttttttttttttttttttggggatcaaaacatacattctggcttattttggggatctctattctgggctgggttgggccttttactaaaaataatggtgggctaaggaaaggtcaacggggggggggcctggatagccccaattttttaatgggaacctaaatagaatcacttgggcaagccaaagcggcagctgggtcctaacattacccacccgggcttcacaggaacattcacaatctggggcctccaaccggaaaatttattagtcagccctggattggcccgcccgagaagagagggtgttgcccaccatgagaccggttaatgccaacgcctcggcgcaaatgggggtgaggttcgttccaacaaaaagctttggctgctgggcatttgctttaacaccggggttgccaaccgtgcccgtgggcctgcccgcggggaggcccggggggcgccaggcgagacccggagagaggggggcgttgcccgttcaaagacttgtccatttggcccttggggtgatgccccgc

SEQ ID NO: 15694 - DNA, 390 bp, Glycine max
  Clone ID: PAT_MRT3847_114176C.1
cttgagtgaaaatcttcattcattcattcaccttaaaagaaaatgccttcaccagtgcagccaagtcactctccatcatctgctgaaggtgagaaacatgcacgcaagcaattggatagagagattagggacatggtctctgccatcactgacagggtcacagattttcacaaaccaggctcaaccaaccatatggagaatgatggtgaacatggtttgagcatggtcacccttgtaggaaacaacaacggcgccactatgaaaagtgaattcgacgaaaaatcaggcaacccttctcatggtgatgagcctgaggcactgagcacctatgttaacagcaacttccaagccatcaacaactcagtcatgcttggtggaagttaccagacc

SEQ ID NO: 15695 - DNA, 242 bp, Glycine max
  Clone ID: PAT_MRT3847_114177C.1
tacatgcctccggttcattcggctcttcacagggctgtttgtttaggaggagggtttgcaactgtatgctggctacttgaagaacgtgatcgccatgaggtcgaggatggagtttgagcagttggccgagatgatggatcatcagaatgtgaattctgctgggtgctcgaccaatttgtctaaggacattgcgacgacgattgatcagaatagtgagatcttgcctggcctttgcggggagg

SEQ ID NO: 15696 - DNA, 153 bp, Glycine max
  Clone ID: PAT_MRT3847_114178C.1
gggtttgcaatcactgcgttgttgagatcagaatcagagcgtgttctcttcgtccattggcatacatggccattcacatgagcaagaagcgaaagtttatggcggctggagtgtgcttcgccggactgaacgatgttctgacacgtgagttgg

SEQ ID NO: 15697 - DNA, 316 bp, Glycine max
  Clone ID: PAT_MRT3847_114179C.1
cacttgtccggatgatctctgataacaatatttatataataattttttctccttccgttaaagttttttactttcttgaaattatgtaaatgaaatgtaaattaaattaagccttctattaatttcaggggctgtgcagcgtattggaaagccactttatcagtatagtattgctctttttcatgatgatggacgacctgtggagggtaagggtgtatggaggaagcttctggacaggatgcatgaaacgtatgattctaaattgaatgggaaaggaatgggatatgaaggggacaggaacttggtaactctgggt

SEQ ID NO: 15698 - DNA, 596 bp, Glycine max
  Clone ID: PAT_MRT3847_11417C.1
gagagagagagacatctgaatgtacatgtaaaatagcccatttcaaaatcatctgaaagtgtttttggcattttcctttcatcacttttctacatgcattctttaccaagtcacttctatccattgtatttcgttaagtccattacaagcttgcatgacatatcacatatataaaactgaacaccccaaactagttggctggtgaaacagacgtgttcatgcagactccatcagcctcagggagatttctaacctcattaagaagcctagtaagttcttttgtcagttctttccgaacatagtcagatcgctcctttgtaattgatgattcttgaaataaagtttcagcgagggactgatattcttgaaaccattcctcaccaatacccagattattttgatcatcatcaacaagtaatgagcattcccgtctccatctacctaaaaagtatttatcaggcagctgaaagtaattctttattacaagtacacgaagagcatgcctgcatagtattcctgatgattcaaattccttgcaagagcaatgtatctgatcatcttctgccaaccagattacaagccattctccatccatg

SEQ ID NO: 15699 - DNA, 233 bp, Glycine max
  Clone ID: PAT_MRT3847_114180C.1
gggctctaaccacagattccactaaaaacaacggccggtgttttccgatttttacaaggtaaattcaaagctggcaacgtcttttaataattcaaaattatagttggaggctaagaacacattctttctcatgcactttctgtgattgattaacacttattgagcatcacaaaattatcagagaaactgctccaataagaactgagccccacatcatctgtgagtctaaataa

SEQ ID NO: 15700 - DNA, 657 bp, Glycine max
  Clone ID: PAT_MRT3847_114181C.1
ggaaaaaaatctgcttcttatttgattctctctcataaacaaattaaaacccttgtataaagactcttaggaaatatctctcttctttctaagcatatataggaggaggagagaaaatattttgctagcaagacttgatttgagatttgatcaacatcaattgttgtttgttgtcgtcgtcaaaatatgccaatggctaagggaatcagaaagctaagttcctggatcgaggttgccccagcacctatcatttacccaaagaaaccttctaacacacccactttggaaacaatcaccgaagaagaagaagctgccgccgagggattcgaaaatggcgatggtcaactataataaacgaccttctccaatttgatgtaacttattgttataagttgtttatgcatggtttgtgacgtgcgatatatattcatcgatcaaccatgaaacatttagtcggtggtagccgatgtctagcgtccaacctagcttgagtttgcaggaatggttaagtagttaagtaaatgttgcaagattttgtcccgtaaacatgtgaacgccaaacatgtttcgaagtctgtagttttaggaagagaatccagttgtgagcttggtcaacagctcgcaactatttgtgcatttgtaaaatatgcagttaat

SEQ ID NO: 15701 - DNA, 258 bp, Glycine max
  Clone ID: PAT_MRT3847_114182C.1
ctgctcgaggatcgtttttcctttttattttcctcacacgttgataactcgagagactgagaatttgagattgctctgttcacaacattgccttgtgttttcaggctttagcatttttttacaatattattattttttgatggatgagaatgatattattttaggctaaattggtagaatgagtttctggtttcaattataggtttttttttttaaataactggggggatgggggagccttctgtggattctttaatc

SEQ ID NO: 15702 - DNA, 330 bp, Glycine max
  unsure (1)..(330): unsure at all n locations
  Clone ID: PAT_MRT3847_114183C.1
ggctcgacatctacgcttcacgcaagtctcaataatttcagataacgattacacaccacattgtcctctggcctccgctaaacaatcgatctgtcaatttactggagtggaatcgttcggatcagcaccacttcatgcaggttatgttgcatcttcagtgatcatgatgacacgattaagttatagacggagtgttttgggatgagacttttgaataaaagacatattccagaagagatctatgcaagtgcatgtcttggatatggagatgcacagtccaatgttgatgtggttatgttatcaggttatggaangggcctcatatgacat

SEQ ID NO: 15703 - DNA, 513 bp, Glycine max
  unsure (1)..(513): unsure at all n locations
  Clone ID: PAT_MRT3847_114184C.1
ctctagaagcggccgcttttttttttttttntttttnttnntttttttcacccgctcattannccccanaanccacagagccaacggtcaaatttggcacgggagctcacgcacaatgcgcgattactccctcgttcaagggcggctggttcaaggcaaccctatttattgcatcaaaacccagcccaatttgaacactaaaacgaacagaaaaggcctgcatcagtaaaagttccacaagtcatcagaagatacaactgacacccaaatacaaggtgcaaacagtcaagaaatactgtacaaagaaataactgccttctcaaaaatctccttactttttagaaatcagcttttttggaagttcattcaagggagtcggttttaaaagaaaaagcctaacagcacgctccatcaaagtacctacacatttcaacccacgtgactgcaataaagacttaaacctttccaaaccaagaacctcaaattccgccgctgaattaaaggcataaaaat

SEQ ID NO: 15704 - DNA, 1028 bp, Glycine max
  Clone ID: PAT_MRT3847_114185C.1
gtgcattgccggtagaaaaactgttgttgaattagacaattagttaggtcttgtttgcacaaacttttcaacaaatacttttagttataggataagaaaatgagaatgtaaaatgaatccaactttgtccacaagttaaaatcaacttattccccttaattttttgcagaagttaaatgattaaatgaaagaacttctaacatgacgtggtgcagaagttgtttttaacttctagcaggatttgagtcatttaggaatctctttcaatattataagatgataagtattcagatgaaaactaaagttactattcaatgccaataggccatccagcttggaagccatgagcgtctccttgctttctgtgaggctgttcagagaagctctccagtaggttcgtataccaaaccagttgcaggtgccactcccgcggaaaggatacggctcagagggatgagcttttggctggctggtgctccctatgacacgctcgaggaagtattagggaaaagggactctggtggactgggttccctccaagattttggggtgaagtaccgagaagtgccacttgccgaggatggtggacttgactggaatgcactcatgagttctgtcaaacccaaaacaaaatgtgcactcatacagcggtcttgtggttattcatggcgtcagagtttgagtgttaatgacataggaagggcaataaaaataatcaagaagcaaaatcccagctgctcagttatggtggacaattgctatggcgaatttgttgaaagcattgagcctcccatggtgggtgcagatttgattgcgggcagtttgatcaagaatccaggcggaacaattgcaccgtgtggtggatacattgctgggaagcaaaaatgtgttgaagcagctgcagcccgtctttctgcaccaggacttggtgtggattgtggttcgacccctggtgatatcatgcgagcctttttccagggattgtttctttcacctcaaatggttgggagaagcaatcaagggaatcc

SEQ ID NO: 15705 - DNA, 312 bp, Glycine max
  Clone ID: PAT_MRT3847_114186C.1
cacgcttgtgctgctgatgattggccattgcgtgtggccaagaccaacaaggatttggtatctcatgcacaggagttgatgcatgacgttggcctatacatacacaggggaaggggagcccatatcgcttcagaagtgttatttgcataattgagggctattgcggaatcactgaaagaccgattagtgttaagagttagtgtacgtgattcaagtattgaataaaagtgagcatgtcatgtgtatatcagaatgatctaaactgaataagagaatatgtgtggactacatgagacacgagtacagaaattg

SEQ ID NO: 15706 - DNA, 468 bp, Glycine max
  Clone ID: PAT_MRT3847_114187C.1
cgatctataactgtatgcgtggttttttgttttaatttcggactttttgatggatgcttgcaaggtttcttttatttattttttttagagtttgtaatattgaagcagatatcggcatactgcttgaaaaagttatagggtgacaacttcacactagatcacaccatgaggaatggtgtggtaaacctgaagtgcctactgggtgatacaaacgaaccaaaatagaatcggggtgattagtgtattaacagtgggcaaaccaaaaatgctggcagctcaaatgaattaaccaacgcgcagtgagaggcggaaagtggataggccgctagggcgaccgagatgattaactgtgagacagtgagaagagcatcgtttttcttcttttgacccagagagagtggtagcatgagtataaagaaggcccgcaacagccggccagaagccggttggacagtgggaaacaggggg

SEQ ID NO: 15707 - DNA, 159 bp, Glycine max
  Clone ID: PAT_MRT3847_114188C.1
tagacgggcacctatataagcaaggggagaacgctccttacagttttttaaaaacgaacagtattactcatcccgtctctccctctccccgcgttcctattattctacattcattcctagttactgtcgaccctccgtctaacaccgaaagcaatttct

SEQ ID NO: 15708 - DNA, 827 bp, Glycine max
  Clone ID: PAT_MRT3847_11418C.1
tcatgatcgtcatccctctccaggtcctcgccaacgttgcctccgtcgtcatcggcgaaaccgggtcccttcatcaaggattgggttacttggaaccaggtcttcctgcttgttgacattatctgctgctgcgccatcattttccctattgtgtggtccatcaggtcgctcagggagacctccaagaccgacgggaaggcagccaggaacctggccaagttgaccctcttcaggcagttctacattgttgtcattgggtacttgtatttcacccgcattgtggtctttgcgttgaagaccattgccgcttacaaataccagtgggttagtaatctcgccgaggaggctgctagtctcgcgttttatgttgtcatgttctatatgtttaggcctgtggagaagaatgagtactttgtgctcgacgaagaggaagaagaggctgccgagattgcgcttagggatgaagaatttgagctttgaagcaatctggctatataactaaatatcaggttcttcaatcaccttgctagctactgcatctactgttagagatgtgtcaatactggaatactgtgtgtatgtttagtttttgtgtttttgttttgcaattctgataaatgtattgtgcgggatagaaaaaatttgatcttgttctcactcaaaatgtcactttcactagaggagctgtactgacccgtacacactcagttgttactgggttattttgttactctgatcattcttcttttaactgaattttacatgatttttgattgtattgtatgggcttaatgaatgcaattcttagttcatcaacttctttttgc

SEQ ID NO: 15709 - DNA, 576 bp, Glycine max
  unsure (1)..(576): unsure at all n locations
  Clone ID: PAT_MRT3847_114190C.1
ctcggttgttcactttaaaaaaggaagaataatcattcatttggagatctagaaatccaaagggttcaaaataaatccaattcatcgctgccattctaagggaaggtagtgcagtcagtgtgactattgttccccggttccgttctcagtttgtgtctttgagccagagttgaccgttggatttcattcatggatcttcctctgcctaaaccctccttcaaccccaacaagcatctcaaagaagaattcgtaagcaacttgaccggatcctccatgctcgaaatcgcgacgcttacagtgtctattcccattctggttcttattcgtcactccatttccatcactggtgcctcactgaagaagaaaaatgatgatgcgccttcggggaataggaatttaaaatcatacctagccacattgtctctggacttccttgtcattgntgttcctatgctcttatttttcaccgtacttgcaaactggacctatttcttggcaagtttgttcactatcttaacattgctttatatgggatgctaccagcttactggattattgtctgattgtgaatgagag

SEQ ID NO: 15710 - DNA, 236 bp, Glycine max
  unsure (1)..(236): unsure at all n locations
  Clone ID: PAT_MRT3847_114191C.1
gaggagctgaacaagataagctatccatagcagccaaagaaatgaggggtacggtgggcggcctctttctacgttgtgcccgcacctcttagggaccttcagggacggctggtgaggtggtggggactgatgggggagcgcggttgagaatggaggcacatacttggtgttgccaacgaggggagtgggcggggggngaggataatatgccacatttggaaatgaagcttgccctg

SEQ ID NO: 15711 - DNA, 148 bp, Glycine max
  Clone ID: PAT_MRT3847_114192C.1
ttaaaccaccttctaatatccaacttactaccctcattcacttcataactctttatatttacctaaattcaattactcccatcttttacaacttccttacttgaaaaaccctacattacccaacttaattccttcatcacattccctt

SEQ ID NO: 15712 - DNA, 1224 bp, Glycine max
  Clone ID: PAT_MRT3847_114193C.1
cggctgcgagaagacgacagaaggggggattggattcgaggataattattatcgtaaagaatattgaaaagcggaagaaagcagaacagagcatagcagagcagagagggaggtggaaaaagaaaaaaaggtgaggaagaaatcgaggaaaaggaagagaagaagaaggaatgagtgccacagtgactctaactctaaacctatgtcgttcttccatcgttgcttcttgtccacattataaccacaaaccaaaccctaatttcaatgccttgtttagcttctctttgtccctgtctctgtctcaccacagacgcatcgctatctgcaagaaaccattttcctcaagacggacgtggcttcatggacatatgaaaagagatcgagattatgaattggagaatgggttagccttatttggttctgatgaagaactagcgactcaaattccaactcaggcccaatcacttgttgaaggatcaggatccattcgcgtagcggagttcaagcctgttcctgatgttgattatctgcatgagttattggccattcaacagcaaggaacttgagctattgggttattgtgatactcggaacatgggattcatgctccaggaactaattgagattcttagctgtgctatgattttaactaagaatcatatatccggagttgcttaatgttatattacctcaaagtttaagaaaacagcctccagagagtcaggagctattgtccaaagtgaaaaatgtcatagaaaagccccataatgatcatctacctctaatagaagccagcaggctatgtaatatggatatcatttcgcacgtgcagcaagtcatttgctttgctttccatgatagtcggttgctcatggaaacttgtcaagaagcaaaaaatttgcggaagattgtgactcttttctacctcgactgacaatttttatccaggtctatacattattcctctgcataagagtgggctgggagagagtggtgcttatttttggtttgtaattaataatcaatgatattgctttaaattgcttatttaagttcacctagaaaggtattttaatcgcattactttttgtttagctagctaaatgggctatttgattatttatcttttttttttcatctttagttctttatcatgtttctaaagtaatgcaaagttaatgcatttaataatataaaaatattaactgccaaaacctcgtaaaa

SEQ ID NO: 15713 - DNA, 1238 bp, Glycine max
  Clone ID: PAT_MRT3847_114194C.1
cggctgcgagaaagacgacagaggggggattggattcgaggataattattatcgtaaagaatattaaaaagcggaagaaagcagaacagagcatagcagagcagagagggaggtggaaaaagaaaaaaaggtgaggaagaaatcgaggaaaaagaaaaaggaagaaggaatgagtgcaacagtgactctaactctaaacctatgccgttcttccatcgtcgcttcttgtccacattatagccacaaaccaaaccctaatttcaatgccttttttagcttctctttgtctctgtctctgtctcaccacagacgcatcgttatctacaagaaaccattcccctctagacggacgtggctttatggatatatgaatagagatcgagattatgaattggagaatgggttagccttattcggttctgatgaagaactagcaacacaaattccaactcaggcccagtcacttgttgaaggatcaggctccattcgcatagcggagttcaagcctgttcctgatgttgattatcttcaggagttattggccattcaacagcaaggacctagagctattggcttttttggaactcggaacatgggattcatgcaccaagaactaattgagattcttagctatgctatggtcataactaaaaatcatatatatacatctggagcatctgggactaatgctgctgttattcgaggtgctttaagggcagagaaaccagagttgcttacagttatattacctcaaagtttaagcaaacagcctcctgagagtcaggaactattgtccaaagtgaaaaatgtcatagaaaagccccataatgatcatctacctctaatagaagccagcaggctatgtaatatggatatcatttcgcacgtgcagcaagtcatttgctttgctttccatgatagtaggttgctcatggaaacttgtcaagaagcaaaaaatttgcggaagattgtgactcttttctacctcgactgacaatttttatccatgtctatgcattatgtctccgcataagagtggggggggagagtagtgcttctttttggtttgtaattaataatattcagtgatattgctttaaattgcttcgtttagttcacctagaaaggtcacattccttttttttttacgaatttaaatcacattcctagagaatggtggttgatatttttttaaaggaataagatgtttccaagtatgtgcatgtgtaagtctatca

SEQ ID NO: 15714 - DNA, 1759 bp, Glycine max
  Clone ID: PAT_MRT3847_114195C.1
aatggaagtgagaggttggaaaggaaggaccgcataccaaccacaagtcactcttctgttcttctacacactatcttgatcttttctattgcccttttccttcactttactacttgcatccaattctctcgcgaaattaataaaggaactttaactttcgcgagcgacacaaacgcaatcaaatcaaatcatagattgatttggcaaccccaattcccttttgattatttttttttttttatgaattaaagcaatgggtttggttgcttagtgtttttttggacgcacgaaagatgattccttggggtggcctcagttgctgtttgagtgctgctgctctttaccttctcggcagaagcagtggcagggatgcggaaattcttaaatccgttacaagggtcaatcagctgaaggaactagctcaactgttagatgcagaaatattacccttgattgttacaatttctggaagagttagctctgaaaccccaattaactgcgagttcagtggtttaagaggtgtaatagttgaagaaacagcagagcaacattttcttaaacacaatgatgctggttcctggatacaagattccgctttgatgctatcaatgagtaaagaggttccttggtatctggatgatgggactgatcgtgtgcatgtggttggagctcgaggtgcttctggttttgcattacctgttggaattgaggcatttgaagagtcgggtcggtcacttgtacgtggaactttggattatctgcaaggtctcaagatgcttggagtcaagagaattgaacgggtacttccagttggaacttccttgactgttgttggtgaggctgctaaagatgatgttggcgctattcgaattcagcgaccccacaaagggccattttatgtctctcccaaaacaattgatcaactaattgcaaatctggggaaatgggcaaggtggtataagtatgcttctgtgggcttgacggtgtttggtgcttatctgatagccaagcatgctattcggtacatattggaaagacggcgccgcagcgaacttcaaagaagggttcttgctgcagctgctaagaagtcgggacaaaataatgatgttgaaaaggccgacagcttatcagatggtgctaaaaaggatcgcttaatgccagatttgtgtgtaatatgccttgagcaggaatataatgctgtttttgttccgtgtgggcatatgtgctgctgtacagcttgttcttcacacttgaccaattgtcctctctgccggcgacagatagagaaggttgtgaagactttccgtcattgagtgttgagcatacatggtaatccaacaaaaaaaaaagtcacatgcaatgaggaattgtgcttaagaatccaggagcaacaaattggtgaattagatattttttgcatgctttgtctgtgagcaattctaaaaaccaacggcctttacagacatatcaagacagcgatgcttttagcatcaaaacctgtacatatttatcagaagaagttatgttgcttctatctgctgcgaaattttatattcttacaggatgtattctactttttattgagtgtttctcttctgatatactcttacttaccctgtggaattctttttaaagtgaaaacactttgttaatcgtaccaggagctacttattgtatactcgagtccttaacgtgcgtatgaactattttatagattaaaaaaaaaaaaaaaaaactcgagactagttctctctctctc

SEQ ID NO: 15715 - DNA, 457 bp, Glycine max
  Clone ID: PAT_MRT3847_114196C.1
cgctacacaaggtgatcaatatgagtccgggacgaagcttgcttatatcttttatatattcactttgataacgaagcttatttgagcgaaaaacatgactatctcagctacatacgagagcatgccacacacagtgatcagcatgcgacccagagagcactaagcgcatgtgggacaacactacacgcatgtaagtttcaacgtctagattccaaggcagaaggtagtgatagcaagaccgacggtagccaaagcaggctcttgtgaatcctaggatggctacagagaagatccatttaatctacatgtagctaagggtgcctatgaatagctcaagggtgcccatgtgttggtataagtcacataatatgactatatcacgcattagttctactaaaacacacagtgctcctagaatagaaataggctttatgagcagtcagaggaaaaatttgta

SEQ ID NO: 15716 - DNA, 544 bp, Glycine max
  Clone ID: PAT_MRT3847_114197C.1
acaatttcgtagcaaatgtgttgattcctttgcacaatccaccttcacctcgccaagtctatttatcatgtcatatttttaatatatagtaacatgtcataatataacgcataatatggtcttacatgaacaaatttaaaatctgatttttcttgtggccgtcgtaactttttttctccgattcttgtggtctattgactctattcatcaaacttgagttgtcattcatctctctcacgtcatgcatgagtgttaatggccgtaaatgatagcgcgtgtcatcggaatctccggtgaatgtctccgccaacgggcgaagaacgcctccggagagcaccgtctggacagcggcctggcacacgtgccagtttccgctccacagaagtcccacggctccgttcaccggatttaccgttcgcccgcacccttcaaatagcagagactgaaacaatgctgataataaagaatataaaaagagagaataaaaggattaaatatctaatttactgtttcaagcaaatacaggatatactttgattcctaa

SEQ ID NO: 15717 - DNA, 178 bp, Glycine max
  Clone ID: PAT_MRT3847_114198C.1
ctcactcgtccgacggctgcgagaagaggcagaattgttcggctgctagatgactacataccggtacgggtgctagaagactacagaaggggagacctcatgtcaggcggggctacccgctgagtttaagcatatcaattagcgggggacagaatagaaaagggacacgttctcgaat

SEQ ID NO: 15718 - DNA, 632 bp, Glycine max
  Clone ID: PAT_MRT3847_114199C.1
ggaaataatccttgatgcatatctgtatccatgttttagtttacaccaaaaaagcagtctgtctattttttaactgttttgaaaacttattctctacaaccggttttggagtagaaaattaggaacacaaatttttttgtttcctttaacctatattcgtggattccctactctcacttcaaaccaccatcaccacccggacctcagcatgatcatatcatcaatatcacgacgccagccacaaaacaatatcttgtcaggatacttaggtggatcatgtatccttgaacaaagtcccttatgtacctctggaagaggacctggtgcgtaagtgtcatcatcctcagctatgacaaggacttcatccccatctctcaggacataactatcatctgggttgatgataatcatgcccccatctgcagcaaccttaactccacaaggtattgcatcaggaaatgaaattaatacatctttgaaaaagagaccatccagttcaggccaccttttgatgtaaaactccgcattctcaaatcccaaaatatcctcccatatctgtgcaaggccaggctgtagagcacactgaatcatcaaacgttcaattacattatgtgcaacaactgtttcaatga

SEQ ID NO: 15719 - DNA, 146 bp, Glycine max
  Clone ID: PAT_MRT3847_11419C.1
gacgtcggctcgtgtgaagacgacctgaacacctgatgcatccgccactgttaatgtcctcgggcgcattactaaagcaatggcgcgtcattatcaggctagaaaaggtgaccttgagaaaattctcacagccgtccccaacagac

SEQ ID NO: 15720 - DNA, 468 bp, Glycine max
  Clone ID: PAT_MRT3847_1141C.1
attggagcctctgaggctgaagcggttgttagttcttctttggcttgtcttactagaaaacaatcaggtgataagtgttcagcacctgcatcggcatttgcccagtgtcaattgttaaatattagttactgccctccagcagaagacaacattccagaggctaagagtttggtagtagtggtgtataacccacttgggtggaatcgtactgatattgtcaaaataccagttaatgatgctaatcttgttgtcaaagattcatcgggcaataaccttgaagtacaatatgtggatgtggatgatgttacgacaaatttaagaaaattctatgtgaaggcatacttgggggtttctccaaaacaagccccaaagtactggcttttgtttcaggtgtccgtacctccacttggatggagtacttacttcatttctaaagcaactagaaaagggaccaggagaaaagatcta

SEQ ID NO: 15721 - DNA, 183 bp, Glycine max
  Clone ID: PAT_MRT3847_114200C.1
agctatgccgctgacctcggatccattcactctatcccagttaaaacctcctctacgtgccataggcctcctatcatatgcgagtggagagccctgccagaggacgtggctccatgatctttatgagaaagaatgccctagctcatgccatgataatctctgcggacctgttccagacctgct

SEQ ID NO: 15722 - DNA, 291 bp, Glycine max
  Clone ID: PAT_MRT3847_114201C.1
gacacgaaccttttatctgcgccagactctgcaaatcatcgacgcatctagaatgtttctctcatctcctgcgctggaagcacacgccgttcggctatcacaaggagttccatcagtatttctcacccggaaaattgctatggcaaaggcatctaggccaaacggaccatcgagcagccaaaggcattggtgatagcgtctcagttacgtggctccagtctactatgatcgtcctgcctacctcagtggagaattccacgctaaatgtcagtatgacactgccactcaatg

SEQ ID NO: 15723 - DNA, 319 bp, Glycine max
  Clone ID: PAT_MRT3847_114202C.1
ccacgcgtccggagaaatgtatatgtacggagaaactaattttaaaaatgctcgcgattatcttaataagcgtatcgagttgtacaaccttgtgcatcccggagctgagattcgtcctttgacgttgacctactctggactcgagaaagcttacgaggaaggaacgctagagatctgttacccgaaagggtggtttgatcctctagaggaaccttctttaattgagtgatcaagagactctatttcagaagaaatatcgaaggttaacccctcgagggtttatatcgagaaatattttgttttggagatttagaattat

SEQ ID NO: 15724 - DNA, 250 bp, Glycine max
  unsure (1)..(250): unsure at all n locations
  Clone ID: PAT_MRT3847_114203C.1
ngtgcnanatgccaaaaantgcaatgncctcaaaccggannaccgtatagattnangnggagggcncatnnagacatggaacccnaacaacaanccattccngtgtgccggtgttgccctctctcgcttcaccctcaaccgcaacgcccttcgtagaccttcctntancagcgttcccacgtaganctanatccaananggtaagggtatttgnggcatgatatanccgggtnntcctagcanatttgan

SEQ ID NO: 15725 - DNA, 498 bp, Glycine max
  Clone ID: PAT_MRT3847_114204C.1
attatcctacctggtgaaagggatggaaagatttggatgtggcactaagtgcttgcggtgtccaagaatcaatggctttcctcctgctacacagagaatagtaatgtctgatgctgcttggggtttatcatttgggaaatttttggagctcagtttctcaaaccacgctgcagccagcagggtggcaagctgtggtcactctttacacagagattgccttcgtttttatggatttggaagaatggttgcttgttttcgatatgcatcaattgatgttcactcagtctaccttcccccccacacacttatatttgattatgggaatcaggactggatacaacaagaatctgatgaggtggtcaatcgggcagagcttttattctctgaggtactcaatgggtctagtcaaattgttgagaaaagatctaatgcagtccaagtcagtaatggccacaaatcacctgagttaagacgccaagttgctgaactagaggggat

SEQ ID NO: 15726 - DNA, 362 bp, Glycine max
  unsure (1)..(362): unsure at all n locations
  Clone ID: PAT_MRT3847_114205C.1
cgctngcanggnagcntacntnagcnntcganntcgncngcnatntcatatgcagnaggcccacaaaatcctaatttatgcngttctttccgggagaacatcnaggagcnccntaacttggannattntacnccggccnacccngttaaggncananggattggacaagctnggnncaaacttnaaacanggtcgnttgtccaaangngcaatgggnccaattccnagannaangnaacccttaggggngcccnggtcccattccnaaggncnaggnntcctaaggaacncgaangggntaattanccngtgttcccanttcagnntncncacccnaccggnnaagatnattggggcntnnc

SEQ ID NO: 15727 - DNA, 1981 bp, Glycine max
  unsure (1)..(1981): unsure at all n locations
  Clone ID: PAT_MRT3847_114206C.1
ggctcgaggtttttttcttcttcttcttcctcttcttcacgccttttttcaattgcttcttgcaggattcctgcaagtactgctgtagcagattccaaggtgaaaggttcacgttgaactttctttcatgtttgaacgggctattatccatttgggagcaattgagttgcttggagagtgtttttcttcttctagaaaaaagaacaggcccttgcctacaagacccacctgtatgcactgccaaccgtacccggaataccccaacttttgttgttgttcttgacagccttcgctaattgcgtgattgcatttgctgcccaaggcgtctgttgtgattgtttttctctttggaacttttttttgtttaagtcatcatggccttgcagaacattggtgctggaaatagtgatgatgccttctatcggtataagatgcctaaaatgattaccaagattgagggtagagggaatggcatcaaaacaaatattgtcaacatggttgacattgccaaggcattggcaaggccaccctcttacacaaccaagtactttggttgcgaacttggggcacagtctaaatttgatgagaaagttgggacttctcatgttaatggggcacatgacactgcaaaacttgcagctcttcttgagatctttatcaagaaatacgtccagtgttatggttgtggaaaccctgaaactgagatattgattactaagaaccaaatgatccagctgaaatgcgctgcttgtggttttgtgtcagatgtggatatgagagacaagctgactagctttattattaaaaaccctcctgaaacaaagaaaggatccaaagacaagaaggctatgaggagagccgagaaggagagactgaaggaaggtgcagcagctgacgaggaacaaaagaaaatgaagaaagagactaagaagaaaagctcgtccacttccaaggatgagaccacaaagttgacctctacaaagaagaaagccagtggctctgatgaagatcatcgatctccagctcacagtcaagttgatgagaaagaagaggctcctgatgaagatgatgatgatggtgaagtgcagtggctaacagatacgtcattagaggctgctcagcagcgtatccaagaacagctaagtgccgtaacagctgatatggtcatgctctccacagatgagccagagaagaaggaaaaagcatcaagtaagacaagtgatggttctgaaaatggtaatgcgatgcactacaggaaactggttgggagaagtgaaagcaatcttgaacaaaggtgttgtggcgagtgaattgcagtcccatatggaagcaattccagcaccagctcaagaaaagatcagtgctctgattgaggccttatttgagggtattgagaaagggtttgcaaaagaagtggtcaagaagaagcgctaccttgctgctgcagtttccatggaggagggatcacatttgctattgcttcatgcaattgaggctttctgtctaaagtccacttccaatgctttgaaggaaattcccattgttttgaaggcactttatgattctgatctgttggaggaagagcacatcgtgcagtggtatcaagaagggctgaatggcgacaacaaggactctcagatatggaagaaggccaaacctttgattgaatggcttcaaagtgcggaatcagaaacagaggaagagtaatctgcacgaatagtctttcatttcagtttctttacttgtgtcttttatttccaataaagggtcttgctgtagttggcccattgagcgttgttccgtgtgcctgtttttgtctggatttgagtaacattacgagtcttttgtggtgtcatcgtgttttattttcgttgcctatggagtatgtatgcaatttctattctacctatgtacttgcagaagaagtcttttaggccaatttcagaatacttcgagaaaacaatngacagtaggaaagtta

SEQ ID NO: 15728 - DNA, 315 bp, Glycine max
  unsure (1)..(315): unsure at all n locations
  Clone ID: PAT_MRT3847_114207C.1
tgggtgttaaatttttttttttttttttgggagagaacaaatagggttatatattaaactcaacaaaaacaaataatatgagatgtttatgagaatttcatccacccaagacccgggggttccttaattaatggacaaaagccaaaccnattcccttttttggggggggaagcatntgagtttcaagcccaggcaaaaaaacatcttatgaaggggagttttggccggtgtatcanaaaatatactaccccggaacaaacaaaaaaaagaaagcgggctattagctatagctacagccataagatcatattaatt

SEQ ID NO: 15729 - DNA, 542 bp, Glycine max
  Clone ID: PAT_MRT3847_114208C.1
cggacgcgtggggacagaagggggacagaacacaaggcacagcacagcgcagcgccgcctcaacatctcaactttcccttcgatctcattctcaggtgttgttgaagcttcctgtgttggcttggtatccctgcaagtgctgctgtagcagattccaaggtgaaaggttcacgttgaactttctttcatgtttgaacgggctattatccatttgggagcaattgagttgcttagagagtgtttttcttcttctagaaaaaagaacaggcccttgcctacaagacccacctgtatgcactgcctggaatacaccaacctttgttgttgttcttgacaaccttcgctacatttgcttcccaagccaaaggcgtctgttgtgatttttctgtctttggaacttttcttgttcaagtcgtcatcatggccttgcagaacattggtgctggaaatagtgatgatgccttctatcggtataagatgcctaaaatgattaccaagatcgagggtagaggaaatggcatcaaaacaaatattgtcaacat

SEQ ID NO: 15730 - DNA, 759 bp, Glycine max
  Clone ID: PAT_MRT3847_114209C.1
gctcggcaacgtatccaagagcagctaagtgccgtaacagctgatatggtcatgctctccacagatgagccagagaagaaggaaacagcatcaagtaagaaaagtgatggttctgaaaatggtaacacgatgcactacaagaaactggttggagaagtgaaagcaatcttgaacaaaggtgttgtggcgagtgaattgcagtcccaaatggaagcaattccatcaccagctcaagaaaagatcagtgctctgattgaggccttatttgagggcattgagaaagggtttgcaaaagaggtggtcaagaagaagcgctactttgatgctgcagtttccatgggggagggatcacatttgctattgcttcgtgcaattgaggctttctgtctaaagtccacttccaatgctttgaaggaaattgccattgttttgaaggcactgtatgatgctgatctgttggaggaagagcacatagtgcagtggtatcaagaagggcttaagggtgacaacaagcactctcagatatggaagaataccaaacctttgattgaatggcttcaaagtgcagaatcagaaacagaggaagaataatgtgcacgaatagtctttcatttcagttttctttaattgtcttttatttccattaaagagtagctgtagttggcccattacgttctgttgctgagctttgttccgtgtgcttgtttttgtctggatttgagtaacattacgagccttttgtgctgtcatcgtatttta

SEQ ID NO: 15731 - DNA, 508 bp, Glycine max
  unsure (1)..(508): unsure at all n locations
  Clone ID: PAT_MRT3847_11420C.1
ctctccatgtactaaatagaattcatgattgtgagcctttagtttctctcttctacgcgccggggccaacgaagcattagaggatctttctagcgccagatgtacataccggaatggtgaatgaattgacaacaggtgttgattttgagaaattctcatggaaaattgaggatttctcaaaaaaaaatctcatgaaattgcgctccaagcctttcaaaatccggggttgtacatggaggctccttgtgtatccactgaggagggatgtgaatcacttttcagtgtatttgatggttgctgattctttaccgccgtacggatggagcagaaacacttttttcatgttagctctaataaatcaggtggataggaataagtctatagctaaagagacacaacataagttcaatggaggatatcgctgctggggttcatntttcttggatcttactgatttcataacccaaacatgggtatctngtgagggacacatgcataatcgaagcac

SEQ ID NO: 15732 - DNA, 430 bp, Glycine max
  Clone ID: PAT_MRT3847_114210C.1
caaaaatgtaaaaaaaaattcattattttttaccccatttttaaagaactaaaaaaactaaacaattttaatttttcactttttggggctctttgacggtagaaaaagaaaaaaaggaaactaaaaaaaaataaaagaatatagaatataataatgaatagaaatcaaatagaaaaaagagataagataaaaaaataagatattactattatatttatattttaaattttctattttatcatttttattttattcgtttgttttctcgattgtagttttttttttcattgtatttattccattacagtggtgatcataaatgaatgttttacctctttgtgattcacctacaggtcttgccattcggttctgttccactaaaaacctatcttcctgatggagatgttgacttgacaactctcattcatga

SEQ ID NO: 15733 - DNA, 501 bp, Glycine max
  Clone ID: PAT_MRT3847_114211C.1
cttggggggggggggggggggggggggggggggggggggggagatatactaacacggggggctaatgggataggctagaaggtaaataaaacaacctcgacgttagagagatactactaaaactaaatagaacaaaataaaaaacgaactaggtagaggtagagagcagagagagcagaagtagtaatatcatccaatcatcttcgagttacttacacccgttctagtacgctcgggtctcaattggttgggcaggtggccttgtcgggtcctagatctggggtgtcagctcgaatcaagccgtggtgtcaatgggtccggtggttgtggtgtttgcgattgtaatatgtgacttgtttgagttcttcttcacaatgctcttcgtattcgtattccgcttatgggctgcgactgctacggtcagagtgttcatagtcgcggtttcgttcctataatgctaatggttagtcatcatccacaacagatatgtgcctgtagagc

SEQ ID NO: 15734 - DNA, 306 bp, Glycine max
  Clone ID: PAT_MRT3847_114212C.1
aaaccataatcataatcatcatcagcttgatagccatcacccccaccgttggtttccaataaacacctttatgtcaatgggtggaacatatcattgtttcaggtcaaataaggtgacaccacacttttttgtgaaatccgagcccagctcttctaagctccccgctctgattctccactaccttttgaggagaggaattctccacaccactatgcatcatcatcatcctcagcaacaacggggagggagcccaactagctccagtggtgaagtcgacgccataaaagctaaaattgttgctcaccc

SEQ ID NO: 15735 - DNA, 359 bp, Glycine max
  Clone ID: PAT_MRT3847_114213C.1
acccacgcgtccggggcgcgtggggtggaactgttcaagattttgtttagatgggccatggaaagcttgagggggctctaaattaactcctagatcaaagcgctcctgtgcttacaacgtgaaagcgacacgatcaactacgaagacgctgtaactgacaagggcaacatggagaccctcattcacaatggtcgttacgacctcacattgccatctcttcccatcatacaggtcgcattagcctcagaggccgattacatagagagagtgcgagaagcacaaacagcaattgagcttacacacgcgatttgtgtggacgcgaacggattgcatttgatggcagatcatcttcacttaac

SEQ ID NO: 15736 - DNA, 285 bp, Glycine max
  unsure (1)..(285): unsure at all n locations
  Clone ID: PAT_MRT3847_114214C.1
ccctcgggccggccgggggaaccgnaaaanatgttaacaaaccatctggaaccctaatgtatcagtgtcatcatcaagtgtgtcacgtttaaagctagncnntttgctagtggtgtaccgtctcttttgcagcatgcagcagtcgttgcatgaaacaagtaccagttgctggatgtatgtggcttgtcctttgcaaagtgtaatggcatggctgtctgtatgcttgctgtgcgtaaagaaagaaaaaaataaagaaaagaagaaaaaggaaagaacggaaggagg

SEQ ID NO: 15737 - DNA, 310 bp, Glycine max
  Clone ID: PAT_MRT3847_114215C.1
gtggaaagaagatccatgctgtgattattttatagacggacccgattgccgacatccaaagaacgtaccctgcatgtcgactacttggggctcactcccttgtgagaaaggccatgatccgtaccgtccagtgattttttatcaagccgtacggacctcgaggactaaccggggaattttagaccgcaccctgcgggcggaccaattttccttatcaagagtaatatcaaagctcgcacatttgatgtccttagctggctgctgacagaacacgagctcctatcacattgaaccactaaatacaaactcg

SEQ ID NO: 15738 - DNA, 730 bp, Glycine max
  Clone ID: PAT_MRT3847_114216C.1
attgcactctattctaccactcggagtctctgtccgaggccacttgcctagaaaatggcggggcctctgctctcactgatatcgtgtacaagactgtagagaagattgagaggcctcaaagcgacaggcacattgccgttaagactaactgtggcaaaccaacgggtatccactctcgcgccatgagaaagttccagggatgcacttcgctgccagacattggtgatggatcagacaataagacccgccactatctccctaatggtgttcaagaaatttgtcgaccacaatgcgaatgatttggaactgctcatgatgtacaacatggctgactgtgctgagattgccctccatatatccgcatgcaagagatgagatatactacgagagagccgcgcaccttgatgttagttgtgacaaacaaaacgtccagattacgacaacaggaggatgaatagtctaaatgactgataaagtcgcttatctgcagtgagtctgtactacagtatcgaagtatgcagttttattttaacttggattttgcttcagcggattttgcttcagagtattttgcttattgcgaaccaggttttcgacgtgcctctttcgtgtaagtcgcatcttgatttgtttttacgcaccaaaatatacgaaaccttaatctttggctgtgggataccgtcgcacgcgcacttttgggggaccctattgctaccccctcccacccccc

SEQ ID NO: 15739 - DNA, 385 bp, Glycine max
  unsure (1)..(385): unsure at all n locations
  Clone ID: PAT_MRT3847_114217C.1
gtgaaatattgaatcgttaaccgttggattgncangaaactctnntatgtgtgttgtgttaaaacaagcagggggggaaccaaacctatcatactcacaccaagggtagtcactctgggtgctatcagaaaatcaatatcactacttctcattctctctgttttcaatggattatggtgttttgctacccactctgtgtggtcttacatcaaacgttctcttacttggaataacttactttctagcattctagttactgaatattactttaatatgctctgaccatttatgatgaatttaaaaaattgagaaaggttatttattttttcctcatgctttcttaaaagctattattgatattaaggatttatacattttttttaaa

SEQ ID NO: 15740 - DNA, 299 bp, Glycine max
  unsure (1)..(299): unsure at all n locations
  Clone ID: PAT_MRT3847_114218C.1
gtcgcangcacgcgtacgtaagctcggaattcggctcgagatnganttctccagagnnaagaananacttantcgancatcacttcacttcnctaatanatcntggcnnacgngacccagnacaagtatgagagcnctnangtngaggtccaggatcgnggtgtnntngactntctcggtaanannaaggatgnagaagacaagnctcatnctcaggaggnggtnatcgccaccgngtttcaaaaagtcactgtctcagnccaaggngagaacaagcacagcctcntagaaaagttcac

SEQ ID NO: 15741 - DNA, 279 bp, Glycine max
  Clone ID: PAT_MRT3847_114219C.1
ctgtgagactccaaataatgtgcaactgtgattattcttgtatgaaactagattgtaagtgaaatatcagagtttgtccttttagccaatttacaagtcttcagaataaagaaaaaaaatcactcccgggacacacttctgaatatttaaaaacagttatcactcgtaaggcgtaagcaatggttgctatttgacaatgatccttatcaagagatttaccttacagccggatccagttaagataatcaatgcttatcccaaggtgaaaccaaaggattt

SEQ ID NO: 15742 - DNA, 477 bp, Glycine max
  Clone ID: PAT_MRT3847_11421C.1
cgcagccttcacgcggatcaacttgatccgcaggaaactacgcggccaaaaacgcatgcggatctacttttccctactgtggatcatctacctcctaagttgactctactgcggataaccttaagcaatcaacaatggaagcaatggaagaaggaaccttacctcaatgaagaacgaaaagaatggagctcgctgaataagaagagacactcgtaagaagatagaggaagaagaaatggctagcgggagagcaccaacagcagccttgcgagggagaagaaccagcaacagctcgcacgaaagaagggagaagaacagtgctcgcggaagatggtactcacggcagaaggaaatgaagaacgaagcggaatggctgggtgcacaagtttttttaaaatataagaagagcattcacgactctgctctgtaagtgatgggtgcaccaaccaaaatgctaggtgcacctaggagcaccct

SEQ ID NO: 15743 - DNA, 543 bp, Glycine max
  Clone ID: PAT_MRT3847_114220C.1
gctactaggccgcggtcgccctttttttttttttttgtgtaatgctaatgtctctcttcagataacgcatgagggaatgctgtcatagttagaaatacatacctgctacggcctataggctgttgttgggcccatgctactgcgggtccattactcaggatgacatgcagatgcaaggcccagaacgtccaagccttcactatgggtattgatatccaacatgaaacctactggatgactaacttctttgttatctccacaacgaactgataaaccttgggctgatcaggatgagacttcgcaacactctgtttctgtaggcacctcttggcccaagcagcaaacctggggctcctattgtcaatgacgaagctggcgacggtcctctatactttggaccaagtgcttaatggaacaagtgctctgtccacataaccaatgttgtctgcttaaaataagtttcatcgcccagctgcttctgcaacaatataacggcctctatgaactccttcttggcagcttctttttgttctgcctttgatg

SEQ ID NO: 15744 - DNA, 290 bp, Glycine max
  Clone ID: PAT_MRT3847_114221C.1
gtttttgggtgctggtggcatgtcccttatggcaaaatgggcttaattttcccttacgtgtggtctaagcaataatgttgtcatagagcatcttcaaagttggcaatgtcaagctttgatgtgttccatttaaataggaagtttgacagtgatgtgctatatccagaagacacagtttacgtttaccgttaaaccaagtattttatgttggtaattttttttaacaatatatatattgaggtttgaatatatactatccaaatctcttcatactaaaaaaaaaaaaaaaa

SEQ ID NO: 15745 - DNA, 440 bp, Glycine max
  Clone ID: PAT_MRT3847_114222C.1
ctttattatttgcgtggataatggctaacatcggacaactttctgacatgagaattggatcagtacgtgtcaccaacttatccatcacatacgtacattgctccattaaactaccatataaagctgatgtcatattattaaactaccgttgtatgccaaataagacttatgaggcacttgagaatggtccaaatgcccctattcctgaaccatcacccccttttactgtgaatgcggctaatgaatgggaccacgacttcagctgtgctgatagcgctacttgttgctgtatgcttgagtccggaaatgcttgcttcgagtggggtcactatgctcttgagggtgcttcctgctgcgatgaccactacagttgctgacctgcagactgtaccatgtggaacacttacgcctttacttgtgccatgagcaagaacaaccca

SEQ ID NO: 15746 - DNA, 109 bp, Glycine max
  Clone ID: PAT_MRT3847_114223C.1
cccttctcactctccccattagataaacacataaagagagagagacactcaacctcgttcgtttcgttcctccatgagataatggcttccgtgtctactttctgtttcg

SEQ ID NO: 15747 - DNA, 421 bp, Glycine max
  Clone ID: PAT_MRT3847_114224C.1
agctcggaattcggctcgagctcgatcccaatcttttctatatttttttttattcacgaatttgcaaagtattgatagggcagggtatgataaactcagcgccaaggaacatatctactcttctataattttcactattaaccaccattatgcttcttttcacttcagcatttgccaaaacttctagtccttcttttctgtacccatctccatcaccattccactcaccatacttcattaaccttactgagttactaaaagctccatatgactttttacaccttccttttataccttgagtacactatagagattgacacttttcatatccaggccatcaacactgaataatgaatcaccatctttgttcctaatgacagttccttcaatgctatcccgataactaccctatttaacctca

SEQ ID NO: 15748 - DNA, 539 bp, Glycine max
  Clone ID: PAT_MRT3847_114225C.1
aaaaaatccgaggcttagagagtaaagcatggagcgggataggagtcatcgaacgtggtctgtctgtggtagcggagacatagctttctcttcgtagtagcactagttcgcatttgtcgagcatgctgcgcgctagaggccatagactgacgagcaaagggaactacgcagctagaccgttggcatggactcctgatgttttgatcacgactgtagtttacgtcatgttcgatttacagagcatggttcgctcaatgtggggccaattgtctgatgctctatatcaccgatttaaccgctattggtgtcttcagtactaatgataattgtagtgccgtggctattcatggaatcgctggggccttcaacggcatgatctcttctcattattactgtaccgatgcatatcatgtagacacatagacccggcggagacattggtgctgattacggcgaggaatgtgacgctgaccacatcgattactttcataaggatccaatgcttgctggctatctgaggcgctgtctggtggaaaggc

SEQ ID NO: 15749 - DNA, 200 bp, Glycine max
  Clone ID: PAT_MRT3847_114226C.1
ttgtttgaaattaaactgattggtaacctaatttgtggcctcatgacttttaaggaaaacgtgtgcatacattacacacatcctaaagctagtaagagattgactcgtcattgccttcattccttaaaattaaaaacctacaaaagttggtgttaatgtgtatatgttatttaccttaagatttaaattgaaatctgaac

SEQ ID NO: 15750 - DNA, 196 bp, Glycine max
  Clone ID: PAT_MRT3847_114227C.1
cccacgcgtccgcaaagtaacacatcttattttgcaaaaaaaaaaaaaaaaaaggaaaaaagatacaaaaaaaccggggagactaaaaatgccccgttgactgcctgcgtggttgcgaggctctctgccaccatcattgcttaacgtttattttgttgtctggccttgggttctcaacacctgggactggtattac

SEQ ID NO: 15751 - DNA, 278 bp, Glycine max
  Clone ID: PAT_MRT3847_114228C.1
ttccaaaccgaatcgatttgaatttcgatttgaatttgaatttcattttcaacttccctgtgatgccttacacggccggagaaccttgatcgggaacatggcacgcggggaatttcgaaaacgcgccgccagcggacacacatcttcgtctcagtcgctcatctctttttcgatggaaccactcttcatccccgcaggagatcaccaaagttcacgcggtggacgcccgccgccaaatcggcgctcccgccggagaagctccttttcttttttgagga

SEQ ID NO: 15752 - DNA, 457 bp, Glycine max
  Clone ID: PAT_MRT3847_114229C.1
cggagaatatgtatgtcagatgtgctctgaactaatacaagctactgaatctcctattgcctctggtgccactctcatcatctgcccagctcctattttgccccagtggcatgacgaaattatacgccatacacatcagggctccttgaaaacttgtatttatgaaggtgtgcgagacacatctttttccaatacgtctctgatggatatcggtgatcttgccagtgctgacattgtattaactacatatgatgtgcttaaagaagatttgtcccatgattctgataggcatgaaggtgatcggcactttctgaggtttcagaaaaggtttgctccaaagagtgccatattcctcctttgtcaatatatatttatatcatatgtaggatattttacctatacatttctagatgagtttgaaattcaccgttcttttcattcatcaagttttcatttt

SEQ ID NO: 15753 - DNA, 325 bp, Glycine max
  Clone ID: PAT_MRT3847_11422C.1
gtctggtttataacgttacctatttatttgaagtcagccagtgagagagtagggtctctgcatgatcatggcttagccactccaaacagacaagcaatgggtcgtgtcttcagcgctggaggtagtcatagcttctgaggttatctgtttcacagccttgagcctgctcacatggcgaacagtaagcctgcaaatgatgcatgccttaaaaatctaatggttcctaaacctccgaacaataggctatgtccagccccgtcgcaagcactggtccaagaacctgctttttgactaatggttagacaacttccacctgaatttcggg

SEQ ID NO: 15754 - DNA, 195 bp, Glycine max
  Clone ID: PAT_MRT3847_114230C.1
cggtattcggctcgagagagctaacctcagaagaaggtcttctctgctctatttccctcacgctcaacatctcacggtgctaagctcctagttcttgcttataatttgtctttttaattttaattactagtgaaagtcattacatggaagattttacaaattaaatattgttttaaagactgatgtcaagtggag

SEQ ID NO: 15755 - DNA, 474 bp, Glycine max
  Clone ID: PAT_MRT3847_114231C.1
actatagagtactatgacgtaggatgccgcgtcgtagctcggtccttagagcggcgcgcccacgcgttcggagagaggggtttgagagtgcaggtactagcaatggatctcttgtacagtcaaatagctccaccattattagtacttacgcttaaagaaaacatggcactagcatgcacttgacctcacatctgaagacgtttcgctacttttatggcttataggctcataattaatgaggtgacggcatggatgaaagaccatgaaagttttcgcagaattgagctgcctaatacttgatacgttcaaaagtaccgcatcaatgttagaccagagcagatggtcattatgccgcacgaatatggctattcaattttgactgtccggaacatatacaaaacttgctcttttaaagtcctgttggggaccacagaggtccccaggggattaataatagcgtttgcaaatgaggac

SEQ ID NO: 15756 - DNA, 593 bp, Glycine max
  Clone ID: PAT_MRT3847_114232C.1
ccacgcgtccggagagagagagagagagagagagagagagagagagagagagagtgtgaaacagtgcctattctgaaagtcgtctccacgttctcctttgcacatattgtggtgtgtgctgttctgtgtgtgccactattgtcatattccgcaaaatcagctttttcctgtggagttctgctcaaccttcctttcttttgtacatgcaaacaccctttttgctgaaggttgcatgtttagttcattggcgagttttggagatctgggtatgatgcattttggcttctccagtgtgttagaacaatgagccaatgccaaatctgggtcataataatgcttgaagattagatgttccttgatttgcaaaaaggttttgtttgcatgagctgggtttcttttcccccactgaatttggtttttgtcaggtgttgtaccctacaaaattagtattagcttcttgaaagtagtttgtgggtattgactttttgctctttgccaaagttaaggtatacttttttaaggaattgggtttgtcttggtggttgtgttgttttagggaattgagcattgcttgtggaatgtttgatctgaaa

SEQ ID NO: 15757 - DNA, 1676 bp, Glycine max
  unsure (1)..(1676): unsure at all n locations
  Clone ID: PAT_MRT3847_114233C.1
ccgcccctccctcccgcgacactcccttcccggcactggtcgtagcggctcgcccccccctccccccctcccctctccccatcttctcacccgccatcatcatcaccaccaaagtcaccaccacaacacccatgtatttcctgaaacttcacctgcacctacacctacaactggggaaggtgctactttacacaattttggtgctccagcccctgcaagaagtgtgcctgccccagggagaagttcttatgctcagcctcctaattgtcgatttgcgcatgtaacacctgcagctccccctactactgctccacactatcctgttgcctcaccatgggttggacccccagcacatggctttgattcttcggttcctgctttgagtcctttaccaaatgtagcatttgcacatgctgaaccccctcctaagaatgaagcagctgctgagcatctgaactctcattttcatggaccatcaccatcttcatcttctgcaggttgtgctgggactgtcaaatggacatctttaatgtttttagtacttgtattactagtataaacaagttctgaaagtgagctataaaaggtgggtgagctaggcaaaggctggcttcacatctggagtggatacaagttatcattaagagtgtaaatagttggacgaattctaccgggcgaaagttaaacattttttgcacggtacgaaagtaaatttgggtcgtcagatcatttcagttttcaatacattcttgtttcgtgttccctccgtttttgaggtgctgaaatttaagggagggattactatcattccacaacagagtgtgttccctctgcaaacagtgcaaacattattcaactttactttgaatttctccatttatgaaatacaatcaaattttgatgagctgacgaggctgctactgcccgcacttctggtgcccccgctgcccctccgggatgtctgcctgccccatgctgaaggtcctacgctcgacctcctaattgtcgatttgagcatagaaagagatctccccggaatactcaaaaacatgctcatctaacacctgcagtttcccctactaatgttccacattatcctgttgcctcaccaggagttggacccccagcacatcatggctttcattctttggttcctgctttgagtcctttaccaaatgtagcatttgcacatgctgagccccctcctaagaatgattcatcagctgaacgtcctaaatcacattttcaatggccatcaccgtcttaatcttctgcaggttgtgttgggactgtcaaatggacatctttagtgtttttagtagtcgtattacttgtataaacaatttctgaaggtgagctacgcaaaggctagcttcacatctgagtggatacaagttgtcattaagagtgtaaatagttgattaaaaagatccaagatcaaatataatgatcaatcaatatacttataaattattaatcaataaatttagtcccctgaaattataatgaccaatcaattttagtcccttgaaattaaaaaaaaaaaactggtttatgaaattataaattagcaatcaatttaatccttccattattagttgatatcatccaacacaaattaaaaaaaaaaaaaaaaaaaaagagagagagagagatganttctatggtgggaaagt

SEQ ID NO: 15758 - DNA, 489 bp, Glycine max
  Clone ID: PAT_MRT3847_114234C.1
ttggaacctttgggctgattttgtgcttgcatggtgtgagaagatgatagaagggggcccctaccgggcgtcgactggaataaatagggagcagaagagaggagaagacgggccctacaacggaacccgtggagaatccggcaccaaagccgacggaagacttgaaggaaagggactggaggcctagggagtatgcccacagagcgaaggataggcgtgagaagatgaaggagacgcggagtcatttcacgtgatttcacgggccccggatacctgaatgttataacctctagtccgtccgggacgtatagaccagttaagcggttgggaggagggatttccacgacgactcttcttaataccctctcattttattcaagcgagcgccgtcgaatccgttataagtaccactggcgaaaaggacggacccgctgcaacccttttccgcaacacttcgctccgccgtacgccgtagagaccataatcgga

SEQ ID NO: 15759 - DNA, 203 bp, Glycine max
  Clone ID: PAT_MRT3847_114235C.1
gactgcgcactccaatgcaagatgttcaggtaacaattgatagggttctttcactcttaggaatgtgtgacctggacctaaggtgttttaaatgcacaaaattcttttgtgaaaaatcagaggatggggaaactgaacttcccccacggcacagacccgaatgtaaaaaaaatgcctttttctatagggggaggagctggtgc

SEQ ID NO: 15760 - DNA, 312 bp, Glycine max
  Clone ID: PAT_MRT3847_114236C.1
acaaacaccacaaggaaggcaaaccaacccaccgaggacaaaaccccggtacggaacaacacactatagggaccaaaaacaccaggccggagacttagactggccccataaaacactctctgcctcctccaatgccttgacaaaggagcccatcaaaccgaaaactccccaagagggctaatggcctctgcgccccattgcggaaatgggcatggggagacaagtgtgagctcatgagtgctgaatatatggaagacttgtcaggatccaaatcctatccctgtgcaaagctccctcaaccagcccatcaag

SEQ ID NO: 15761 - DNA, 370 bp, Glycine max
  unsure (1)..(370): unsure at all n locations
  Clone ID: PAT_MRT3847_114237C.1
gcgagaatgaagaccattctcagcaatcagactgtcgacattccagaaaatgtcgacatcactctgaaggggcgcacagttcattgtgaagggccccagaggaactctgaggagggacttcaatcacatcaatgtagagctgagtcttcttggaaagaaaaagaaaaggctccgtgttgacaagtggtggggtaacaggaaggaactggccactgtcagaaccatctgcagtcatgttcagaacatgatcaagggtgtgacactgggcttccgttacaagatgaggtctgtgtatgctcacttccccatcagcgtcgttatccaggagaatgggtctctgttggaatccgnnattnctngnnaggaaana

SEQ ID NO: 15762 - DNA, 264 bp, Glycine max
  Clone ID: PAT_MRT3847_114238C.1
gatagaaaccggcccaaccaacggtcgttaaggcataccaataacgtaaaacaacggcctagacctaaatgaacaatgaattcaacgcctcgacgtccatccacatgactgaacgccttccagaacacagggcctttgcgaagggttaggagaggggcgccctaccctagacgtctgcggcaaggaccctcggaagaaacactctaatacaagctctccggacctttaaaaaaccatgcgaacacatttacgatggagcagcac

SEQ ID NO: 15763 - DNA, 482 bp, Glycine max
  unsure (1)..(482): unsure at all n locations
  Clone ID: PAT_MRT3847_114239C.1
ctctaatggcgttcatcgtatccagcaaggttaaccaatttcgctattccacgcgccttctcttctcacaccttcttcgccatggcagaccctccacgcttttaccacccttcttttctcatcttcaaccactccatcaccctcaccaggttcactttcctttctctgttattcacccctaaagagagcaacaaaaaaaaaaattcaatttttacacataaagtccattgctttgattctatctatcggtcttcttctctcacctcaattgggtcagcttcaattctcattgggtgtcactctctggtgattttctaggctgggaatcaaggttatgaaaatgggtcgtgggngttgtgcccaaggctcctatcttcttcttcttcttctgaggcttctgctgctaatggtagtggagaaaaaccagcatttggattcagatcaatctgcaaaagatggttctggcaagagagagagtctgg

SEQ ID NO: 15764 - DNA, 473 bp, Glycine max
  Clone ID: PAT_MRT3847_11423C.1
tgccacaacagagaaacagtcaaacaatgtcattttacaagggtacagtgcgaaatagatatgtgcaattatatgataaattagttagttttgtatataaaatattaaccaacatatttttcacatatccaatatatactcgacatgattaaaagtgtctttaaaatgttcaaaaaggtcaaggtggctggtttcagtaatgtacatacaacagttgcatttaaaagtggtgttcttagtgtttatgtccattacatttagaacaccaacatgactccactcttggagtgctagtgtattcatatccagaagacaaatctaaaatgaataacagaatagaagctagtgcaatattgataaatttaaggcaatattatgtaatttgctttgcaatatatagttctgatacttctgcataaatgatgaagaactatacatcttcacaaattaatccacagaagggcaactacatg

SEQ ID NO: 15765 - DNA, 605 bp, Glycine max
  Clone ID: PAT_MRT3847_114240C.1
ttcgcccacgcgtgcggcttttgaaaatcgaacacataactacacggatgcagttatctgtctttcgattcctatatttggttgtgatattatttcctattttgactctttatcttttttgggggggaaatctgcaaaaaaaacccccccccaaaaggggggctaaaagaaacgcatcccccaaaagaaggcgggaattaaattttttttccccccccccgggggggggcccggggtcatccccataaattactctccacgcctgagggagaccccctttttcttttatggagggaaaataaacattgggggccgaatgagaaaaagacttccctggggaaaaatgtctttggcccataaatcaccccaaaaaaccaggcgcatacttataatgcgaacacccgggggcttcaactgaagaccccccccctttaacaggttgcggcccttgagagcggtttccacaagggaaacaccgtgggccataggacttaagaacatgcccccccccccgagggggaggtgtttctttagcccgcccccagggttatttttttttcccaacaaggggggggcaccgggaggttccccacaaacacccccat

SEQ ID NO: 15766 - DNA, 260 bp, Glycine max
  Clone ID: PAT_MRT3847_114241C.1
gaagaaaggctaggattcttcgcgtttgccatgtcgacgactttttagaccaccgcagacgcgcatccagtgtttctccaagaacgctacatcttcatgatggaaactgcttataacgcctatcgcagattgtcgtatctggattcccatgcactggatgcgttacccccattatcagttctctcgccggctttctcggaactcaccttttgggccgtaggcctgtaccgtggaatatcaggctttttgttttaatttct

SEQ ID NO: 15767 - DNA, 475 bp, Glycine max
  Clone ID: PAT_MRT3847_114242C.1
ctcgagccgattcggctcgaggatggaatcatttcaaaacaatttcaataaaataaggcaaggtcatcattgaattgcatgcaagtttgtcatgatcaatactagaactgaaatcctctaaacccagcaaaactacaattttttattgaagtgttagtacaaacaaatttggatgttatgttctaaatccaaattggtattgaccctcgtaaataattaatttcatatttttatgtacttttttgcacgtgcagttttcaaagtctgcacgcagggtatcagatcttagactcagagataacccactgcaaaagatatggcaaggctcacaaccaatcccatatttgtgcttcagtaacttgcactccttgattgtggacggctgccaatttttatcagatgcagtactacctttcaatttacttcctttcttaactgaattggaaacattggaagttcgagactgcgattctgt

SEQ ID NO: 15768 - DNA, 253 bp, Glycine max
  Clone ID: PAT_MRT3847_114243C.1
aacgtgtgctgtttatccactaaaagtttattctcattatctggtaatttataattctccccgtcttgagttaaataaaagaccttagggcacagatcatgctgaatctactgtcactcatggaagagcccgactgccgcacttcgataatgcaaccacatcttcatggcactatgataaacatacaagagggcagaaacccataccatagaagcaacctgcacttccacttcagtttgctccacatgtactc

SEQ ID NO: 15769 - DNA, 291 bp, Glycine max
  unsure (1)..(291): unsure at all n locations
  Clone ID: PAT_MRT3847_114244C.1
tcacgccgccgttattatacatcgcctaccatcaacaaagaagggttgtttgatttaacagngaggagggattagtgccccaacaccccaatcgagggagaaacatgcaggcttaattgaggctcagcccttaaacacgtctgtgcaaagaatgggggttctgcaaaatgtggagctaacagaaattgcattggacagtgaggtgtctggtggcgttgaaaacatagtgccaacacatagcgctgatagcgaaaggggggatttcgatactcgtggggacactaaaagaag

SEQ ID NO: 15770 - DNA, 200 bp, Glycine max
  Clone ID: PAT_MRT3847_114245C.1
gtcagatgtgccctccacattctatgggcatcacgaagcaaatgactcgggtttcacattctacacgggatcatcaagctaccctcccacatatattgataccgttggatattggatgttcttgggctacgaaccatcactcatgagctttatatgcggaccattgaaagatgcctcaggcatgactattcatggggaac

SEQ ID NO: 15771 - DNA, 691 bp, Glycine max
  Clone ID: PAT_MRT3847_114246C.1
ccacgcgtccggcgttacccattgtagcgttatcgcttctcttgggtgccatcatcgcatttctctttttcagcacctactaccggaagcggcaatccgaaatccaatctatcgccgatcccaatcccaaacccttatcctccaaagcccctcccaagaagcctctctccaaaccccattcctccgacaaggatcaaaacaagcgacatcatccgttggatttgaataccttgaagggtcatggtgatgcagtgacagggatatgcttctcccccgatggacgaaatttggcaacagcttgtgctgatggagttgtgagagtatttaagttggatgatgcttcaagtaaaagtttcaagtttctgaggattaatttgccagccggtggtcatccaacagcagttgcattttctgatgatgcatcctccattgttgtggcgtcttatactctgtccggctgttcattatacatgtatggagaagagaaacctaaaacctctgaagataaaccacaaacaaagcttcctctcccagaaattaagtgggagcatcacaaagttcatgataagaaatcaataattactaatgtttggagccctcccgcactttatggcactgcggatgggaagtacaattggttgccttcatgttcagaaagggactgaccatcaattctttggcaatggaaaaa

SEQ ID NO: 15772 - DNA, 293 bp, Glycine max
  Clone ID: PAT_MRT3847_114247C.1
ggtcccaagttcttagaccatccggagaatgtcacaaaaaaagctacggaagagatctaatcctaaaatcctacaggggcgacctcagctccatgaccacataaccatgtccagaaacatgcgacatgttccttctgcagtacccagcttcctcgatggctcagaagcacaagcgatacacgtcgtaggtgatgccacaggctggattatcgctcccggcggcgccgctctatacaccacctacgcttccaatacaatattcaccgtaggcgacactctcgtgtctcacatca

SEQ ID NO: 15773 - DNA, 791 bp, Glycine max
  unsure (1)..(791): unsure at all n locations
  Clone ID: PAT_MRT3847_114248C.1
cgtaagnctcggnaattcggcttcgaggggaaaatcgagttgacatttcatccgtgcagcagcaggatcaagcagttgaagacgaaatgaaggtcaagtttgtttccacctctaaaaaggagaaatcccagggtactagctttctacagcgctcacgcaatgccatcatgggagctgctgatgccgtgcgtcgagttgcaaccaagggtgctggggcatttgtcgaagatactaaaagaaccgaagcccttgtgcaaacaggcgatggaatgatttggagtggatgtaccaatggcttacttgtgcaatgggatggcactggaacccgtgtgcaagattttaatcgccatccttgtgctgtccaatgcttctgcacttttggaacacggttatatgtaggctatgtgagtggtattatccaagtactggacctagaaggcaatctaattgcagcatgggttgctcataatggtcctgtgattaaattggctgttggatgtgattatgtttttagcttggctactcatggtggcctacggggatggattattgcatctccacgtcctgttgacaacatgataagatctgagttggccgcaaaggaacttatttatacaaggctgcacaatgtcagaattttgattggcacatggaatgtcggtcaaggtagagcttctcaggattcactttcctcatggctgggttccattgcatcagatgtaggcattattgtcgttggtttgcaagaagtggagatgggtgctggttttcttgcaatgtctgcacaaaag

SEQ ID NO: 15774 - DNA, 438 bp, Glycine max
  unsure (1)..(438): unsure at all n locations
  Clone ID: PAT_MRT3847_114249C.1
taccgctgccgtaagaccacagaaggggaccgacagaaatggccgcaggtagtgaccgggtggacataaaccaccccccttcgcccaaaacaaccaccagcaagagggggcgattcaccacctccaccgaatcacccccacaaaccctaacatnatctttttcacacacggtgaccctnnctatccagctcatccannaaatactncacccnctccctgtgaaacgggggggtacaacttcatgcctatgtaagccctggaaatccctaatttgacaggccccattcgccaagaaccaccctcacagctcacccacggccacccccctcatcgcgggatccccacaatccccgcccgccaactcatccttccgagcctcaccctctactcggaacactatcactcccattccccccacccccatctcccccccccccc

SEQ ID NO: 15775 - DNA, 207 bp, Glycine max
  unsure (1)..(207): unsure at all n locations
  Clone ID: PAT_MRT3847_11424C.1
ggacaaatcgatcgggccacttgagatcaagattgtggaacaggggancttttgataagctcatggactatgccataagcttaggggcttcaataaatcagtacaagactccaaggtgtgtgaagtttgcacctgtgctggagctcttgaactcaagggtggtggagaagtattttagtncaaaatgttcaaaatgggttcctggac

SEQ ID NO: 15776 - DNA, 623 bp, Glycine max
  Clone ID: PAT_MRT3847_114250C.1
gcaccagtggattcacttgcaaaaccatgcctcaatacaaacaacactggcaaaaatattgacatttttccaagtcaagactctaaattaactaacctgaggcatacagtgcctagtcccatttctcctgccaaaaggaagagaagtactgacagtaagcaaaacaaaaaagccaaagtcaaagcaaaatctgaaccaagtggttcaaagcaggccacaattacaagattcttcagtaaagtaatacctgagatgcctggtggtactcaatctgataattctgaaccaaagcttgaccaaagctctaaagttgaagacttgttgccaactgatgatggacaaatgtaaattatggtatcatcttattgaacattttaacgttttatatctacagtgtagcagcagatctcttgtagggctcatgttagaccacaaagatgttaccctatcccactttagttttgctagcttctttctggtgttccacactgggtctttatgtccatattgatgttttgcttccttttggtgtttgacagaagtaaattttgatctaacttgtatttgaccataaaaaaagtgaagcatatacagaaaaagaaaaaggaaatgaagaatggtgc

SEQ ID NO: 15777 - DNA, 242 bp, Glycine max
  Clone ID: PAT_MRT3847_114251C.1
aatgattggcaccgaaagccccaaggacgagaaacgggcttttctcaaaaccatagggcagacctaacacgcgctgcataactattctccctagggagtccaatctcgtggccccgcagaagccatcaacacctgcgaggcccaccatgaagaaaagggacacgcctagcaggcaaggtggaatcaacccatactccacggaatggactggaacggccaatagatcactgagcaagggcaac

SEQ ID NO: 15778 - DNA, 401 bp, Glycine max
  Clone ID: PAT_MRT3847_114252C.1
accaaataagagatttaataataatttttttaaaaggccctttattatttgataaaagctaaagggtgatcaaccccccaaaacaaaaggggttaaaagcttatcatcacatagaggggtaaacatatttttttttaggaggatttattaaagcaatgcccatgaccctgccttttggctaaaactgaaactggcccttcccaacggggggactgaaagccagaaattaacccccctaacttttgccgatttgggaggcagcaaaagcaaaagggcaactttgcccaaattccttaggaaaactgggttaaatatcaaatgagggaattggaagctggggggtctctgtgtgctttgttgaaagggaagaccgccttgggtttaaataatttttgcctttg

SEQ ID NO: 15779 - DNA, 481 bp, Glycine max
  Clone ID: PAT_MRT3847_114253C.1
aaaagaagccccttctcactcagttcacgtttctcactttttgtgtgcctgcagcagcatttacttattaaatgctgaacctccaagagggtggttctccttctggaccaagttggaatttctagctacttgttgccacaaaatgattggtctcattttcatgggggggggttgagatctgagtctttagtctttttcactgaaaaagatctataaagttggtgtcttgagtccttgtttgtatgtatgtgtatataaatgctatgtgtgcttgtaaacttgtagtgagtcgtttttgtgtggaagtgtgaatctgtgtggaaatggctccaagctttgattttgccaataggtggatgaaagagactcaaaagggtaccccaattgtggtcacaatggaaaaccctactttctctggtgtggagattaatggtgctgatgctgcattcatgccaatggagaaaacacgtggcaagaatgc

SEQ ID NO: 15780 - DNA, 521 bp, Glycine max
  Clone ID: PAT_MRT3847_114254C.1
gaaaaaaaattctgcttatggtgaggtatagacatctagtatttgtaagataatgccattatttgcccctttttttcggacacacacatttagtgttttcaaaatgcgttagcttggaattacctttccagtgaaacgtaaccttttgttttctcttttgcgattgaattagtgagaactataactttgtttctactcaatcacgaaactattaaatgagttatagtttgtgtttaccctttaccaagctgtgactacaagtataagaaaaatttataatatgagcttatgttgcgttttatttggttgagcaatgagcatctgaatggcctgtctgaattgcatcctcctgtctcttgccaaacccctcttcaactaaaaaagaaaaagaaaatacccataaacatttgaaggaaataaaaatatatgaagactgctgctctaaattaaacctttgcttgtggcagaaagggaaaacgtcccatttgcttatgtgcaagagtcatttaatgccatttatg

SEQ ID NO: 15781 - DNA, 393 bp, Glycine max
  Clone ID: PAT_MRT3847_114255C.1
tttgtttttttttttgtttttttttttttttttttttttttttggttttttgttttttttttgttttttttttttatttttgtttcattttttttttttttgaggaaaaaaaatgcggtgcaaagcgtcccccgccccttaactggaagacggcggtgacgaacattttagtcgggggggcgtacaacgatcccccagggaggccgtttacaagatggagggaaaggggggccgggggggatggggacaagcccctggtggaggttgtaaaaaagactggggccaacgcgaaaagccagagccaaaaaatcttttggcgcacgggggggagtccgaatgccctggagcttggccagcttggggcgcttgaccgcccaaagagtggcaataggg

SEQ ID NO: 15782 - DNA, 457 bp, Glycine max
  Clone ID: PAT_MRT3847_114256C.1
acggcgagaagacgacagaagggaggtaagagaattctatataaaaaagaatgtgatggagtcatgtgtatgttatttttaatatatcagctaatggtaatttattagtttgtttagaaatgttaattgaaaaattcgaacgtgtgatttttttttcttttctcctttaccatttttcatccacaagaccaacctcatgtcttctgaataaaaatgaaggcaagaaaaattcacaaagaaaatgttgatgagagccaaaagtgacatttacctgtttataatgtgtgaaggcatgcaaaaagtaaaacaattacttccttgaatgattaaccagctttgaatttttagcaggaagcgatagagcgaagaacgtgatattgcgtatcacttgctatgcttcccgcaaaaatggacataatgaaacagccattaaaaaacctagcataacgttgagtca

SEQ ID NO: 15783 - DNA, 476 bp, Glycine max
  Clone ID: PAT_MRT3847_114257C.1
gcgctatataagaaatgtacagttgatattctgagcagattctggcactggagggcgtggagggtacttggaccatgatggtatcatgagagacattatgcagaaccctttgctgcgcatactagcgctctctgctgtggacaccctggagagctcatatgcctacgctatggaaaacgagacggtcaagggacttcggagaatgtgacccatgcgactcgctgctatagcatgggacaggttatgagccgccatgacgaggcgtacatggccagcatacgtgggtgacaggactgtaccaagcgggagcttatctccgacatgtgctgcatctgacctcttcatagatactgctatacgggacgatgtacctgtcctaatggacgctgtgtaagcgttacacgacataagagctgagatacaggtacagctgaagcatgtaccacggcagctgtacaatcggaattatggttctg

SEQ ID NO: 15784 - DNA, 266 bp, Glycine max
  unsure (1)..(266): unsure at all n locations
  Clone ID: PAT_MRT3847_114258C.1
cgnagangtcaaacatatcacacgncantcagnagcaaccaatgatatttntgcctacgggagtgcatgattntatgcannngattgaatggggaanttcaatcggattctgnattnagagaacaaccaatgatatnnatgcctaggggtaaattgtgagacantcaantcaatgaattatactnagcnntgggcgtgatcaagggactttcnngcnnaagtgtgctattgatcactgnntaggaatgattngtgatgcntgntag

SEQ ID NO: 15785 - DNA, 346 bp, Glycine max
  Clone ID: PAT_MRT3847_114259C.1
gcggaaaaaccctcaaatatgatataattggcgctgcatcacattcttcacaagattttgctgcaccggaagatcattataaaccccacatgatcggtgccagattgagacaaagaatatatcctcaatacaacgatgttcacgctcatatcgaaacaaactagattaaattgtctcttgatgatcgctgaactcctaaaggttgcatgtgggatctgaagattcctcaatctaagattgcactttccaagaacacagttggaggaaccattctgcgctatgatctattggcgaatattctgacagatggcaattttagagcaagtgctgattcgcaacgcactca

SEQ ID NO: 15786 - DNA, 927 bp, Glycine max
  Clone ID: PAT_MRT3847_11425C.1
ctctctctctgccgcgcatcctgccccctcgtgcagtgcttgtgctggctgtgtctggcctcccggcctcgggtgcggcccttcgcccggctatgtgcccgcttcccgccatgggtcgggccttccgccccccttgccgccctggttgcgtgaccgctcccgcctcctgcgtccctggccgtgccggtcccgtgtcctcagcttccacctacattgccggtaactgctaaccctttttctctctttactctttttattcttaaagagaatatctgctggttctttggtttctcggtgccttgcgtccgttctgcttctgtttgcgtacttctgttgcttccctgcactctttgggcctttcggtctcgggctttgcagtagttcatttcgaattttactgctggggtgtcagatctgactgtataagtggctgtaaattagcttatgcagtttgtaggatctagtaaccaagtcctagaatatattttagcaaaaatctatgtcagttagtggtttgttactgttgtcatgctaaatttttgcactcgatgatagtagctacttgttaatttattcattggtattgcaaaattgtttttccgtcgttggttttagttaaaattgatttgaagtaaagttatttatatttggatctttttattctggaagcaacttagaaataaaattagagtcaaaattaattttagatctaacatcatttctttggcatgagactaaacatgtgaacatatatttaaaattacatattagaaggtaattttgaatgatttaatgtgaatggaaacattaccttagtagttgttgctagtttgtaacacgtattgtttgattaatgattgtttgcaggtgctgagattatgttgcaatgcaagagcagggttagcaacgaggttgtgtacacgaaga

SEQ ID NO: 15787 - DNA, 1455 bp, Glycine max
  Clone ID: PAT_MRT3847_114260C.1
aggagccaaattggtattatcgcacttattgattcccttggtctctccttttgtcaagaacaaagtattttctttgatggagggagatcaacatggctctaattactcttttccacctggctttagattccacccttccgatgaagaactcatagttcattacttggaaaacaaagtcagttcacgtccacttccagcttgcattattgctgaaattgatctctataagtataacccgtgggagctaccgaataagtccttgtttggagaggaagaatggtatttctttagcccgagagacaggaagtacccgaatggattgaggccaaacagggctgcagcctcaggatactggaaggcaactggaactgacaagccaattctttcttcttgcggatcgaggcgcataggtgtgaagaaagctctggtgttttattcaggtcgacctcctaagggtgctaagacagattggatcatgaatgagtataggttggttgacacaaccatcaaatcctcaaggctaaaaggctccatgagattggatgactgggtactatgccgggttcgatataaaggctactctcagaagaattcatgtgaaaatcaagagagtcctagtgaactaaacttgtcagcaaaactactgaggagtgaagaaaacccaacaaaaatgaactgtcgggctgacatgatccctgattatcaatataaagactatcaaatcatagcctctattcttgttggtggacctattcctcccattgaaagcatgccaaatctgagctttaagggttgcaaaggcaacaatgtagtttcagattatgaagatggtttcactaaagggaattctcaaacgacaattccttcattggaaagttacttcaacccactgacaagaaaatccaatgaagatgaacagtatggaaatctcatttctttcaacaggaagttcaacactgataacagaatggacggatctactagcaaagtgttgaacagtagagaattgaattgctacaaccaaaaccattctcaagatgacattttcaatgggaacccaccagatcctaccatcaattttcaagagctaaacgaattagacttttcaggaaggtaccatcagtgatgaaggtatttattataagacagtcaacgtccctttacttcacaggtagattttcatggattatacaacttaagacgtaggagaaacctgaaggataatgggccctattccggcgaattattgctgtatttctttatgcatagtcaacatggggcaatagctacatatagaagtttccatgcattcatgaaattccttgtaaacaatgccccggccaactagcttcttgagcgtgccctgtgtcagttcaactagaactttatcctacctagtaattataacgtgtaaatacaatttgtattctgtatttctgcaacttacaggagtta

SEQ ID NO: 15788 - DNA, 1474 bp, Glycine max
  Clone ID: PAT_MRT3847_114261C.1
gaaattactgcgttttataaaaatttcttcgtgtcatattgggatttaataattcatattgaacacatttcttgagtaatttgagtagtatctttttcccataatcaaagagaagctaagagttagaagagtaaataatcacctgaaacaaaggaaatagaaacagggtatacctagcactcctcttataagcaagtgccatctaatttgcattttaacaaatttagattatgtaactaagtggtcttgttttgcaaagtttgtcctaattatatacatatgcagtaaagtaaaactaatgatgatagtgttagtaatgaggtagatacccttgtctacatggttcgtgatggatttggcatcaactataccatatgaggcaattggattttgttcactggcaaacggaaagtgggtctcccatacttcctcttgggtctgcttagattttggagaatcagacgggtcaagcaatacttcacaaggcttgagaaagacatcaggttcagctatttctgggtccgatgtgctaggcttctttctgtaacacttttttcaattcattgtgctggttgtctctattacatgctagctgatcgttacccccaccaaggaaagacatggattggagctgtgaatccaaacttccgagagacaagccttcggatcagatacatttcagccatgtactggtccatcactaccatgaccactgtaggttatggtgacctctacgctgtcaacaccatagaaatgatcttcattattttctacatgctctttatcattggcctaactgcttacttgattggtaacatgacaaatcttgttgtagaaggaactcggcgtaccatggagtggagaaatagcattgaagcagcatcaaattttgtgtgccgaaatcggttgcctccaaggttaaaagagcagatcttggcttatatgtgcttaagatttaaggcagagaacttgaatcagcatcagcttattgaacagcttccgaaatcgatttgcaaaagcatctgccagcatttgttttttgcaactgtagagaaagtctatcttttcaaagacgtctcaaaagaaattcttttgtccctggttgcaaaaatgaaggcagaatacataccaccaagagaggatgttatcatgcaaaatgaagcaccagatgatatttacattatagtctctggcgaagtggagatcatccatactgaaatggagagagaaagaattttggggactctacatactggggacatgtttggagaggttggtgcacttattagtagacctcagagctttacctacagaaccaagactctaacacagctcctgagactcaaaaccaatactcttatggaagcaatgcagattaaaagagaagacagacaaatactcaaaaattttcttcagcatatcaagcagcttaaggatctgagtatcaaagatttgatggtggaaaatgtggaag

SEQ ID NO: 15789 - DNA, 288 bp, Glycine max
  Clone ID: PAT_MRT3847_114262C.1
gataaatataaattgattcaatacgtgaaacactgcctgtacaaagcacatcaatttgtgccgcctaccaatatgtcccatcacataaatgattgcgtgacattaatactacggtcatcatcccgcgggctacgtgctcagactcacaggcgtgggccataaggctaaccgggcatgactaccggggaactaatctactatgcccgcacctgtattgaatggcacaaggatgtacttatgctcaagctttacgccaggatcgcaacgtcctatactactacaccatgc

SEQ ID NO: 15790 - DNA, 217 bp, Glycine max
  Clone ID: PAT_MRT3847_114263C.1
gaattcggcccgagtttttttttttgtttataaaaactctggtgatgcatcgttgctcagcataacgtcttgcgcccaacctgagagcgatcggcggaatacctgacctgccggaaatgccatcttctgcgcccgcacctgcctttttcccgatttcaccttgcaagagcgctcggtttttcattttccaccggcttcttcaaaaggaccctttccg

SEQ ID NO: 15791 - DNA, 263 bp, Glycine max
  Clone ID: PAT_MRT3847_114264C.1
cggccgctcgagccggcctggccggattctccgagccgactcatcgactccacagggcttgttgccgaactggagccggaggaggccgtctcgcgcctggagcctgcgctggcggccatgaggggcgcggtacgccagtttggcggcatcgtcagcaaggagttgggggacggcttggccgcggtctttggtgccccgatcgccgacgacaaccatgcgccgctggcctgccatgcggccatcgagcttgtccggcgcgttgg

SEQ ID NO: 15792 - DNA, 523 bp, Glycine max
  Clone ID: PAT_MRT3847_114265C.1
acgagcttctatatccccatattttcttctccaacaagagtaaatggaaacaagcacaaagaactctcttcacattcggtgcaacagtttaccctctgcacctcacccacttgtatcacaattcgacgagcacttgcagagattgaaggactctgaagccaccatcacttctttgtcatcatcttcaataacccaaaaactaattggcttgcaggatttgcatgactatgctgataagttgctccagttgcccacaacccaacaagcctttggacacaaatgcagtgacaagtgggttgatgtcctattagaagggtctctggggcttcttgatatctgtagtacagcccaagattgcctcttgcaatcaaaggaaagtgttcacatggttcagtcagtaattcgaaggaagtgccctgacactgaattcgcagttgagggtggaaaatacttggcatcaaggaaaaagatgaagaaggcaattcataaggccttaggcaatgtgaaaggaatgagaaatgag

SEQ ID NO: 15793 - DNA, 399 bp, Glycine max
  unsure (1)..(399): unsure at all n locations
  Clone ID: PAT_MRT3847_114266C.1
catcgagaccgcttangatttcatactttacaatggagaacannaagatacgcgacgaagcctgtgggggtgtatttggaaatatgcgtcagtgtcccaccccaaaatcattgtggattgtgcgggtactaaaggacaatgcgtgcgtgtcacgaacccaaagggtgtactgtttacaagcgagcgagcaagatcggcttagcttccctttaacacagcgcttgttcggtattaaaattgggtcgatttctgttatgttaacggaaggaactttgtctntggcccagctcttgggacaatcgatttacaatcacatttgcgaggtgattgttgcagattcttgaagatatccataaaagcatctgcagatgccttangaaggcacggcttcattaacta

SEQ ID NO: 15794 - DNA, 418 bp, Glycine max
  Clone ID: PAT_MRT3847_114267C.1
gtacttgtttgaaagctttccaatgagccaaaatggacctattcactgtctgacgacaaccaatgattgtcctaaaacctttaactctttccatataaattgtggtggtgaaagggagctaagtagtgaaggtatagtatatgatccagatttagatccatcaggagcagcaacgtctaaaatcatgggttcaaattgggcatttagtaacaccggtcacttcttggatgcccaaaaacctgtatcagaaacctatatgcagcaacaaaataaaaccgggctttctaaactatatcaaacccgacgtgtattccccatttttctgacttattatggattttgtctggaaatggagactacacagtattgctccattttgcagagatcatgttcactgttgacacacatatagcaactt

SEQ ID NO: 15795 - DNA, 608 bp, Glycine max
  Clone ID: PAT_MRT3847_114268C.1
cccacgcgtccgtagaaatgaaaacagtagagatggtgataaaaaaaggggatgtgtatgagcctgaggttggacatctcattgctttgaccgataagagggcagcgtgcattaatgatttgaacaagcatggaaatttctatcttattgctttaattaggagggttagaaagaaaaatgacgacaaaaatgtttatgaggttcaatttttttttttatcaacaaaattaattcagtaccaagggtactaatgaatttacagatcatgagcaagataagcagaaatatggtaccctaatacaagctatatatctcaagaattaggagaccctatatctgacagtatgcttagcccaaaactacccaatgtctatatacttatccctccctgattacaaaatgcatccctaatattactggactagtggtgaaaaggtatgtcaaagctttttttctaggttttttagccatgtccaacacacggaaatagcaccctccatcaatttactatcattgaaacttttgtttaaaaagacaatcttatttttatgctaccaaatactccaagttaaggaaattcccaaatataccaacactgcatcctgata

SEQ ID NO: 15796 - DNA, 186 bp, Glycine max
  Clone ID: PAT_MRT3847_11426C.1
ctgatgcacttaggttttgggtgtccgctgctggtttctcctagttgcttctgctggtttattgaaagatgtcttatcaggtaacttgccaaggttggtctaagtctttctggcttaatttccgataccctttaataatggagcctttggtaaaagttggccaaccttttaagtcctttttatttt

SEQ ID NO: 15797 - DNA, 482 bp, Glycine max
  Clone ID: PAT_MRT3847_114270C.1
ccatcatatcatccatcttctttttgttcctttctttgtgagaatgtgtcgttaaaatagctctactcttaacgcacatgatccttaacactggcaggtacagcactaccaaacaattgagttttcttcctcagctaattgatatcagcaataagcaccaacacagaaggtgtcgtaattgttttcaatgatagatagtcttgaaaactccacccaagctataaaatcatcacccaccaaccttcaattctttagaatcaaccctttcaatgtcctgcatttttcaacaacttcacctacaccctttggtgtaacatgtcagcaactctggatgtccacaagtagtacgtccactacacctcttcgagattattgagagtgcttcatcctcgattcttgaccctgacaacttcaacacctcaagttgagaaacttcaagtccatcattttaaacactttcattcctgtataggccaggttca

SEQ ID NO: 15798 - DNA, 560 bp, Glycine max
  Clone ID: PAT_MRT3847_114271C.1
ccacgcgtccggtgaaaacctaaaccgtggaggcaaactggggcgctattaaacacacactgtgtccctcctcggcggagtggcgaggcaccgtactcgatgcgcgactactacgctactattgagaaacagagctcacgctgcctatcaattataacacgagtgaggagaactatgttacctttgatatgcgtccaactcacaaactgaagatcaccgtaggagagaccaatgacaactcatttgctaacaccaacccgtgactctggcgtgatgagctccgcgtatttctcctctatgggtcttggtcgaacccacttccatagccattgcaaacatgagctgccaccgtatgactcagattgaagcgagcgcaatttctacggttgtgaccgacaatgacgagcttggggcgaggagatccggggcctgggaaaaccctagcgttgttggctacggcggtggagtgtgtctaccacgttcaaactacgccgcggtacgggaccgaggttagccttatatgcccgaaagggagccttgattcgacgcacggcttggag

SEQ ID NO: 15799 - DNA, 476 bp, Glycine max
  Clone ID: PAT_MRT3847_114272C.1
tcgtggggcggccgctttttttatttttcttttttttttttttttttgggctcaaattcagcaattaaatttaaaggggtttatcctatcatgtccagaaaccacattaaacatccaatttaaccaaaatttaatctcaacacatcattattaagtattaatttcgaaaaacaaagcgagatccaaaaacattttggaaacaaaaatgcataatattatgctcagaacctgggcttggggaagaaccaccgttttttgccaagtttgaacctttccttcaggcgctttttgggcttcttgagagcagaaaccttattattcttggcttggagcacggtgggggtaacccttttctttaaatcgacattcagcgtgtattgcgggggcctgaagggctggtagttcacgagctttatgaacgcctttaaacgcgacttcttgggcggttttttggccgaatctttttgatcaccttt

SEQ ID NO: 15800 - DNA, 373 bp, Glycine max
  Clone ID: PAT_MRT3847_114273C.1
aatcgacccacgcatccggccacgcctcccacaagtatgtaattgtaatactcatcaatgtatattctctaaatgttagtcaaacgttattatgtgatgactaaatttcattcacataaaaaaacaaaacaaataatataaaaaaaaccaaaccttaaataaacaataaaaaaaaaaaaatgcacacctcttttaagaataccaacttacctaccccttccttcaaccccttaaatgatttatctagccaccttaaatcaaatgactactcctaattttacaaccttatcactacgaaaacccctgcattccccaaccaaatctacttccagaacattccccttttcccaatttgccttattgccaaaaagcc

SEQ ID NO: 15801 - DNA, 476 bp, Glycine max
  Clone ID: PAT_MRT3847_114274C.1
atacatattgctttaagattataccagtcacaggagattgtttattgcaagtatcaaaattctctattaattttttttagccaatataaataagaaagcctttacattgaatcaaactaccaagcactcatgtgtattcatccaccagggttttaagcagcaggtgctagctggcccgcactcctttttctagctttttcaaagaatgatagcttaatacccttacccttgggcagtgatatacatggctttgtgcccttgccaataataaacactttgcccatgctaataacatattcatgtccagtggaaacctgctttgaatagacacaaagctccccttatgcttctcccagttcttgatcactgcaacacgccccataaatctggcagcgtgttaccataactggggggcgcacatggaattagataggagcatccttctagaaaacctccagatccaaattaatgggggc

SEQ ID NO: 15802 - DNA, 472 bp, Glycine max
  Clone ID: PAT_MRT3847_114275C.1
tttaggagatgaagccgaactgggccgccattgtgtttggccacggggcacagcagcagcatctggacatggcaattgtgcataacatgggcgagaaggaggccaaaattgcgacgtctgctggcgtgccgttgcgcattctgagcacaacgccaatgatggcaaacgtcgagggacgcgtgggggcaaaggcggcgccaaaaatgggaccatctgctgctggtcatgggctgagtgcccagttcgagttcagcgccatgtcggcacggatggcacaaattcagaaaatggaactgatcactccgtttgctgccagcggcgtcgaaagtattcgctcgctgcacatcaatttgccgctgcaaggcgagctgagtttggtcaactctgagcagcagcagggcatcagcatcaaagttaagttgccccagcgcgggactcagttggccagcgcccactcgctgccgttcacttt

SEQ ID NO: 15803 - DNA, 179 bp, Glycine max
  Clone ID: PAT_MRT3847_114276C.1
gatttttggataaaccggaaccacaggtggccgaccctaaaacccggaaccaaagccatcggtcactggattccaagaatcactcaatacctccctcactcttggggtccgattcctaaggggaagagaaaacactctctgggctggccacagactccgtgaatcatatacggtgccac

SEQ ID NO: 15804 - DNA, 1306 bp, Glycine max
  Clone ID: PAT_MRT3847_114277C.1
cttttggaagaggaggtggcttttgagggaaaggagggaacttttagtgtgggagggtggaaactggaattgggtttggttgggggtaaagagaatgaagattcagtgtaacgtgtgtgaggctgcggaggccaaggttctgtgttgtgctgacgaggctgcgctgtgttgggagtgtgatgagaaggttcatgcggctaacaagcttgccagcaagcaccagagagtgcctctttctacctcttcctctcatatgcccaaatgtgacatttgtcaggaagcattaggctattttttctgtctagaagatcgggctctgctctgcagaaaatgtgatgtggcaatacacactgcaaatgcttatgtctctggtcatcagaggtttcttctcactggtgtaagagtaggccttgaagctatagaccctggtgcttccttaacttctttgaagtcagattctggggagaaagtttcagatacaaagtcttcttctgtctctagaaaggtttccacagtgccccagccatcaaattacaatgaagtgctacccattgaagttggaggagttggggagtttccaccagccaaggtgtcttttggtggtggttctacagatggaaatatctcacagtggactattgatgaatttattggcttaaacgagttcagtcagcattatgattacatggaaggatcatcaagggccgatggtggtaagcttggggattctgattctcctgttttaaagtctggtgaagaggatatggaggaggaggatgactatttggaacgtgttccagattcgtcgtggacagttcctcagatcccttccccacctactgcttctgggttatgctggccaaaagaccctcaatattcatctgatagtgttctgtttgttcctgacataagcttctctctcattcaacaatctcagattagtagtatttgtttgagacgctggaggcagctttaatttgtttactctttgctaataacttagaggcattgattattccttttatttttggtatgattataagttctctcatgttgcagtggaagtttcatttgattagttacattttctattcttggctgtctcagtttcttctagggagtaatcaaactctctacatgtcattggaaattttcctagcaaagcagcaacaaataatgggagtttagaaggcttttactattaagtttggttttgtaacattatcatttccgctctaggatcctatgtagatgcatcatctattggattataatagtgatatgattcaatattggattgtttgtg

SEQ ID NO: 15805 - DNA, 1106 bp, Glycine max
  Clone ID: PAT_MRT3847_114278C.1
ctttcttttccctctctcaattccaaacagtagatttagacacccttttggaaaaggaagtgttttttgagggaaaggagggaattttttgtgtgggagggtggaacccggaattcggtttggttggggtagagaggatgaagattcagtgtaacgtgtgtgaggctgcggaggccaaggttctttgttgtgctgatgaggctgggctgtgttgggagtgtgatgagaaggttcatgcggctaacaagcttgccagcaagcaccagagagtgcctctttctacctcttcctctcatatgcctaaatgtgacatttgtcaggaagcattaggctattttttctgtctagaagatcgggctctgctctgcagaaaatgtgatgtggcaatacacactgcaaatgcttatgtctctggtcatcagaggtttcttctaactggtgtaagagtaggccttgaagctacagaccctggtgcttcctcaacttctttgaagtcagattctggggagaaagtttcagattcttctgtctctagaaaggtttccacagcgccccagccatcaaattataatgaagtgttacccgctgaagttggaggagttggggagtttccatcagccaaggtgtcctttggtggtggttccacagctggaaatatctcacagtggactattgatgaatttattggcttaaacgagttcagtcagaattatgattacatggaaggatcatcaaggtattgcagagttcagattcatcttttgtcatagattgtgtatactagtgccccttcagacacactaacacacgcgcgcgcgtgcagggagtaaaaggacagggatggggctgatccggtcttctgagggaatatgccctgttaacatggtcacatgactaaacaactggccaatgtagtataagttttataaatatgttgaatatttgtggtcagaaaaggtgtgagtagacttcaaacagtggaatctgacagattggttggttgaagtgcttgtgcttggtttcattctttcccttatttgtaagcccgttttaaatttggaaaacttgaccttttagaagtgcaatactcagttggctttcacctg

SEQ ID NO: 15806 - DNA, 2413 bp, Glycine max
  Clone ID: PAT_MRT3847_114279C.1
ctttcttttccctctctcaattccaagtgggttttatcttcttctttttttctttctccaaaagtgttaaaattttaactttgttttgccttaatttgattgttttatgcagagtagacagtagatttagacacccttttggaaaaggaagtgttttttgagggaaaggagggaattttttgtgtgggagggtggaacccggaattcggtttggttggggtagagaggatgaagattcagtgtaacgtgtgtgaggctgcggaggccaaggttctttgttgtgctgatgaggctgggctgtgttgggagtgtgatgagaaggttcatgcggctaacaagcttgccagcaagcaccagagagtgcctctttctacctcttcctctcatatgcctaaatgtgacatttgtcaggaagcattaggctattttttctgtctagaagatcgggctctgctctgcagaaaatgtgatgtggcaatacacactgcaaatgcttatgtctctggtcatcagaggtttcttctaactggtgtaagagtaggccttgaagctacagaccctggtgcttcctcaacttctttgaagtcagattctggggagaaagtttcagattcttctgtctctagaaaggtttccacagcgccccagccatcaaattataatgaagtgttacccgctgaagttggaggagttggggagtttccatcagccaaggtgtcctttggtggtggttccacagctggaaatatctcacagtggactattgatgaatttattggcttaaacgagttcagtcagaattatgattacatggaaggatcatcaagggtatgttcatagttgttgaaatataccctcttagcctagtatcccctgatcattggttttgtagagtttctatcatttaatgctttgtttttttgactgggttagtattgcagagttcagattcatcttttgtcatagattgtgtatactagtgccccttcagacacactaacacacgcgcgcgcgtgcagggagtaaaaggacagggatggggctgatccggtcttctgagggaatatgccctgttaacatggtcacatgactaaacaactggccaatgtagtataagttttataaatatgttgaatatttgtggtcagaaaaggtgtgagtagacttcaaacagtggaatctgacagattggttggttgaagtgcttgtgcttggtttcattctttcccttatttgtaagcccgttttaaatttggaaaacttgaccttttagaagtgcaatactcagttggctttcacctgaaactaattgctttctgaattaaatattgccaatcgtgaagataaaaaattataatcttaatgatgatgagccgggaatgatcatcctcaatggtgatccataatctagataccctagtcctcttgcatttgagtgcttaaaaacatgatattatttggatgagaatgtggattggaattattgtgcataatttactgatagacacatgtaagacaaattttcgacattcaaattacttcaatcaaacaaagatttgaattatatctatattcgtattttgagaaaatcaagagaatcaaatagaataggaaattgattaatgactttttttttcctttgtgactattctcattcaattgattattttcacatttattgtgtatttgtgtgcttaccatgtacagatagttaggcaaaataccatagatgtcttgtctgtatggttgtatggttctgtaactttttttttcacccttcctttcctgatgagtctgtgcaggctgacggtggtaagcttggggattctgattctcctgttttaagatctggtgaagaggaaatggaggaggaggatgactatttggaacgcgttccagattcgtcgtggacagtcccgcagatcccttccccacctacttcttctgggttatgctggccaaaagaccatactaatctgtatggttcatctgatagtgttctgtttgttcctgacataagcttctctctcattcaacaatctcagattagtagtatttgtttgagacgctggaggcagctttaatttgtttactctttgctaataacttagaggcattgattattccttttatttttggtatgattataagttctctcatgttgcagtggaagtttcatttgattagttacattttctattcttggctgtctcagtttcttctagggagtaatcaaactctctacatgtcattggaaattttcctagcaaagcagcaacaaataatgggagtttagaaggcttttactattaagtttggttttgtaacattatcatttccgctctaggatcctatgtagatgcatcatctattggattataatagtgatatgattcatattggtttgtttgtg

SEQ ID NO: 15807 - DNA, 606 bp, Glycine max
  unsure (1)..(606): unsure at all n locations
  Clone ID: PAT_MRT3847_11427C.1
ccacgcgtccgtctagggatggcttgttcctagttattggttatatgaggagagctttcctactaggacattttctagtaacaactatcatgaagcaatacaaagattgcagtcatttaaggcctctctaacaagacatgattccattgcttcagcctcatcttccttatcaaccttctcaagcccttcttctgctccttctccttctctctcacttcagggcgtgaacaatccacgcgtgtaccgtgtgacgtcttatggtgcagatccaacgggtaattcggatagcactgaagcactccttgcagccatagaagatgcagccaagggtcctagtgaaggatatttgatggaaggcatcagagaaccttggaggtgctcagattaatcttgagggtggaaattacttgatcagccggtcactcaagttgccggtggccggggtggggaaccttatgatacatggagggactataagagcctcagataattttccagaagacggctatatcattgnatttgtcaccctcttctaatggaagaaacagtttaccatcctacatttttgagttcataactctcaaggaactcttgctggacttcaac

SEQ ID NO: 15808 - DNA, 172 bp, Glycine max
  Clone ID: PAT_MRT3847_114280C.1
gtggcttttgagggaaaggagggaacttttagtgtgggagggtggaaactggaattgggtttggttgggggtaaagagaatgaagattcagtgtaacgtgtgtgaggctgcggaggccaaggttctgtgttgtgctgacgaggctgcgctgtgttgggagtgtgatgagaag

SEQ ID NO: 15809 - DNA, 225 bp, Glycine max
  Clone ID: PAT_MRT3847_114281C.1
gtttagcctttctatcacctgaaaatgtcttgctgcagtggtagactgcgttgccgaagcgcctgcacgtgctgtaacagctgcagaagctgctagatgtatccagacttgagcgacaccgagtctagcaccaccgagaccttgatcatcggagtggcaccagctaatgctgaatttgagagtgctgatataggcgttcccgctgagaacgattgctgcaaatgc

SEQ ID NO: 15810 - DNA, 763 bp, Glycine max
  Clone ID: PAT_MRT3847_114282C.1
tacggctgcgagaagacgacagaaggggatctatttgtgtatctgcaaaaaggaaacctacccttcagtattttgttgtagcttaggcttggttcggacttgggagagctccaatttgatcactccaaaacaaaaaagatatcaatccaatccaatccatctaaatggctctcagaattcacgttatttcccctttcttctcaatctccaccacctcccccgccgctctctccagccgccgaatctcctgcaccgccgccggcgatggaggcatcagcgacgcggccctcgcatcggagttggcggcgagggccgccagaatgaacgcgcatgcggcgaaggcggaggaggccatgcgcaagagcagaaagctcctcttcggagagctctgcgagtacatgggcctggacgaagaccaggcccaacacaaatggagcaacatggatgatgaccagaaatgtgttctcgtgaaagggtttcttaaagagtggggttctcattttcatcccttgtccgccaggtccacaaaagagatgttggaggaatatctgcgacaaggaaactcacctcccaagccaactaattcttctttcttcttcgagggactcaacagaattattggttttccctagaatatatattactccaattagttgctgctgctttattttttgaaacttcaatttgcttctttgtaattttgagacattcccaatgaattagtgttcatgtaaagggggggggggggggggggggccgaaaa

SEQ ID NO: 15811 - DNA, 2685 bp, Glycine max
  Clone ID: PAT_MRT3847_114283C.1
ctatttctttgttcttcaactatcccaagggaactgagagagagagagagagagagaagtcatggacgctgttgttcaaaccagaggccttctctgtctccccgcaaaccccgttaacagaatctcactctttaacccttcacaaggtttaaagcacagatttttctctccaaagccaaaaaacctttctgggtcttctctttcctccaatgggttcccaaaactctcaccaagacccaacaatgtctttgcccaaagggaccaaaacaaaaacttgttcttgtgcagggctgaggctgctgcagcctcctttggggaaccagaaagtgagtcacgagactcgaatatattccctccaatctgcacccacccccacttacctaccttatctctctctctctctctctctcaatcgttcttcacgagagagagagacatggacgccgtcgttcaaaccagaggccttctctctctccccaccaaccccaaaaccagggtttcgcatcatctgcatccatctcacggcctcaaacaccgttttctctctctaaaacccaaacccctctccgccccttctctctccgccgccgccgccaaatttcacccctttggcccaaagccccaaaatttattcatctgccgggccgaggccgctgctgccgcagatgggcctgcccagcccgccttcggggaagccgaggtcgccgaaaaacccaaacttttgggaatcgagatcaccaccttgaagaaaatcatccctctcggtttgatgttcttctgcatcctgttcaattacacgattctgagagacacaaaggatgttctggttataactgccagagggagcagtgcggagattataccctttctcaaaacgtgggtgaaccttcccatggccgttgggttcatgttgttgtacacaaagttgtccaatgttttgtcaaagcaagctcttttctacaccgtgattcttccattcattgctttctttggggctttcgggtttgtgttgtaccctctcagcaattatattcaccctgaggcatttgcggacaagcttctcaacatcctcggacctaggttccttgggccccttgcgataatgagaatttggagcttctgtttgttttatgtcatggctgagttgtgggggagtgtggttatttccgtactcttttgggggtttgctaatcagataactactattgaagaagcaaaacgattctacccactgttcggactcggggccaatgtagcccttattttctctggccggacagtcaaatacttttctaatctgaggcagaatttaggtcctggagttgatggttgggccatctctctgaaagcaatgatgagcatagttgtgggtatggggtttgcaatctgtttcctgtactggtgggtgaacaattatgttcctcttcctactcgtagcaagaagaagaaggagaagcccaaaatgggaacaatggagagcttgaagttcttggtgtcttcaaagtacatcagagatcttgccactttagtggttgcttatggaatcagcatcaatcttgttgaggttacctggaagtctaagctcaaagctcagtttcctagtcccaacgagtactcttcttttatgggtgacttctcaactgcaactggaattgccacattcacaatgatgcttgtcagccaatttatatttgacaagtatggatggggagttgctgccacaatcacccctacagtcctgcttttgacaggagttggtttcttttctcttatattgtttgggggcccgcttgcacctggtcttgcaagtcttggaatgactccacttctagctgctgtatatgtgggtgccttgcagaacatattcagcaagagtgctaagtacagtttattcgatccgtgcaaggaaatggcctacatacccttagatgaggataccaaggtcaaggggaaggcagccattgatgttgtgtgcaacccattggggaaatctggaggagctctgattcagcagttcatgatcttaacttttggttcactagctaactcaaccccatacctaggaggggtccttctggtgattgttcttgtctggttatcagcggccaagtcgcttgatacccagtttactgcattgcgccgagaagaagaacttgagaaagagatggaaagagcagcagctgttaagataccagtggtggccaaggatgaggatgaaaatggttctcttaaaagtgttccactgttaaatccaacagctggtgactcctcaagtatattgaattgaactcaactcacagtatttcaagcttaaactacattgaattgcaaggcaggaggagtaagccaaaactcatgagatttgttagcttaaactatttgttgtaggtcattatctcgtctgagtttgattgtcactttttttcaagtctttttattgttacttttgttctcacagataaatgattttattctctcaatatgaagctttcctattttgtagcacattttaaatttttttttgaaagaatgaacacatttgtaatttttgtttcaaataaatatgttcaatggttacaaaaaactctgtcaccacgttgtttttccaaccacaatgctcaagtacgagactttgcttaagaggatggaatgcaatgtgactccaaccaatgacttgttcgatcc

SEQ ID NO: 15812 - DNA, 2046 bp, Glycine max
  unsure (1)..(2046): unsure at all n locations
  Clone ID: PAT_MRT3847_114284C.1
cgacgtgagcggttcgctgcccgcgacgttgtgagaagtccactgaaccttatcattaagaagaaggagaagcccaaaatgggaacaatggagagcttgaagttcttggtgtcttcaaagtacatcagagatcttgccactttagtggttgcttatggaatcagcatcaatcttgttgaggttacctggaagtctaagctcaaagctcagtttcctagtcccaatgagtactcttcttttatgggtgacttctctactgcaactggaattgccacattcacaatgatgcttgtcagccaatttatatttgacaagtatggatggggagttgctgccacaatcacccctacggtcctgcttttgacaggagttggtttcttttctcttatattgtttgggggcccgcttgcacctggtcttgcaagtcttggaatgactccacttctagctgctgtatatgtgggtgctttgcagaacatatttagcaagagtgccaagtacagcttatttgatccctgcaaagaaatggcctacattccattggatgaggataccaaggttaaagggaaggcagccattgatgttgtgtgcaacccattggggaagtctggaggtgccctcatccagcaatttatgatattgacttttgggtcactagctaattcaaccccatacttgggaggagtgcttctgctgattgtttctgcctggctagcagcggcaaaatccttggatacccaatttactgcattgcgtaaagaggaagaactcgagaaagagatggaacgagcagccgccgtcaagataccagtggtggctgagactgagagtggaaatggttctcttgcaactggttcaccactgaatccatcctcaggtgactcctcaagcagtccatctgaagcctcaactcctcgcaattaaaatgtgccttctttctgtgagaaattgcctcacagaatgagcaaatagagctcttttgagagcagtgttaggtgaaactatttgttgtaggtttatatataagctcttatagaataagcttgctagctactttctcaagtcacataatttttttgtcctcatagatcagatgattttctttacttgttaatcatggtttactgtttagtgaaccgcaatttgttttcctatgaaagatagaagtcatttcactgttctgtaatctgtatttcactgtttctagactctagtctgccctttgattgggtgataaggacttagcgtgggcttggccctgattttgggctttcatgagttgtttgcagcccacatgtgttcaaatcatgcccttctactaaggtagtaccacaatttgtcttggaaaagaaaaaaattaacccctgcctgttccgaaaaaaaagaaagatntaattgcgaggagtgcttctgctgattgtttctgcctggctagcagcggcaaaatccttggatacccaatttactgcattgcgtaaagaggaagaactcgagaaagagatggaacgagcagccgccgtcaagataccagtggtggctgagactgagagtggaaatgggtctcttgcaactggttcaccactgaatccatcctcaggtgactcctcaagcagtccatctgaagcctcaactcctcgcaattaaaatgtgccttctttctgtgagaaattgcctcacagaatgagcaaatagagctcttttgagagcagtgttaggtgaaactatttgttgtaggtttatatataagctcttatagaataagcttgctagctactttctcaagtcacattttaattgcgaggagtgcttctgctgattgtttctgcctggctagcagcggcaaaatccttggatacccaatttactgcattgcgtaaagaggaagaactcgagaaagagatggaacgagcagccgccgtcaagataccagtggtggctgagactgagagtggaaaatggttctcttgcaactggttcaccactgaatccatcctcaggtgactcctcaagcagtccatctgaagcctcaactcctcgcattaaaat

SEQ ID NO: 15813 - DNA, 447 bp, Glycine max
  Clone ID: PAT_MRT3847_114285C.1
cctttttgacaaacaacaaaacagagagaaccaaagggtgtgatttatagacacgcagacactaagagcgcaccaagacaagagcggaatggaccaatgccaccgcgcgaaggcggagcgccaccgcagccaccaagacaagtaccagctcgcggaggaggacgaggagacggcgacgcaggaccgcaacggcgcctccaaaagcgcacggaggacggcagaacacgaggccgaatacgacaacagaattcgcctgaagagctgtaacggcacggacctcaccgcggacaaccacctctgcctcaagggcatgacgggccacaaggtgcaacagacgctgcccacgaggctggacactactgacgagtgggaaccacgcaaggacggagggcgcgcgaagcacaagcaccgaacgggaaaaacctcagggcaaaaggcgggaagacg

SEQ ID NO: 15814 - DNA, 277 bp, Glycine max
  Clone ID: PAT_MRT3847_114286C.1
ccggggcgccacgcgttctactgtttcatataatacacaagtttatttttcacagtaccaacatctccctgcggggggattgatttgcttcttccgatcccatcactaattgcatattgcaattcctctactcacaaaaaacctattcctataccctttctcttttcctgaacccaacacaacaactcaacacaggattaataaattaaattaaaatctatcttaaatcctctctctctctctttctcttttaacggtttgcatttctcttcctccc

SEQ ID NO: 15815 - DNA, 259 bp, Glycine max
  Clone ID: PAT_MRT3847_114287C.1
aaaaaataattgagcaatctatactatggcaactttggcgcacattaaatactggacgcccctcactataacatcatttcccctctaccatacaagaaaatttttaccctttaatgctcctttgtttcagcgccctttaccccatccatatgttacctgattctataattgcatctaatcatcaatcatcaattaattaatgcaaaattctctaatcatatttaaccatttttgttcttactctaacttccttttcacc

SEQ ID NO: 15816 - DNA, 462 bp, Glycine max
  Clone ID: PAT_MRT3847_114288C.1
cttcgggcatgcagatctttgttaagacccttacccgccagactattaccctagaagtcgagagctgcgacgccattgacaaccgtaaggcttaaaatcaagaccagggaggtattcccccaaaacaacaaaagcttatctttcgccgccagcaacttcaaggccggcctacccttgcttcctccaccatcaaaaaggggtaactctcaacttggtgtgcgtcttcgtggtggtatgcagatcttcgtcaagacccctacggtaagactattaccctcgaggtggagagctccgacaccattgacaatgtgaaagcgaagatccaggacaaggaaggaatcccaccggaccagcagaggcttatttttgctggcaaacaactagaagatggaaagaccctcgctgactacaacatccaaaaagagtcaactcttcacttgggtgtgcgtcttcgtggggggt

SEQ ID NO: 15817 - DNA, 191 bp, Glycine max
  Clone ID: PAT_MRT3847_114289C.1
gttccacaacattgatgagcagcagaatttttagccctggcctgatcatcagcaacaccagttttattgattaatgaaactggtgttgctgatgatcaggccagggccaaaaatcaataaaaaaaatctcaaaattgttgattttggacactataaaatgatttgaggttgaagaaaagttatgaaaagta

SEQ ID NO: 15818 - DNA, 269 bp, Glycine max
  unsure (1)..(269): unsure at all n locations
  Clone ID: PAT_MRT3847_11428C.1
tccggtttacataatcattacttttcgaactaatntgggaggaacaagcaaggaaagctcaaaggagagttgaactcataaccatcccgccaactactagagacagcgtattaccgcatcaaaaacaggaactagttccctaatcaatttatggttattggctttatcattctgatcccaaaacctgccaccgaaggactaatgttgttgtatacagccccaaattgggaacaagtaatggaataaagattggaagggccatgaattcc

SEQ ID NO: 15819 - DNA, 150 bp, Glycine max
  Clone ID: PAT_MRT3847_114290C.1
ctcgagccgtgaacacctactgaaagtggatggggatgatgacacatgtataataatgggaaaagtggtggtcaccaaaaattcttgcctgtacccattagacattactattcctgatgctatctaccctgaagaattacacgagaacgg

SEQ ID NO: 15820 - DNA, 2715 bp, Glycine max
  Clone ID: PAT_MRT3847_114291C.1
gatatgaattgtatctcgcattttgtttgtgatgacgcaaactatatatcagctaaatacattcaatgtctggtgtttagtgatctcgatctagttttacatatcatccgctaaaaaattcatgcaattcctaagaacgaacttgtgtttctctaagcacttaactctagcacaatgcaattagctagagatgcttaacataatgcatctcagaaaaatagtacatagaacctaaaagtacgaaacaaaatcttgagcttcttttcagtgttgccgcccaccttgcccttcttaattccttttttgccattgcaagtcaaaatcaactcacaatgaatttgatcttctgagcacaggtttttggtgtttgtcttcctctagtgccaccatacctaaatgtgatggatcgtccaacaacatcttagccaccaagtaaccagcaatggaccaagtttggcatttgcgggcttgcttcccaatataacgaccaagctttccatcataatattcgggccagttgtccttgaacaacctagtttcaacaatttcaagggcacgttttgcaatttggggtcgtcctgtcttgatagaggcagcagcaagaagccataatagaactgcatccaccacaatatccaaaaatgtatctcagaatttcttcaacgatatgctaaatgccaccttgcctcaaaggacctcatgtttacactagataaaagactctaaagtatatctcaattgagtacctaattaaataacatgttgtagtgttatcagtagcattcactgctctaatctaaataatagaatcattaatcttttcaaataaaagtattgtgtgcaatagttactgaaaattcaaagttgtaacatagttcaatgaaaatctggcctaagggcagaagaacggatacctggccaagatcctccattgtggtaactccatctagtgttttttgggtcacatccagttatgattcgccactcatggttttcaagggctggataacaaacttttagtggcatctccccaatcagttcctgccaccgagattcaatgagatccatgattgcaatggattgctcaggagtagccaagctggacaaaatagctatgcaattaccaaggcaaaaccaacggaaatccatcctagcaggactgacattcccaataaagtaaccacctttaagtggcatgaaatcaaaaatccaatcaggtagagaatcaggaatgacattaaacttgttgactgcagtatgtgagtattcttctgttttgaagcgatatacattgttaagttgcttcaaatccaaccaaaaatagcttctcaggtgatagcttaaggcatgcaatcgtttggtaattctttctctgaactcctcgccttcagcatcttcctttagcaatatcaaggcacaccttaaagccatgaagaaaagtgcttgaatctcaattggataaccataaacaccctgatatgtcaaaaacatgtgagtaagaagaaatactgaaactgtggatgtgttttcattaatggaggcacaaaattggattgttcttgactaaataggattgaactgttcacaatattaatctgcgaaaccagagaaacctagaactagaacaaaaatgttttcttacagccaattccttattttattctctaggcgatgtaaaatatgatgttgcagttatcatagagtccaacaaactcaccattctacgatctatcatgcagcatccatccgcacatagtagagtggggaaggtgtcaaatccctctgaaaggcataaattcaaaatcaagcgcatgcccttctgacattcaggcagttcagccaaggaattgtctcctgtagactttgtgtatgcacgaagtaatataatccaccaaaatcccgaatcaataggagcaacccggcctattgcactttcaccaaagtctgctatcaaggtctcatggtttctgactggatcatgaagtactttaaaacttgctggcattactccttctgctaggtgaaacttatcaatcattttctcccatgattgaaggcgaagggtcttcaagataaaatttctaacaatttcaggttcccccttcatcagaaaagccaaagcactagggacaaagtctcttacaaacacctggtcgtaattgattttctcatcagaactatccatagcagcaattgtaccaacacgctgaccacgaaaatacaccaaggaacgcatcagagcttcccagccttcagatactattggatgtgattgtggatccaataccaatgatcctggggtattcatacccgattttggctgaagagaagctgccttatcaagatggtctattgagtaagaagagttctcagaaactttggacagttcacttagtgatcttacttcgcatgatttgcatctttctataggccttggcttgtctacctttgtgaaatcaagttcctcctcatcagcttctgccgcaatacatagtgcatctgtacttttaaaacttccgttttgattttgacaccaatccatggtaaatgaagatatttccaaattcttaacggcgagaaagagtattgtaactacagtagtagttatcaaaagcccgagaaggggaagaaaaagaagaaatgagagagagagaagggtgttgccgaagcgtacgtatatattgcagaagtgaaagaaaaatccctaattatgcg

SEQ ID NO: 15821 - DNA, 355 bp, Glycine max
  Clone ID: PAT_MRT3847_114292C.1
tacggctgcgagaagacgacagaagggatccctttgcagagttaaaatagtaaattacattaagaataaagatgtataataggctaaacaaatatcaacctatccctagtgatgattgtcagatcctaatttcattcgggtgtaatgcttttatcatccgggtagaatgtttttatcattgccaatcgaattgcggcgtttggcatcggttacagcgcaggccaaggggtgactcagggttttgatggtcccttgtcagatctagaaacaaagccacaaggaagggcgaaatggtattttcatgaatatttctgaccctaaattcggtcaggctagtatctagctcgtttgggct

SEQ ID NO: 15822 - DNA, 1787 bp, Glycine max
  Clone ID: PAT_MRT3847_114293C.1
tttttttttttttttttttttttttttttttttccctcagcaaccaacactgaattatatggcaaacaagaagccttcaacaggaaaagaggaaagggtaattatgaattctcaacccccaacccttctgagtcttagaaatatgttcccctcctcggcagttcacgaagtatacaacatacaaattaacatgatgaactttgtgtatcatccaatcttacaggaaatacgatctcaaataatataatattatatataaagcaagcattcccctggaagtgagcaaagggtaacaatcatttcttccctcagcaaccaacactgaatacataaatattaacatgaagtttgtattatccatgctaatctacagaaaatgcgggcaccacgtatatatctcttgatgctgaaaatgctctctccatttaatatgttgttgtctttcaagtgtaactaagatcaaactatatggcatacactatctccccactgctatctatatcaagatcagattcagcatcagattcagattccaagtcataaatttgttcctccataaactggtcaaaagaataggtcccaactgctggtacggtagcttctgaaattatctgcatgatcgtatcgatgctctgcatgggttggtctggctcttcaaattgattgcccattatcttctcgtccatcaggtctgccgggagattcttcagaaaccattcatggttccagatttcagacatggtgattctctctgccgggtcaaaaacaaagatccttgaaataaggtggcgacactctggagatatttgaacaccgtccggaatggaatactggacactaagaactctctgaattgtcttccgaaagtcctttggttcattaggatcctcaaaaggatatgctcccactagcatcacatataaggttactccacatgaccagacatctgcaagcttgccatcatactcttgtttcagcaatacttctggagcaatatatgcaggagttcccacagttgactttggttgtgaatgaagcactgaagacttggagtacccaaaactcgcatatctttaaacgaggtgccgggcttcccatccagcaaagtgttttcaagcttcaagtcccgatgacatacttgcatagcataacaatagctgaccccagatatgagttgctgaaagaagaatctagcgtcattctcggtaaaacgtccaagcattgcagattttatcaaagagctctcccccagatgcatattccattacaatagcaagatgagtaggtgttaaaattatcctctttaaatctaacaatgttaggatgcctcagagacctgtgattaatgatttccctctttacattttcatcaatcttatcacccctttcggatgtacttgacggcgaccagttccttggtttgtttatcctgcatcagcctcgccacgccgaaatttccggacccgatgtcgcgtaccagatcgtaacggtcgctgtcgtgcatgatcggcatgtccatgcccggtccaaccgtcaacgccgcccgatccattgaaataaaccgaaccggaaacaaaacaacaacggcaataactgattttcttttctttttttggtttgttctcgaacggcgtttacataagagaacagaaaacggcgtcgtttgggggcgacggtataagaagtgaagaggaagagacgggaagactctctgagaaatgaaaaatgacgtgtagggggaaagagaagagaagagataaaaaaaattataatagtggattgggttc

SEQ ID NO: 15823 - DNA, 381 bp, Glycine max
  Clone ID: PAT_MRT3847_114294C.1
ttgtgtctgtactggagatgatctctaagtggcgctctcagaagtatgtcaagccttaatctataggcagctaaatggactagctgactaggtggacatgactatgagcagtctctgatggtattgacaaaactatgagctcacattcgcagtgatgatagttagctgatagcagaatctatgaagcaatactgttctctagatatataatgcataggtagacacctcctgaagatacagctatgctaatgctctcaagctcattatgagcccgtgggataatactgcatatgcaagaagcttatcttgtcaacatagaagatgggaacgagagctgtcttcagacagcccagaggaagctcgccaattgagagagagagc

SEQ ID NO: 15824 - DNA, 1057 bp, Glycine max
  Clone ID: PAT_MRT3847_114295C.1
agggggaatctcgatcaaattttgcaataaattgtcatgtttggaaaaagggccactcttaaactgggaccaaaatatgtcagcttgacaattgaaccaaaggcagggtatacataccatttacaccaataaattctaactccatttacagaataaaaaaacatgggagaggggggaactagtttcgtaaaaaatgctgattgctttgtggaatcctcgatggtgcaaggtttttgcaattagcatttgaagccatctggaatgaattgttgagcatggaaggctgtgtaaaataatgagagggtgcaagcattggcttccgaagtgtattcacattattattattattggaagcaacaaagtcttgaacattgagaggtggaatctttatgttctgcaaaggagggggatttcgccacgtgggaagtggccccgcaacatggagtgtctgaagcacaggacccgcgtccatcacagccttaaggagattacccttttgaggcaacacttttcccttagccatgtattcaatcacttggtccccagcatcacacgtgcgcttttgagacaagacactcatgttcatgttttgaacagaaggttgtttcagataataaccacccaagttgtgggactcgacaatgttattgttgttcatgttagagaattcctgaggagaaaatgcctcgagaagggaatctacggaggaggaaacgtgcgaggtgctgttggattcggtgatgctcgagtttgccttggtttgcgcatgaatcatcatcatggaaggaacttcgaacaaaatcgagggtgttagttttgtaacgagtttttgaagctcttctcttgcttcgagtttttgaagctcttctcttgcttcgtctctctcttggtatgccatcttcagcagattcaacagttccctcttcacgttctccatggtcttcagttccagtgtggtggccaaaagcttttgcctcaactcatcacaactctcgtgataactgaatatggaatccgagtgattttccatgtgttatgttgtgaaagaaccggacgg

SEQ ID NO: 15825 - DNA, 272 bp, Glycine max
  Clone ID: PAT_MRT3847_114297C.1
cgcggcttcaaccttgtagttattctctttcttcttttttagctatccctctcttgaaaaatctagatctcgttcttccttgatctacgtaacgcttttagtgaccggatctgtatggctctgaccgagatctacgccccgtgggggttttggcctggactctcatagatctgatgcatggaggctcagatctactgtacagaggtgtgcgattcatatactgtagataatcgatgagaagaacgcagatccagccgcttccgcttgttcga

SEQ ID NO: 15826 - DNA, 265 bp, Glycine max
  Clone ID: PAT_MRT3847_114298C.1
tccctctcgttcgatttcacatacacgaaatcgatggtattcactgcaaggacggtatgcttatcactaccctataatttggttaccgcggcctatccttataacctacaatcacgacaggtggactagccaaatacagcactttgcataaaaatagaacgttgtacggaaatctatacgtactgtcgggactgttacaagggccaatttaaatacggtgcacgcacaaacccctttacaagaagaccaacaattggcggcgttt

SEQ ID NO: 15827 - DNA, 249 bp, Glycine max
  Clone ID: PAT_MRT3847_114299C.1
aattaaaaaaaaaaaaactctagggttttttttatggttatcaatgcaaccaacaaagctaaactttcaattgatacccccaaccttcctattatttaaaaggcccataccacccgactgtggtttggaatttaaagggatatttgaagcaatcaagatctggagatattatgcttctttaatttagggaaagagtgtaccatagaaagaccagtaacttaaaagacacttgatagttttgaactctac

SEQ ID NO: 15828 - DNA, 158 bp, Glycine max
  Clone ID: PAT_MRT3847_11429C.1
cttcttctcttgcggctaggggggtagcgcagttcggtctagatttgaggatgatgggtaaggataaggttcacatcagtattgtagtcattgtcctggtcgactctgggatagccactaccactaggtgaactgatttacaagctaggttggattga

SEQ ID NO: 15829 - DNA, 243 bp, Glycine max
  Clone ID: PAT_MRT3847_1142C.1
aagggaaaacgacaataggtgttttgaattgaaggtatacccattgaggtaggattttctatgactaccaatacatccttactataaatacatcaacaaagtctctcttgacaaacacatttggaaaggcagaatgaactaatcaaataaatggaaaaaaattatgtgaagattgaactaattaagcaagaacattacatacagtattattaatgataattacacaatagatgatgcttctga

SEQ ID NO: 15830 - DNA, 833 bp, Glycine max
  Clone ID: PAT_MRT3847_114300C.1
ccccgcgtccgcaggtggaaaccgcacaaacgtccagctttctattttttcgaatcaaacttcagtagtcgtttattcgtttctcggtgagtgtggtgttcggtgttgcagaggtagccaattaacatgggacctggtggaccagggggtcctgggcctggtggacctggtggacctggttggggtcctgggcctggtgggccaggctggggtccaggcccgggaggacctggtttctttggttctggtgggtttttcggtggatgtgcagatggcctatgcaacgttgtatcttcatgcttctactgcttgtgctgttgttggttgttccgagattgttttggtggtcgacgcggcccaggcccaggcatgccacctcctttctaacaacaggcacattttcactgttacagtgttattaatttggattagaagagttgaagatttacgtgctgcccatgattgtcaagccatatatgtccattgttcatttagagggttaggttatttgtattcaattccagtttttatgctttggctgagtcgaaagtcgttgtttagctatgtaatgtgagactatgttattgttcattactatttaaagaattttagtaatgtcgacgatcatgattttgagttctttgctttgattgttgagaaagattttgaagctactttttcttattcaattttgaagctactttatctctgtgtggacaattaacaaatttctttggcttttctgtttttttacttcatatattaatgtttttttattttattcgcaatgttatcattttcttatgttttttttttaaaaccccttttgtttt

SEQ ID NO: 15831 - DNA, 166 bp, Glycine max
  Clone ID: PAT_MRT3847_114301C.1
cgacggctgtgagaagacaacagaaggggagcttccggctgcgacttctctcgtgtttgtgaaatacggccacccacactgcaaggtaaggcgcaagtgagatcatatggatctctgcattattagataaatatgcttcactgagcagtactgacttccaagctct

SEQ ID NO: 15832 - DNA, 667 bp, Glycine max
  Clone ID: PAT_MRT3847_114302C.1
agcgcgttcgccctttttttttttgctttgacttagtaacaagctagttaatcagaactaataactaataaggggggtcatgatactcggtcaatgcacggccactaataaattattgaaaactttttaatattaaactcttcatcatcttagcctctcttactatctgaagagattatcaagtttgaatattgagcgctgaaaatgaataaacctggattggtttatgcgttaatcaataaatagatacgtcaactgctatccaatggaggacaactataatagcgagttaggtcccatgaattcattattattgtagttggccaaacaagtaacgtatactagggggaaagaaagcaagaaagcgagagctccttcaagttggtatgtgagaatgatgatcaacatagtattctacaagaattcaagaactcttaaccaccacattaagttttcatcctaaaaagaatgaacaagtgagacatatgtattaagatatattctagaagataaaacataaatgcacaaattttttatttttctgccttccttattttcataatttaaagacaatcttatttaaaataccgctaaatattaaaatgtaaaacacttcacataaccagggaattaaattttttttttatttgcgaaaaatcaaaaagtt

SEQ ID NO: 15833 - DNA, 202 bp, Glycine max
  Clone ID: PAT_MRT3847_114303C.1
aggctgcgagaagacgacagaaggggacccaagaacacaacgaagccatgtaaaatttgcaggcaaaagggtaggtcccgccttaaaggtagtctcagacattcaaacaaatccaatcacattcatccttacaaaacttttgtgatggccattatgaacacagaccatgcatgcacccaaacacaccaagagtgttttctcg

SEQ ID NO: 15834 - DNA, 426 bp, Glycine max
  Clone ID: PAT_MRT3847_114304C.1
caaggcccggcaaaaaatcctaattttaaggctttaaaaaaaacccaaaaggtttccaaacgggcccagtccataattggaaaacaaaaacctttaaatttcaaaactaaccccaccctaaaacagcattttttaaaccggaaaggctaaactaaaggcaaggggggggcccccccggcccctggccctaaagatcataaaagggcccaggccagctaaaaaggtcatgaagcgggtcccaaagggaaaaccccatttttccccctcctggtaaaagccccaactaaaatcttgggctaattttggggggcttccttttaaaccccctaaggcgcttttttttccattaagctttaatttaaaaaaaaaaaggttttggggtttccttaaaccgaacggggggggggacccgtgggtcaacccgga

SEQ ID NO: 15835 - DNA, 254 bp, Glycine max
  Clone ID: PAT_MRT3847_114305C.1
tgacttcacaaacacttaataaagatgagttgtcggaacaacatgctggcgctaaaggagcgctagccgtttatctcactcgtggcgcttacacatgttcgcatcccactcaagcagttcataagctatcacgcttaaccacaactacgctgacatccactaagcactatacaccacactatacctgaactccttctcacacgctggcgcatgcatgtggcacgccatcaatgccatcttacgcaactcacatt

SEQ ID NO: 15836 - DNA, 386 bp, Glycine max
  Clone ID: PAT_MRT3847_114306C.1
gtaccattgaaatatgatttatatgccattgttgtgcatactggactttcttctacttcagggcattacttctgctttgttcgctcagctccagacacatggcataagttggatgattcaatggttactgaggtctcagtagaaacagcactgtctcaggaagcatacatattgttttatgcgcgacagggtactccatggtttttgcgcattatggaagagtaaacacaatgtttgaatccaaatattatgagtacatcttcctaagtctgttttagacgttggtgacaacatgtctaaatcaaatcctattttacttccaaatattgaaaagagtgtggctgaagaatccacagagtattctgagcctcagtttgattattatt

SEQ ID NO: 15837 - DNA, 2459 bp, Glycine max
  Clone ID: PAT_MRT3847_114307C.1
ccacgcgtccgaaaacacaaacatcgttttgtttgtttcaatatgtttgcacttcccgcctcatagacaacaaaggacaaacaagaacgaggttcctcttcatcatcttcatcccatgatgaagcattaccatgtcttgtacatgtttttatttttcttaccaatttctacgttaagtctccaccacaatgacactcatgcactcacccttttccgtcgccaaagtgacctacatggctaccttctttcaaattggacaggccatgatgcttgcaactccgcctggcgcggcgttctttgctccccgaacggccgcgtcaccgccctctccctcccttccctcaacctgcgtggcccactagaccctctcactcccctcacccaccttcgcctcctcaacctccacgacaaccgcttaaacggcaccgtttcaaccctcttctccaactgcaccaacctccaactcctctacctcagcagcaacgacttctccggcgagatcccgccggagatatcctccctaaaatccctcctccgcctcgacctctccgacaacaaccttcgcccacgcgtccggtcatatccaacttaacacaactcataacactgagactccagaacaaccttctctccggcgagatccccgacctctcttcctccatgaaaaatctcaaagaactcaacatgacaaacaatgagttctacggtcgcttaccatcccccatgttgaagaaattcagttctacaaccttctccggtaacgaaggattgtgtggtgcatcattgtttccgggttgctccttcaccacaacccctcctaacaataatgatagcaacaacaataatgataataatagtaatgagaaggaaccgtctcagacagtttcttcaaatcctagctccttccctgagaccagcataatcgcccgtccagggagggagcagcagcgcaagggcttgagtcctggtgccattgtggccatcgtgatcgcgaattgcgtggcactgctcgtggtagtgtcgttcgcggtggcgcattgttgtgctagagggaggggttcgagtttggtggggagtggggagagctacgggaagaggaagagtttgagcagtacatggatgtgattgggaagcttaagcatcctaatgttgtgagactcaaagcttattactatgccaaggaggaaaagcttcttgtctatgattatctctccaatggaagcttgcatgctcttcttcacgggaacccgtggcccgggaagaattccattgggattggactacaagaataagcttggtgttaggagcagcaagaggtcttgcaaagattcatgcagagtacagtgcagccaaagtgcctcacgggaatgtgaaatcctccaacgtgcttctagacaagaacggtgttgcatgcatctccgattttgggttatcactcctattaaacccggttcacgccattgcccgattgggagggtacagggccccggagcaagaacagaacaagaggctatctcagcaggctgatgtgtatagtttcggagtattgttgttagaagttctcacaggaagagctccttcatcgcagtacccttcaccggctcgtccccgaatggaggtagagccggaacaggctgcggtggaccttcccaaatgggttcgctcggtggtgagagaagagtggactgcagaggtttttgatcaggagttgttgcgctacaagaacattgaggaagagcttgtgtccatgttgcatgtggggttgacttgtgtggtggcgcagccagagaagaggccaaccatggaggaagttgtgaagatgattgaggagatcagggtggagcaatcgcctcttggggaggactatgatgtatcatgcaattcgctttcgccttccattcccaccactgaagatggtctagcttaggagtaatgttgaatattgttgtctggtatatataagattaattcatgtcatgttttgtaggtacttgcagtctcctcctctagttgcatggtctaaatgcacattacttattggcgctgttcagtgttctttgtaaaatttgtgagttatttggaatttcattgttgaacgtagcgcaaatctgaatgatctgatcttgagcttgagcttagagtaagtactagtgtgtagttgaattgtataaggtacatttggagtttgcatcaatggacacagtcttgagatataattggtccaattcaatggcattgtcataataaaagcactgaatcagcaattatgaattgggtaacacaattcaatgacattgtcattcatgtgagaccctgaaatcatggaatcatgttaggagcatcaatatgctcaaaactgctgttaaaagctaggcacgcggcatataatttcaatggaagttcatgatgaattaaccgcatgccagaaatagcttgcgactcacactaatgagttactt

SEQ ID NO: 15838 - DNA, 273 bp, Glycine max
  Clone ID: PAT_MRT3847_114308C.1
tatcgagccgattcggctcgagatcttaatttgttttttggtgatcgtattgaatatatttggaaaaatagaaactgcacggattttcgaaaatagagtggcaggggtggtggagactctttgagcattgtgcagaataggaggcttcaattgtctccttcgatggttccttgtgagttcccaaatcctataaaatccgatgataataaccatgcaaaatggagataagtaaatccgtccttgttccggccagttgccatccctggccccaac

SEQ ID NO: 15839 - DNA, 193 bp, Glycine max
  Clone ID: PAT_MRT3847_114309C.1
gtatctttgagagttgatctccgccatatcctacaacaaagtacttcatcctcataacatgaggccaacagagaaggcgccggtcacggtgacccctccctcaaacaaacgtaaatacatattgaagccttatgcgtaaattccagagaaaatatcttaagactgtgcgtacataggaatatagtgccctcac

SEQ ID NO: 15840 - DNA, 785 bp, Glycine max
  unsure (1)..(785): unsure at all n locations
  Clone ID: PAT_MRT3847_11430C.1
ccacgcgtccgcatactgtgacacggtccgaaacaatttcgcttttcccttcaaacttccaagttccaattcaactctgatccttaaattcatttgcatatacaatcggttggatcattccactttctttaaatcattccaattccacaaccaacgaaaaatcatcatcaacacaacacaacaatgtcaaaaacaacaacttcttcttccgaacaaactgcacgcaaccgtttggccaccctcgcagctcacttgcttccctccgacgccgcctccgccaccgcgatcctccgcccccaccgcctctccgcccccgccggatcctctccgccggtgaacctgaagggtactgtcaccgtcgtcgacgagaggaccggcaagaagtaccagatcgaagtcaccccagatggcactgtcagagcctctgacttcaagaagatatcaactgggaaaaatgacaagggactcaaactttatgatcctggctatttgaacactgctcctgtcatctcaaggatttcttacattgatggtgatgctggaatccttagatatagaggatatcctattgaggacttggcagagaaaagcagctttatggaagtgtcatatctcataagatatgatacaatcaatgcctcatgatgcacatcctatnggtatgcttgtcaatgccatgagtgctttgtctgtttatcatcctgaagcaaatcctgctctcaaaggtcttgatatctacaactcaaagcaagtgagaaacaagcaagtagcacggggtattggaa

SEQ ID NO: 15841 - DNA, 1378 bp, Glycine max
  Clone ID: PAT_MRT3847_114310C.1
gggaaatcatcaatccagcgatttcgaagcagaagaaagaaggacaagaacaaaaaacgttggtattattattattattcaattcttcaatatccatatgcataccaacaagacacgctttttcgttcaatctccatagcgggggatgtagcatgccataaaagcaggagctctggttccttgtcatccggaaagaaatactgtagatctgggttagcaatggctcctggaagcagtgttttcaaagaagttcttgaatctcacctgatgtcttcagattacgaaacggggaaagctaaatctgaggccaagagtaacattacatccacaaaatctagcgttgggttgagtggaaagagtggaattagttcaaacaatggggtgtatgaattacttggatgccctgtttgcaagaatttgatgtatcccccaattcaccagtgcccaaatggccatacattatgttcccattgtaaagttgaagtccataatatctgcccatcctgccatcatgatcttgggaatataaggtgtttagctttggagaaagtggcagaatcattggagcttccttgcagatatcagagtcttggttgtcatgatatattcccgtactatactaagctgaagcatgagcaaaattgcggatttcgtccatacaattgtccctatgctggatctgagtgctctgtgatgggtgacatccctactcttgttgcccatctcaaggatgatcacaaggttgacatgcatgatggatgcaccttcaatcatcgatatgtcaaagcaaatccacatgaagttgaaaatgccacatggatgctaactgttttcaatagttttggaagacatttctgcttgcactttgaggcgttccagcttggctcggctccagtgtatatggcttttttgcgattcatgggtgatgacaatgaagcaaagaaattcagctacagcttggaggttggtgcaaatgggcgcaagcttatatggcaaggaattccaaggagcattcgggacagtcatagaaaagttcgagatagtcaagatgggcttataattcagaggaacctagccctttatttttctggtggagaaagacaagagttgaagttaagaatcactggtcgtatatggagagaagaatgagacatgtaaatataatattattagagatgtaaccattgttttaagattttggtctctggcaaagaatgaagcactatgtctgcttaacttatctctccatagatttgtctttcattccgtataccttgtgtcttagtggtgagggttactttcaatttggctcagccatctttcctttttggacaaaactatgtgcttctgaatattggaaatcaaacttacacagtca

SEQ ID NO: 15842 - DNA, 662 bp, Glycine max
  Clone ID: PAT_MRT3847_114311C.1
tgcaaaggaaaggaaacaatgaaaagattgtttctggatgtcacaagggtggatctgtttcatgttaagaactttgtgaattatgagctgctggaaaattacaagttgttgtccatgtaatgacgaatttattctcttgagattaagtattttcatataggtgggcagttgaaataaaaaaaaaaaaaaaaaaaaaaaaaaaaaaaaaaaaaaaaaaaaaaaaaataaaaaacaaataaacaaaactgaaagaaaaatggaacaacaaccctgtaacggcacaaaaaaacacggaaagaatgaggtggatacacacaaggggggccgcctttttaaggcaccaccctttcgcccccctgctttcgctttcttacctttttttttggggcccctaaatttaatttcccggcccagctttaaaaacaggggcgtccgggaaaacccttgatttacccctttaaagcgccttgacccaatacccttttttagggtggtggttaacgtaaagggccctccccctgaccccctgccaaatagtgctcccacttaaggggccttgggccccccccttgactcttgctttaaactggggcgggagtggggcctccccccgggtatccttttcatttataaaggctcttggccccgtctttttttttttt

SEQ ID NO: 15843 - DNA, 356 bp, Glycine max
  unsure (1)..(356): unsure at all n locations
  Clone ID: PAT_MRT3847_114312C.1
attcttacttagctcacactctgcactctccacgcgtccgtgcttccaacacacttcactgcacattctccattttcgttctcacttaattggcgcgttaaacccttcttcattgctgcaactccacgcgccagatctgcaaaaccattaagctatgctccagcaccactacgcatagcttattccaaaaatgtgcaattccaatcctaacaaccgtaaccgacacgctccgtcggcgccggagcccaagcccatgccggcttcttcttggggcaagaaaaccgggttcagggccaaactctncggggagaccaatgtcaccggttccggcccgataacccaccccgctcccaacg

SEQ ID NO: 15844 - DNA, 403 bp, Glycine max
  Clone ID: PAT_MRT3847_114313C.1
gtgtaattacatttttttttatatcaggtacctttttttctctttctagaactatgttctgggcgggcgcgtgtctttttatcattcttatctaggtttcactttcatttctgcgattatacatttctttgaacttcaatttacataataccactttaattgatatgaatatggattcatcttaatttcaatattcaatttctagtggagggtttatgctatagaacttgaatgtgatctttggatttttgcttgcttatgaagttccaggaccaaattgatacacaagatcactgtttttctatagagtttactatatatgatgtttgcttctaataaaacttctctgaaatttcttaacctatcatgtttttcatgctctaatcaattttattttgattaa

SEQ ID NO: 15845 - DNA, 566 bp, Glycine max
  Clone ID: PAT_MRT3847_114314C.1
ggggggggaattctggaccccgccacattttgcagccaaacatttttttggacattgaaaaacgggaacaggggtcccactggcgtgggccacttgtaaaaacaaaataatgcccgggaaggcaagcttgacttcatgttacagggggatttctggttcgtaacccatatatcatccccaaggaaaatcaataatagacaacataagcccaaactccatatgggaaggctaaacgttttaactggggaaaaccattccctttccctaaaaaggaggccagggcaaaaaaaacaaaaacacaggggggtccatcaccaagttcctaaaaatcataaagggaaaagctaaaaaaaaaaaaagggccaattccttcaattaaaatgcattgcctctggaagaaacttctccaaatcagcatcaaaaacatcagcagaaaccttttaaccacgggcttctccaccaaaaacttttccccggccccgaacccttaaaaggccttgcccttttcctcctggcctttttaaggccccaccttttccttggcccctttgaggaactccattaaa

SEQ ID NO: 15846 - DNA, 268 bp, Glycine max
  Clone ID: PAT_MRT3847_114315C.1
gatcaagatggatttctaatgcaagaaagactttcaagattaccattaaagatggatgtccctgagaagattctttatcaagcccatgttcaacctggtccagttgctgattttctgcatgagaatggtattttcttcatatatgctagtgttgacattctttgtgagaattgagaaaatgtgtataaggtagagtaaagatgatttattgcttgtgtgttctaaaccaaatcaagttgctttctaatgcgtgctattttcttgcagc

SEQ ID NO: 15847 - DNA, 359 bp, Glycine max
  Clone ID: PAT_MRT3847_114316C.1
tcgaggtcgctcttgagaagtttgctagggactttgaagttgaatcttgcattctttccggaagcgaagacttattctacccgtttggacccaaagttggtgaagggaaacattggcgaaaaccccattggtggggttggcattcttgggttcaaataccctggacattaccaacctggtgaaggaattttttgtttttttgaccccttcgaaaaggaaacaccgcaccatatttccattcaacttaatgccacatttaccggggtttattggcccctttaaccaacccgaaagtggcaagaaggggaactttgaacttaccggaagtaaattccttaaccacagtgggcaacaagttg

SEQ ID NO: 15848 - DNA, 486 bp, Glycine max
  Clone ID: PAT_MRT3847_114317C.1
agtattattgttgagtagaattactacaatctacacttcatatttcccaaatgatttttcaatatataatttcattatagtgtaaattttcttaaaagtgaaagtgtatatagagtcgatttaaaatgagttaagtttaccaaatatcttaatttaaatcagtagtaagtagtatattctatattttgcaaccaacaaaatgttcttattttttcactttaaaataggacgtgatgagtcattataaatctgttagtaactattttttatttctctggataaaaaaaactttaaatgtttcttcacttttaagaaagcaaatcttataaatttacaggtgaatgtagatgggaattaaattctgtatatcgttattactaatgttcaccatttgtttgtaacatgtaaacagttagttctatcgttatctactcaactagacatgttcagggaatacataggaaagctgaaaggcattgttggaga

SEQ ID NO: 15849 - DNA, 200 bp, Glycine max
  Clone ID: PAT_MRT3847_114318C.1
cttgattgtatgaattatgctggcatcaagggcaatttttgtacatgatcaggactatgaattatcatatccactattaaacaataccagttccataactcacaatatgctgagatatacttaagactactttctaaaagatcttagattatctccacattcaataccttccaactaattacactccacagctgatttgc

SEQ ID NO: 15850 - DNA, 2011 bp, Glycine max
  Clone ID: PAT_MRT3847_114319C.1
ttagagtattattgttgagtagaattactacaatctacacttcatatttcccaaatgatttttcaatatataatttcattatagtgtaaattttcttaaaagtgaaagtgtatatagagtcgatttaaaatgagttaagtttaccaaatatcttaatttaaatcagtagtaagtagtatattctatattttgcaaccaacaaaatgttcttattttttcactttaaaataggacgtgatgagtcattataaatctgttagtaactattttttatttctctggataaaaaaaactttaaatgtttcttcacttttaagaaagcaaatcttataaatttacaggtgaatgtagatgggaattaaattctgtatatcgttattactaatggtcaccatttgtttgtaacatgtaaacaattcggctcgagctagtacggctgcgagaagacgacagaagggggaagaacaagtcttgcattgggtggagcatacttagaaacagcaactatgtctctcatgcagcttactagctcccctgttggctcactggtccgtttcattgtaatatttgctttatggtacagaaccatggctttggccaagttgccaccaaacgcttcatcagttccagcagttttagcgtttggagattccatcgtggacccaggcaacaacaacaacataaaaacattgatcaagtgcaacttcccaccttatggaaaggattttcagggaggaaacccaacgggtcgattttgcaatggaaaaattccttctgacttaatagttgaacaattgggtattaaggagtatttgcctgcatatttggatccgaatctcaaatctagtgatcttgttaccggcgtctgctttgcctccggtgcttcaggatacgatcctttgacacccaaaataacgtcagttctatcgttatctactcaactagacatgttcagggaatacataggaaagctgaaaggcattgttggagagagcagaacaaactacatcctatccaatagtctttatcttgtggtggcaggtagtgacgacattgccaacacctattttgttgctcacgccagaatattacagtatgacattccttcttacaccgaccttatggtcaactcagcctctaattttgtaaaggaactgtataatctgggagctcgtagagttgcagtactgggtgcaccaccgattggatgcgtgccatcacagagaactctggctggagggctaacaagaaagtgctcagaaaagtacaattacgcagccaggttgttcaattccaaactttcaaaggaacttgattccctcggtcacaacttgtccgataccaggatagtttacattgatgtttacacccctctgctcgatatcattgaaaactaccaaaaatatggctataaagttatggacagaggttgctgtggcacaggcaaactagaggttgcagtgttatgcaaccctttggatgccacttgttccaatgcttcggaatatgtcttttgggatagttatcatccaacagaaggagtttacagaaagctcgtaaattatgttcttgaaaagtacatagatcgattgttttgagctcgattaagtttgcctacgggaagtaatatcaattattagttatgttgatgtcaacgaagacaatgagtattttgatttgtcgagttttggtgtgattgttcggtactttttgtagatttcaatgttcacaggcatcgatccatctcacagacgttccacatttttcctgtgtgaaatatttacctttaaagtggatgtatgttgttgtattcaggtgtttaaatatgatttttgatgattttactggttggaaatagctatttccttgttagttggagttaccaagtaaaaatgttattttgttgtttttggagcttgttattttgtgtctgccataatattcctctataaaatgtttcattatgttattttattaacagaataaaaattctctattattgttttttttt

SEQ ID NO: 15851 - DNA, 551 bp, Glycine max
  Clone ID: PAT_MRT3847_11431C.1
cgcatgcggatccaggggctcttacggtgttgctgcaggaccatattggggggttgcaggttgagaccaaacagggttggatccatgtcaggcctcagcctaacgctttggttattaacattggagattttcttcagataatttctaatgaaacatacaagagtgctcatcatagggtgttagctaattactctaatgagccacgagtctctgttgctgttttcctcaacccaagtgatagggtgagactttttggaccattgccagagttaacatcaacaagagaaaccagctctttataggaacttcactttcgatgaatttatgaaaaggttcttcacgaaagagttggacggtaaatcattgacaaatttcttcaggcagtgatgtacacacacatatatagcatctatttcgggtgatatatcattgttgaaggtacatatataaaaatgttgatgtgatgatgatggtattttatgttaatacgtttgtgaataaaaaggtgctatatgtatgtttgacaaaaaccttaaacaaaaatttttaat

SEQ ID NO: 15852 - DNA, 734 bp, Glycine max
  unsure (1)..(734): unsure at all n locations
  Clone ID: PAT_MRT3847_114320C.1
tttgtaaaggaattatataatctgggagctcgtagagttgcagtactgggtgcaccgccgattggatgcgtgccatcacagagaactctggctggagggctaacaagaaagtgctcagaaaagtacaattacgcagncaggttgttcaattccaaactttcaaaggaacttgattccctcggtcacaacttgtcagataccaggatagtttacattgatgtttactcccctctgctcgatatcattgataactaccaaaaatatggctataaagttatggacagaggttgctgtggcacaggcaaactagaggttgcagtgttatgcaaccctttggatgacacttgttccaatgcttcggaatatgtcttttgggatagttatcatccaacagaaggagtgtacagaaagatcgtaaatcatgttcttgaaaagtacatggatcgattgttttgagctcgattaagtttgcccacaggaagtaattaatatgaattggttatgttgatgtcaactaagacaatgagtattttgatttgtcgagtttatgtgattgttgggtactttttgtagatttaatattcatagcaggcatcgatccatctcagggacgtttcagatttttcctctgtgaaatgttttacttttagggttgatgtgtatgttgttctattctcatatacctttctccttgtatgtcacacgtttaattgacaccatttcaaatttcctcc

SEQ ID NO: 15853 - DNA, 568 bp, Glycine max
  Clone ID: PAT_MRT3847_114321C.1
aattcggctcgagttttttaacaaataataataattattattatccatcgtagatccactagtatatagtatatattacagattcactagtttattttatcattcaggaatagttgtgaaatcgtggctcaccgcaatgattcaatgcatgcattccgcacaatttaggaattactcctcttcacctctaatttctgactgcatatttgtagttgctcagcctgttataatttctaaattaaaatatacaaattaaaaaaataatctctctcactctcttcattattaattggacattttaatagtatttttttttaagaatatgtatcctatctggcaaacctgaaaaaaatctaactcaattatttcaaaatactatctctttttatctattttttttcttcctaaattgaattttaaatttttagtaataaatttaaaatatgattatatatttaaggatatttatttatggaccccaaaaaagatatttatgagtttaatttttattttaatataaatcaattagttaatcatcattaatttgatttctaaaattgttattgtg

SEQ ID NO: 15854 - DNA, 167 bp, Glycine max
  Clone ID: PAT_MRT3847_114322C.1
attattttattgcaggaccgcagaaagatgctagggaaatcatacagcgggacttatacaggccttctatagctgcgctcatcagggcagcgctctggcttgacagcacagtgttcactgagattgtttacaaaagccagatagctgcaaacgttgtgggtgatgag

SEQ ID NO: 15855 - DNA, 459 bp, Glycine max
  unsure (1)..(459): unsure at all n locations
  Clone ID: PAT_MRT3847_114323C.1
ctatctcgatcgaactgtccaaggtcctgtcactgggtggctgcgtgtgaagaggggcaaccaaaagaaaactagcgtaaaccagctggggaacggttgcattacggagggcctaatggggggccacagcaggtatagcggggcacgcaacttaaccaccaactggtagcgctgaggcgcccaaaggccgcaccctattgcatagagggtacgcgcagggctgacatggcttgctgcgggtataatgcgcacaaccagcttaaagagctgtgcggagagtactggtggaacagggggtggatttacacgtgccacgtagatagacatgagtacgtgcttaaggttataggcggcaaaacggagccttgcncgtagcaacaagctaggcttaaaagcacgtgcggcgtaggccgcgcagtggactgtgcagccagtcgcttaaaggttagagcaatggag

SEQ ID NO: 15856 - DNA, 336 bp, Glycine max
  Clone ID: PAT_MRT3847_114324C.1
gaagatgatgttgctcatgcatgatcatcatcatcatcatcatatgtaacagatatatacctttcttaaagactagtagtaaaagtgtagcagatttcagtgcatgcatgcgcgtatgctcactaccgagaaattctcgacaattactgtgggatgattataaggagcggtttgctaccgggcacttgcaggaagaatttgctttgtggtttagtaacgatatgaatataagacattatggttacctacggtgatgatgcatctgaaggttattctcgtggcagcagaacatatgtcactagatatcatgtcgaagcttttgcatatcttttcagt

SEQ ID NO: 15857 - DNA, 389 bp, Glycine max
  unsure (1)..(389): unsure at all n locations
  Clone ID: PAT_MRT3847_114325C.1
tctcgagccgaatcggctcgagacggctgcgagaagacgacagaagggtacacccccacatgatttaaaaaatttatttctaacatagcctttcaacgaaaatttgtttctcttatataaaatgagtttaatgtttatgtacttatgctatcattcaatcataaatcaccgtatgaattactttaagataattattttaaaagtcaacaaattatcatacataatgagttgtgattggatgattgtgtacaactttgactaaattgcaaatttgatccccctatttattttagaattcaattttgattcccctataatttaattcatgaatttagtccctcatttttttacaatatcgttattttagtcctcaaccncaaaattggacg

SEQ ID NO: 15858 - DNA, 137 bp, Glycine max
  Clone ID: PAT_MRT3847_114326C.1
ttgagttctttcaatctgggaaaattggctttgtccattttatgatcctgaaaatgattggtgcattattgccattattcttggatttttttggggttattggaaaggggaagttggattggaattttgggattcct

SEQ ID NO: 15859 - DNA, 459 bp, Glycine max
  Clone ID: PAT_MRT3847_114327C.1
ttattgtttgtttttttttttttttttgtgttttttttttttttttttttaaaaacaaatttttttcaagtttttaacatgataggaacgatccccaaaaaagttttactcctggcccgcaaacttggagcattaactcatttttccttccttctatagaacccaaaaaaataaattttgaattaaaaattttcccccaatgaaaaacttttttttaaactggaagttacacaaacatccaccatgggttttgcataagtaaggggccgggcaaaccttccatatttttaagcccaaaaccaaattacgcttggttttgaatcctccttcaattgatccgaatgagaatcacttgctttataaccggggtgcttatcacctactttccaaaatgaagacctagccttaaatgctttgggaacccaaactttttccttttgagcatttctgggaacccca

SEQ ID NO: 15860 - DNA, 243 bp, Glycine max
  Clone ID: PAT_MRT3847_114328C.1
tacggctgcgagaagacgacagaagggatttatctactttcttatgcttcccaagcctaccttgagtaaaatttaaacttggaagtttagtatatgtgctccaaaaacatatcaatagttataattcatatattatttcagttagggatgtcaatggccaggatgagggtggggagtactccctccatcccgtaaccccatctccatcctccattcccattgtgggggatttattttctctat

SEQ ID NO: 15861 - DNA, 252 bp, Glycine max
  Clone ID: PAT_MRT3847_114329C.1
accttatttggtattcctgagaatacaggtatagcactggcctgtgctatgaatagttcatttagggggcacgccagttctgtaatatacaccatctgctctcaagactgtgaataatggaattctgcttgcacaaaagcaatgaccatgtcatttaatccaaacccgagttttgacgcatggagattggaattttctgaagcagcaccggactatattgtgatatcattagtgtcacaggatggactgcca

SEQ ID NO: 15862 - DNA, 145 bp, Glycine max
  Clone ID: PAT_MRT3847_11432C.1
acactattcatcaattacttctggaatctttattaataatccaacttattttgcctgattacgattctttctctagatggaagctatatctaactcatgcgtatttctactttttcttctattggctgcatttctcattcaatca

SEQ ID NO: 15863 - DNA, 344 bp, Glycine max
  Clone ID: PAT_MRT3847_114330C.1
cggctcgagcagccacagccacaggtgtatgaacagcaatatccccagccacagccactgctgctttaaggtccaaagttggaagtactgtcaactttggaccttaaagcaccattgagggatgagacccatcaacagccacagccacagccacaggtgtatgaacagcaatatccccagctgcagcagtggctgtggctggcaggcattgtcacatcgtgtgagttacgtgtgggttgtggaagaggatggaaccttgacggggattgttactttccaaggaatgttgaaggttttcagagaccacctcaaatccatgtgctaacagttactactttactact

SEQ ID NO: 15864 - DNA, 487 bp, Glycine max
  Clone ID: PAT_MRT3847_114331C.1
aattcggctcgaggcgaatcatggaccagaatacagttcagcattgccacttaaaaggttcaatccaaaggagttggagattgccactggttttttcagtgcagacagcatcattggttctagcagtttgagcacagtttacaaaggtcaaatggaagatggccaggttgtagccataaaaagattgaatctgcaacaattctctgcaaatactgacaagatcttcaagagagaagccaacaccttgagccagatgagacataggaatttggtcaaggtacttggatatgcctgggagagtgggaaaatgaaggctttggttctagagtacatggagaatgggaatttggatagcatcatacacggcaaaggggtagatcagtctgtgacctctaggtggacattatctgaaagagtccgagttttcatttctattgctagtgcattggattatttgcactctgggtatggatttcccattgtgcac

SEQ ID NO: 15865 - DNA, 358 bp, Glycine max
  Clone ID: PAT_MRT3847_114332C.1
agaaggtggaggacaaacttgtgagtctacagagaaggtttctatggggtggagattgtgaacaaaagaaaatagcctggatcaaatgggagacaatatgccttccaaaagaagatgtcggcttgggagtcaaagatatcaactcgtttaatttatcattgttgggcacatggaagtgggacttattccagcagcaaggggaattgtgggctagggtacttgaatcaaagtatggtggctggagggcgctaaatgaagcaactagagacaataccggatctatatggtggagggacctaaagagggtggctcaacatctgcaacatgaggccataatgaagaacacaacattatagaa

SEQ ID NO: 15866 - DNA, 555 bp, Glycine max
  Clone ID: PAT_MRT3847_114333C.1
ctcaaagtacacttttggtgaaacgaaggggaaaagggcagcactgcaattctggtattgtacacttcccttccgactcgcattgcaggttgaaattgattttctttcatgagaaaaatggcttcggaagattcaagccggtggtgaagaaagaggtggattccaacaacaagagttccgtttccaaaaaggtcacaaaattcaagaaagaagagcccgaagccgttaagaagggtcctaaagtcaagaaggaagaaaatgacgacgacattcccctctggagaagcacctccaactccaaggaagtgaagaaaaagaagataacaataaagaaagaggaagagaataagaataataagaagaagaaagaaaaaaaggtttatgatttacctggccagaaacgagatccacccgaggagaaagaccctcttaggattttctacgagactttgttcaagcaagtccccagcagcgaaatgtcacaaatctggttgatggaatcggggttgcttcccaaagatttggcaaagaaagtatttgagaagaagaagaaag

SEQ ID NO: 15867 - DNA, 173 bp, Glycine max
  Clone ID: PAT_MRT3847_114334C.1
tacggctgcgagaagacgacagaaggggcaggaaaaaaaaaaaaaaaaaaaaaaaaaaaacggcccccgagcaggacgactccgaaccccgggatttatctcggcagggtcaccggaagggtgaatccgttccccaaaagtcttcctcttaaggggtcggtctaatcagggga

SEQ ID NO: 15868 - DNA, 337 bp, Glycine max
  Clone ID: PAT_MRT3847_114335C.1
gctatgcgttcggagaagttttattattgcagaaggctgctgtttacaattgtaacatggacggaaagccagtgttgttacagttttggggctctatgatgaaattattagtatttgctatcatatagtgaagcttgtgatgagtgccaatctctgacaaacttgctggaatattggagcatatttgtgaaaatttctgagaaagtcattcaattgtttagaagtgtaattgggagacatgacattggataatgttcttgggtcggcgtataagtaagcttgttattgcttattattgaaagtgagatgatgtagtcagacacctgcctggaatctg

SEQ ID NO: 15869 - DNA, 223 bp, Glycine max
  Clone ID: PAT_MRT3847_114336C.1
tcagactgttgtcctcaaagttggtatgtcatgtgaaggatgtgttggagcaccgaacacagttctaggaaaatcggatggtgtgcaatcatatcacattgattccaacgaacaacaggtgctactgaaaggaaatgtccagccagacacagttctgcataccgcttccaaaactgcgaacaacactacctccttcgaaggcgaccccccaacatctcaaacc

SEQ ID NO: 15870 - DNA, 448 bp, Glycine max
  Clone ID: PAT_MRT3847_114337C.1
ccctttcgttttcttaactacttccttaaaccctggaaacttggccgtgccttataccaaattgtaaaatttggcattgtacaatatatgctcaccaaggatttcactggtattctcgctgcaatccttgaagattatggagtctactgtcaaggagaatttaaagcaagatgtgggtgtccttatatggcacgcgctctgaattcgagtcattaatgggctttgtactgactagttcagttttatccagacacaaaggatgtactggctcatatcaagccattgaccaaatttttgacatttaaatcaattgtgttcctcacttggtcgcaaggtgtaccaaatgatctggtatgcacctttgcgtttgtcaaaacgcccatggctcaaggcttgcaggttcagtcacgagtccaagatttcatcatgtgcatcgagatgggcattg

SEQ ID NO: 15871 - DNA, 1229 bp, Glycine max
  Clone ID: PAT_MRT3847_114338C.1
atggcggcagaaaagggtgttgagatggtggcattggagtgtttgggaaaagggttcgatttggccagcgattttcggttgaggttcgcaaagggaattcgtgaagagaggttggtggtgcttgatgaacagaacaagagggatattttgattcctggaactggaggagttaccattaaaggggtttctgagaatattcgttgtgataaaggggatagaatacgcttcaagtctgatgtacttgaattcaatcagatgtctgagttgcttaatcagaaatcagcagtgcaagggaaagttccttctggctattttaatgcgctctttgatttgagtggggattggtttcgtgatgctgctgacaccaagtaccttgcttttgatgggtatttcatttcactctactatttgcacctcactgcttctccactcatactgcaagaggaggtaaagaagtctgttccggctcggtgggatccggcttcgttgtctaggttcatccagacatatggtacacacataatagtgggtatggctgtaggaggtcaagatttaatctgtgtcaaacaaaaacattcttcaaagattcctcctggtgatctcagaagacatttggaggatcttggagattttttattctcagatgtccctgaggtctttaaccgtgtgatgcaatcaaacacgatgcagttcactagtatttcagaaacatcaagcaaggatggcctcactattatttgctcaaaaagaggaggagatatgttcaagcacagccactcaaattggcttcagacagtgccgtctaaccctgaagcaatcctcttcaagtttgttccaatttcctcacttctgacaggaattcctggaagtggatatcttagtcatgcaatcaatctgtatctacgctataagccttctcctggagatttacaatactttttggagtttcaaattccaaggcaatgggcacctatgttttgcgagctgcctctcaggcatcagcgtagaaagactgcttccccttccctgcaatttagtttcatgggtccaaagcttcatataatctctacacaggtactgttaaccaaactcttgtgtttgagcaagtattgtatgtgttagtggttggcatgcgcatgtacttggagggcaggaaatgtgacagacttgctttacatataaaccatctttcaagcctcccaaataaaatgatcctctcttcaggaacc

SEQ ID NO: 15872 - DNA, 1406 bp, Glycine max
  Clone ID: PAT_MRT3847_114339C.1
atggcggcagaaaagggtgttgagatggtggcattggagtgtttgggaaaagggttcgatttggccagcgattttcggttgaggttcgcaaagggaattcgtgaagagaggttggtggtgcttgatgaacagaacaagagggatattttgattcctggaactggaggagttaccattaaaggggtttctgagaatattcgttgtgataaaggggatagaatacgcttcaagtctgatgtacttgaattcaatcagatgtctgagttgcttaatcagaaatcagcagtgcaagggaaagttccttctggctattttaatgcgctctttgatttgagtggggattggtttcgtgatgctgctgacaccaagtaccttgcttttgatgggtatttcatttcactctactatttgcacctcactgcttctccactcatactgcaagaggaggtaaagaagtctgttccggctcggtgggatccggcttcgttgtctaggttcatccagacatatggtacacacataatagtgggtatggctgtaggaggtcaagatttaatctgtgtcaaacaaaaacattcttcaaagattcctcctggtgatctcagaagacatttggaggatcttggagattttttattctcagatgtgagaagcccttctttactacagaggaagacagcggatggcaaacaaaaggtccctgaggtctttaaccgtgtgatgcaatcaaacacgatgcagttcactagtatttcagaaacatcaagcaaggatggcctcactattatttgctcaaaaagaggaggagatatgttcaagcacagccactcaaattggcttcagacagtgccgtctaaccctgaagcaatcctcttcaagtttgttcctatttcctcacttctgacaggaattcctggaagtggatatcttagtcatgcaatcaatctgtatctacgcttttccaagccatcactacttgaacagccactgtttaatttctttactgttgaggtgcacaacactccattgattcacttactctctgcagataagccttctcctggagatttacaatactttttggagtttcaaattccaaggcaatgggcacctatgttttgcgagctgcctctcaggcatcagcgtagaaagactgcttccccttccctgcaatttagtttcatgggtccaaagcttcatataatctctacacaggtggtaagtgaacaaaaacctgtggttggcatgcgcatgtacttggagggcaggaaatgtgacagacttgctttacatataaatcatctttcaagcctcccaaataaaatgatcctctcttcaggaacctcaaccttgagtacaccatcgatgtggcgaggatctgatgataatgaatccagtgatcaatt

SEQ ID NO: 15873 - DNA, 1380 bp, Glycine max
  Clone ID: PAT_MRT3847_11433C.1
cctttgcgtccggtttatttatggtcactcgttacaaaaaatgcactatcttgctttcaatccaagttcactttggtggcagttgaacgagtttgcaaccccacacacaaaaaccaaacccttaaaaatgtcatccccctcgccggtggccacggtggtctccgccgccgcgctgtacgaccgcgccaaagccgtgaaagaattcgacgaaaccaaggtcggagtcaaaggtttgatcgattcgggaatcagaaccatcccccctttcttcgtccacccgcccgaaaccctagcggacctcaagcgcggaaccaaacccgggtccgcgccggagatccccacggtggacctcgccgccgaggagagctcccgcgccgccgtggtggagcaggtccggcgggcggcgagcaccgtgggattcttccaggtggtcaaccacggcgtcccggaggagctgctattgcgaacgctggcggcggtgaaggcgttccacgagcagcccgcggaggagagggcgcgggtgtaccgtagggagatggggaagggtgtgtcgtatatttccaacgtggatctcttccaatcaaaagccgccagctggcgcgacaccatccagattaggatggggccaaccgcagtggattcgagcgagattccagaagtgtgtaggaaagaggtgatggagtgggacaaggaggtggtgcgtgtggcacgtgtgttgtatgctttactcagtgaggggctgggattgggtgcggagaggctcacggagatgggtctggtggaaggaagggttatggtggggcactattaccccttttgtcctcagcctgatctgacggtggggcttaactcgcatgcggatccaggggctcttacggtgttgctgcaggaccatattggggggttgcaggttgagactgaacagggttggatccatgtcaagcctcagcctaacgccttggttattaacattggagatttccttcagataatttctaatgaaacatacaagagtgctcatcatcgggtgttagccaattattctaacgagccacgagtctctattgccgttttcctcaacccaagtgatagggagaaacattttggaccattaccagagctaacatcaacagagaaaccagctctttataggaacttcacgttccatgaatttatgacaaggttcttcacgaaagagttggacggtaaatcattgacaaatttcttcaggcagtgatgtacacatatatattagcatctatttctggtgatgtatcaatgttggatatgcgatgatgaattttatgcttaataagtttgtgaataaaaggtgctatatgtttgacaaaagcgtaaaaaaaaaaaaaaaaaaactcgagc

SEQ ID NO: 15874 - DNA, 403 bp, Glycine max
  Clone ID: PAT_MRT3847_114340C.1
ggctcgaggtgaaatttctaagaataaacttgtctttttctgccaaaaatttgttaaaaaaaattatttgggttccggctaggatgaattagcttgtgggtggtttatgatgaacagcttaaaatgacatgtaatagtaggtaattttgatctgtttgtaacaatttttttttttaaataaaaaattgttacaaacagcttaaaatgacatgtaatagtaggtaattttgatctgtttgtaacaattttttattttaaaaaaaaaaaaaacataaaaagaaaaaaaaaaaaaaaaaaaaagaaaaaaaaaagaattggcctacaaatatggaaaaggacaacgagatgaccgatcttcacttgaggcttgattctataatgttaaaacaacacaggggggccc

SEQ ID NO: 15875 - DNA, 325 bp, Glycine max
  Clone ID: PAT_MRT3847_114341C.1
aaacaccagcaaactacatgttttttcattattaaaagggtaacaattcttttaaacattttgagttcgcccttctatttttaaccaggttcagtcacaggacataacatttttggtgttcaaatgccccataatttaaaattacttcaagccttcaccttaggggcccatccaacaataacattttccctctttggggtttttgttttctcaaatgactctcgggaaaacaacatctttttgtaattgggcacatgtaccaaactttttggatttttccaatttttgaaagggcccactgcctccccaaaaaggttcacgtttt

SEQ ID NO: 15876 - DNA, 369 bp, Glycine max
  Clone ID: PAT_MRT3847_114342C.1
gttagtggactaagggcgccccgagcacacgccgaggggcaactttgcggggtacgttctcgaatcccattgggcaaaaggggccacacatgaaggcaaggtggcagttccagtgtaccagtgcgaacggggcatgggttcaaggatgggcactcgcgatggggcaagtaaaacttgcatgcgctggtgttggcttgtcaacaagtctcactgggggtccactgttggcatttggtaggcaatatgacagcaggacgattgtgcaaggaatacgtggggcgcagaacgttgctcatcacaggcttctgccatctcagatagacatgcaggaggctaggaattacctggatattcagtattgcattggat

SEQ ID NO: 15877 - DNA, 280 bp, Glycine max
  Clone ID: PAT_MRT3847_114343C.1
gcccgccagacccgctcgctggaggagtcgtgccccgattgttggcccgacccgggcgcgcacgcgtcacgcgcgcaagccgcgcgcccgtccgtcacggccggcgccggttcatctacagaccaattttgaacgggctgtttctttgacgatttgtgtacaggcataatgtgtgaaccgattgaagctgttaaaatgccaaaaaaattgtggcacaaaaagaaaaatcgtttttatataaattttatttaattattttgaataaaatatttaattaact

SEQ ID NO: 15878 - DNA, 315 bp, Glycine max
  Clone ID: PAT_MRT3847_114344C.1
taccgggtttcaacatcttttttattcgaatcatcctaaatacgactctaggctatttatgaaatgatttcaacaaaccacaaatcctcacatagtcattgcaacataactattttgccatctttgcccttgaatggctcatcaccaatcatgcaagactaacatcatacccaatagacactgctacaagaagaatgatgatgacctctggagaaactgtcaaatacaataactccttagatacattcacacagatcctcaaaaatgatggttccaagtccttattcaaagaagccaataccaacatcctacaaa

SEQ ID NO: 15879 - DNA, 734 bp, Glycine max
  Clone ID: PAT_MRT3847_114345C.1
cccacgcgtccggaaaatatctagctaagccctttgtttcttataagctatgtgggtttgacttcttttttttttttttgctctcttgcaatttcaacaagtgaaagaaaactcggaagacaaaaaccaaaaatccaaaactaaaccactatcagctacatagtcttcgaagaagcaactgtggcaaatccttggtggacgggtcagggagggttatctggggttgaccacccaggaacccattcacctggcctaggcaaacgcccctcagaccttggaatcagcgaaaacagtggtgggcacaatagagaagaagatgaagacaatagagatgaaccaaaagagggtgcagttgaggttggaacccgcagaccaagaggaagacctcctggatccaaaaacaagccaaaaccacccattttcgtgacaagggacagcccaaataccctgaggagccacgtgatggaggtaactggaggagctgatgttgcagaaagtgttgcccaattcgcaaggaggcgtcagcgtggggtttgtgtgctcagcgggagtggctcagtggccaatgttactcttagacagccttctgctcctggtgctgtggtggcacttcatggaaggtttgaaattttgtccctaaccgggactttcctacctggccctgctcctccaggatccacaggactcaccgtgtatctggctggaggacagggccaggtagtgggagggagtgt

SEQ ID NO: 15880 - DNA, 398 bp, Glycine max
  Clone ID: PAT_MRT3847_114346C.1
accacgcgtccgctgtagcgatctcattctgatttggtgacttagactacattgccatttgctgtttgtttatgagatttaacgatcctgtatttatggctggtgttctcacacggaaaagcaaaaaagaggataactcctcctttagcagcggtggaaaaagcacattgcatgcatgtgtggccaccatttggcaagaagaaggtcgagactctttcctacttgttagacctagatgatgcccaattggaaagggaagtcgactaccttgtaatgaaaggatggattccttgcttggaattctatatggagcacgggtgcgtgtaacatgagcacaacaggccacgtgtatactataatggacgctactgaaccatggggaagctgcctatgtttgg

SEQ ID NO: 15881 - DNA, 260 bp, Glycine max
  Clone ID: PAT_MRT3847_114347C.1
agttatgcacaactaaactcttaagttaaggggagagaactactaatatccttatcttaagaccattccttaaataaaaatgctcctcacaaacagctggttctctcataaacacatcaacatacactactttttcatactgcctagagaggaaaggactgctggtcttattgccttcaattatttttttttcaacacccttatatgttcagccatacttgcaaattccttctgacatcaagcttttacaataatacata

SEQ ID NO: 15882 - DNA, 329 bp, Glycine max
  Clone ID: PAT_MRT3847_114348C.1
ggagggcaaaaggggaaacggccttactttaataattaaaaccccccccaattaaggcggggctgaacactggacaggaaaaacccagggagggttttgtttataccaaagggaaacaaccccggaagggaagggcccggggaacataattaacccttaggttttattataagggggtaaaaaggggggcaaaaccttgacccactgttatctgaaattaataaaaggccatcaaagtttttggctcacacttgaaagttcctttcccttttgcaaaaacctccccattggaatctaggaccccttctttctcttggcccttggggcgg

SEQ ID NO: 15883 - DNA, 248 bp, Glycine max
  Clone ID: PAT_MRT3847_114349C.1
cgacatcttcttttacgtattgaatctcataattcgctaaactagatctttgggtgctctttgaataaagaagggtctttgcttgattttggacatgtctctgctctcagatctcatcaaccttaacctctcctataccaccgagaaggtgatcgcatagtacatatggatcggtggatcacgaatgtacctgaggagcaaagcaaggactctcccatgaccacttatcgacccttcacagcttccca

SEQ ID NO: 15884 - DNA, 466 bp, Glycine max
  Clone ID: PAT_MRT3847_11434C.1
gattaaaagaaaattcaatctctatagatgcttcacgtaatagaaacttatcttgtcgtggtgcttcatctcaagcagagattgatgcaatgttctttacaattgcttgaattagatagcatattaattctgtctttatttcctctaatgattgcttcgttatttgattttatgtcttatgtgcctttctagggttcctgcaggttcttatgttccaatagcgggtgtatctttgaggaaatccttcacgggaagggtgcaaagatatacaaggaaaagtgttgttcagttagatgcactcaatagagatgatcagaagaataatacaaatggaggccaatcagttaatgccacaaaggacaggtttacaaggaagcctattgctacaagctcatcaaggaagtctttaccagtattgaggagggtaagcagggaagatacgagtaacacaaaggaaaatgttaga

SEQ ID NO: 15885 - DNA, 347 bp, Glycine max
  unsure (1)..(347): unsure at all n locations
  Clone ID: PAT_MRT3847_114350C.1
ggtcttgaattcccggggnttcnccggntaacccacgcgtcgccacgcgtcggttcatattcacatagaagaacatgttctctcctaagcgagattgctgatagccatcttaggagcaatatatcgcctttaattattacaaaggtgtgcgtattaaccatagtctttgtattgtgttcaacacgcagttacctttgaagcatacatcacatggtgatcagatatattcacattgaagatcaggcatcagctagctacagcatgatatggtttcttccacaatttcatgctcaacactaccagatgaccataacctcaccttactcaactaatatacttatgtcacc

SEQ ID NO: 15886 - DNA, 352 bp, Glycine max
  Clone ID: PAT_MRT3847_114351C.1
ctttatctcaacatatcaattactttcccctgtttgagactaactgggtctatctttggtctgggcataactcctgtgcgttgcccccgctcatcgtttcatccctcatgtatgcacctctcgttagatgttgtggtattagctaaccgtgttgcttgacctgacgtgtgtatctttgtcgagcgttcacaatcggagacttggtgggttgcattgttgtgagaagatgagaagagctcgtggtgatgtattgaacgtggattaggctgatgcagtgaacaacctatttaatctacctgatgctatggagaagttcatgtacccttcgtgtagtgctcatgatcaccaccat

SEQ ID NO: 15887 - DNA, 248 bp, Glycine max
  Clone ID: PAT_MRT3847_114352C.1
ttcttttttttttttatttttttttttttttttttttttttttttttttttaaaaagcaaaggcgggatccattaaagaaccttttgtcagtataaactctaaagcagaaaataaatagtatcaattccgcctcatttttgcctccaaaacacgggtttaaacatccgaaaaaaaaaatcagggggactcagcacccaaaaacattttacaggctaatactgactttttatacctgggaaattaaagg

SEQ ID NO: 15888 - DNA, 453 bp, Glycine max
  Clone ID: PAT_MRT3847_114353C.1
aaaaaaggggaaaaaaaggttaatcccccccttataccccaaaaaaaaaaaaggggtaaaaaacacgcccgggcaaaaccacgacgaccccaaaggcacaaccaaaaaggaccaaaatcctgggaacccgggggtaaacccggaaaatccggaccgggcccagcgggggccccagttatccctaaagggggtcacaaaaaaactgggcaaaaacaggggcaagaataaattccggggccaaaggggcatcccgacaaaatcccccacaaaaaaccagccggaaacaaaatggggaaacccgggggggccaaaggggggggcaaactccaataaaggggcgggccctcaccgccgcgagaacaggggggaaaccggggccgccgagattataaaaaaaaccgccaaccccggggggaagggaggccctaaatggcccccaggggggaaattttt

SEQ ID NO: 15889 - DNA, 241 bp, Glycine max
  Clone ID: PAT_MRT3847_114354C.1
aatttaaaaaaaaaatattggaaatttaaatataatctgcttaaattttatgtctcctcccttcatacgaagaaatagaagggaaggacatgatgtcactgttaacaatgataatcatggagattgtggtcattcctgaacccgacgtacattttgttaggatactgatagctggtaatgcatcattaccttgcacacccttttgggttgagagtcaatctagtaatctgctacatctata

SEQ ID NO: 15890 - DNA, 500 bp, Glycine max
  unsure (1)..(500): unsure at all n locations
  Clone ID: PAT_MRT3847_114355C.1
gaaaacgtaccttctcccaactcctcatgatggaccatgcagcaccaccagaaagcaccctcaccgaccatgttatgcttcctactctgtctctcctccctttaaccccaaaccaccaccatgatgatgatcaccacagtcaatgctctaacatcaccaaggatgatgaggaggaggagtctgtagtgggttggccaccagtaaactatcattggaggaagaaacttcgtgtggacgaaggtgttaggaataataataataataatcacatggtatcggttgctgatcatcgtcatcatagtgtttacgtgaaggtgaagatggagggtgtgggaattgcacgggaggttgatctcagcatgcaccaatcatttcacacgctcaagcaaacccttgatggacatgtttggaanatgtgatatttaacaatcaacaactatgaactgggctttctggacgaagaaagtgactggcttcttccacaagattacccatggaaa

SEQ ID NO: 15891 - DNA, 175 bp, Glycine max
  Clone ID: PAT_MRT3847_114356C.1
gtaccaaacagcactcggggttgccaaatttcatttgatacatgattgaactaaaacacacattttacatatggaacaaaaaaacttaccattttgtggaaaattctgtttgctctttacgacatttaaaccaccattttaaaactcaagcattctatcttgccaaactgtggga

SEQ ID NO: 15892 - DNA, 270 bp, Glycine max
  unsure (1)..(270): unsure at all n locations
  Clone ID: PAT_MRT3847_114357C.1
cttgaaacattgtgttatgagattaaagcctgcctgaatttgtgttgaattatgaganattagtaatgtgtgtntttgttttacgattaatgcttattttcctttnacttaaaaaaagacaataatacnnnnnnnnnnnnnnnnnntcaagataactcgcgtaaaaggaaaattggtagccnatagtgattatnctcgngagacacaactatattgcttattgttagttggggcnggggtgctattcgcatgtgatttgtaagtgggngg

SEQ ID NO: 15893 - DNA, 175 bp, Glycine max
  Clone ID: PAT_MRT3847_114358C.1
tagcgaatggtggtctttacatccaagttaatgttgttttcctcgactcaaggtgtctttcccctgaccaatgccagctattgggaaaggagatgcctccaaagagccctcagcgcgccccaccatattatgtctggttgattgagaggagacccctttttttgtatggaacttt

SEQ ID NO: 15894 - DNA, 353 bp, Glycine max
  Clone ID: PAT_MRT3847_114359C.1
aggagggtgagtcagatcaatggtttatttttctaagatcacaatccagagttctatggtacatagctcaacacgaagtcagaaaacccgaacaaaacaccccatttagaccttacttaaaaacccccgaaaccctaattcttggtattttaacccaaaccgacccattatagtctactggatcaggatatgaagcccttagcatggataaccctggtatgaccagcctgggccgaaagaaaagggaaggtcttttaatataatgagcccagggtgagttggctaagccgtagcccagaatggattggcttaaacccgaaggagagggccgccttccaaacaaaaccggcccc

SEQ ID NO: 15895 - DNA, 123 bp, Glycine max
  Clone ID: PAT_MRT3847_11435C.1
ctaaatcaaaccattttatttaactaccgaagagacaagattggttgggtatacaaggagcatgaaggacatattccaaacaagataggatgcgatgataaaacatcaaattggctaacacac

SEQ ID NO: 15896 - DNA, 264 bp, Glycine max
  Clone ID: PAT_MRT3847_114360C.1
cttggccaagccacagcatgtttccagggtggttttgctctgtgccgggttattaagaagaatgtgaaggcaagtgtatcacagggagaacacaagggcaaaagggctggaagcagttccatcaatgggagtgacacctcagtgaaattctactagtgagccattcagcaactctggtgatgcttcctctcaagcaagtcacctgaataaagagagccgttattcaagccctataacttctccgtacaatgtggctccaatggg

SEQ ID NO: 15897 - DNA, 720 bp, Glycine max
  Clone ID: PAT_MRT3847_114361C.1
atggcactctcagtctcctcaccctcatgcgtacgcgttccttcatgtttttggaaaccaaatggcaagagttgcaaagagcgtactaaggtttcatgtgcagctcacaatgataataagaatccgttggttggaatcggtattggggttgtaacgtcttgtgtgatgggtttaactgcattggatgcggacgccacgagaatcgaatactacgcaacagtggcagagcctttgtgtgagtacaactatgttaagtctggcctcggctactgcgatattgctgagggcttcggtgacgaagctccactgggtgagcttatcaatgttcactatactgcgagattcgctgatgggatagtattcgatagcagctataaacgtgctagacctctcaccatgcgcattggtgtgggcaaggtaatcaagggactggatcaggggattttagggggtgaaggagtacctccaatgcggataggtgggaaacgcaaactgcagattcctccgcacttagcatatggccctgaacctgcagggtgcttctcaggtgactgcaatatacccgccaatgccactcttctgtatgatattaattttgttgagagcaatgaaatggacattttgctagagaatatggatcaacttgtttggcagaatcttcttcctgattacaactacctcaagttactgttcctggttagtggagttgtacatgattga

SEQ ID NO: 15898 - DNA, 607 bp, Glycine max
  Clone ID: PAT_MRT3847_114362C.1
gatcatagcccggaccccattacagtggctgggacttgtattcctggcttaggactctgactaatatggcttcgattactgtgataatgagaaccccgaacacaacatgtgtgttcctagttgcaatagcgagagagactcttacaggaaccaagcttgccacgctcgttgcaaccttcttaatgtggagaaagaagaatgtgaagaaagtgaaattgcacgaccacgaccaccaccacaacacccggagagggaacctcatcaacccggtgagaaggatgaagacgaagatgatgcaccacgttcaatcccattccctcgcccacaacctcgtcaggatgaagagcacgagcagagagaggaacatgactggcctcacgaggaggaaacacgcggagataacgtatgtgaagatgacgatgaggatgaggatgacgaacaagatgaactgcaatatccattccctcgcccacctcatcataaggaatagctgaagcatgatgaacatgacgatgatgagcatcatcgatagagcgaccaaagttatgattctgacttacgacgacatgacaattagaacgcctttctctttggctctaacacgttc

SEQ ID NO: 15899 - DNA, 1272 bp, Glycine max
  Clone ID: PAT_MRT3847_114363C.1
acgcccacgcgttcggtggacccatggctgggtttgatatcctgagcgagccatagaaagagttgaattaatagagatacagataacgtgaaactgaaaggaaaatggcactctcagtctcctcaccctcatgcgtacgcgttccttcatgtttttggaaaccaaatggcaagagttgcaaagagcgtactaaggtttcatgtgcagctcacaatgataataagaatccgttggttggaatcggtattggggttgtaacgtcttgtgtgatgggtttaactgcattggatgcggacgccacgagaatcgaatactacgcaacagtggcagagcctttgtgtgagtacaactatgttaagtctggcctcggctactgcgatattgctgagggcttcggtgacgaagctccactgggtgagcttatcaatgttcactatactgcgagattcgctgatgggatagtattcgatagcagctataaacgtgctagacctctcaccatgcgcattggtgtgggcaaggtaatcaagggactggatcaggggattttagggggtgaaggagtacctccaatgcggataggtgggaaacgcaaactgcagattcctccgcacttagcatatggccctgaacctgcagggtgcttctcaggtgactgcaatatacccgccaatgccactcttctgtatgatattaattttgttgaggtttattcggggaacagatcaaagtgaagtcagtcaaaactggtcagatacatatatacatatgaaccacagatggatgggtttagagcaatgaaatggacattttgctagagaatatggatcaacttgtttggcagaatcttcttcctgattacaactacctcaagttactgttcctggttagtggagttgtacatgattgacctggatatcccttttgagagtaatgagcaatccttcctggtgatatatattaagataattcatgtgtatctctgcacatgacatgcgaacagtttgtgcatctttagtgtaaatgtaattttcaatactgctctgaatgataaaaaattgttaattcttcatttgataaaaaaaaaaaaaaaaaaaaaaaaaaaaaaaaaaaaaaaaaaaaaaaaaaaaaaaaaaaaaaaaaaaaaaaaaaaaaaaaaaaaaaaaaaaaaaaaaaaaaaaaaaaagggggggccgggttttaaaggatcaaattttacttacgcgtgcttgcaacgaaatagtttttttttggggcccccaaaattaaatt

SEQ ID NO: 15900 - DNA, 250 bp, Glycine max
  Clone ID: PAT_MRT3847_114364C.1
gtaacagccagctaaccgtgaaaagcccaccatggaaatcgggcgctctgggggtccgaattgtattctggataaccattctcagtggcagacctggcccaagtcccctgaaatggggcgccagagaaggtgagagccctgtcgtgcccgggccctgttgcaccaccaggcgctgttggtgagtctggttgataggaaatgcagccccaatcggtcggttgattccgtacaaagctaaatactgtctaga

SEQ ID NO: 15901 - DNA, 479 bp, Glycine max
  Clone ID: PAT_MRT3847_114365C.1
cggcggccgccctctttttttttttttttttctttttttttatcttttttttttattttatttcctccacgggctctggttctacatttattttcttttcaaacaaaaaaataaaaacccaataaaaacccaaaactccctttcccaaaccaactatatgggcccaccccaatctactgaacaattaaaaaccaaatccccccctttttatttttatgccattttccaacaaacccttctcccaacatggaaagtttcccccgacctataaacccgaaatcccctaaaaaacaaagaacccaccctaaaaacttgcgggcccggtttttccacaaaaattttagtaaaacaaccaggaacccccccaataagacctaaccccctattacggcagattcttcccaaaagccctgaacaaatataacccccgacctttattttccccccccaaaaaaatattaaagaccttccctcccctt

SEQ ID NO: 15902 - DNA, 612 bp, Glycine max
  Clone ID: PAT_MRT3847_114366C.1
cacgcgtccggtcaccatcttacgagggcatgggatcaccgcctagctcccctccatattcagatgggcattcacaggttgcgtctaagagaagtagacaatccacatgactcagaagattgactaagaaccttagattttcctagaccagtggttatcatcgatcctgcaactgggagaggatcagtcccacataaagagaaggtccacaaatatccaggggtagtagctcgagaaaagattccaattgtacatagcaattggatagatgtaccggaatctctaaaggagctagtataggatgaaatcttggacttgttagaagaacagatgacacaaggatcctttgttccccaaggtcgtgacaacatactgaacaccgccattgggtgaccggagcatggaagtcgtgttcatgcagtgggatcctggtgtgacaatatctcaatactatggaagggcatcacgtggctcaagcacctcctccacattcatcaaccaacaatagttggctgagataattggaagtcttaagtaagagtggactaatgagattatagtaaaccttaaggaagaaacgaggaatgaagatgaagaagaaaacaagcaaac

SEQ ID NO: 15903 - DNA, 604 bp, Glycine max
  Clone ID: PAT_MRT3847_114367C.1
caattttattagatatttgatcaagtttcaaaaaaaaaaaaaaaaaaaaaaaaaagggcggacgaaaaaaaagaaaaaaaaaaaaaaaaaaaaaaaaaaaaaaaaaaaaaaaaaaaaaaaaaagattaaaaaaaaaaaaaaggggggggcggttttagagaaccaagtttaacgggcggggcctggcaaaacaaaactttttttatggggccacaaaaataaatttcgggggcgggggttaaaaaaaggggggaggggaaaaacctgggggcaaccaaattaaaagccttggaagaaaatcccctttcgcccagtgggggaaaaagaaaaggggcccgcccggaggcccttcccaaaaggggggcaaccctgaagggcaaaggggcccccccttgtaggggtaaataaaccggggggggggggggggtaaccccaagggggccctatacattggaaggggcctaagcgccagggctttgagttatgtcccttgcttttcgggacacttgggcgggttttcccggggagggttaaaatggggggccctcttaggggtccaaatttagggtttaagggaccttggacccaaaaaaattggtagggg

SEQ ID NO: 15904 - DNA, 349 bp, Glycine max
  Clone ID: PAT_MRT3847_114368C.1
tattcggctcgagggagaaggcattgtggaagtccaagttcgtggtttccggaggggggtagaagtggatggtgtttgtggtagtaccaaaaaccatctttaacgtttcacatctaacaccaacaccatttacagaaaatgaaacaactcgatgcattctagacccaagaaacaaccccgcaaccagtaccagccactcatgctcctccaacaaaacaaacaacaattaactttcctactcaagaataacattcttcaactgaagatcctgccccataatcaaccaccaaagcaccaaaagcagaaaccactcgatcaccaacacccgaatctgttgaaacaactccta

SEQ ID NO: 15905 - DNA, 628 bp, Glycine max
  Clone ID: PAT_MRT3847_114369C.1
acgagcgcaggcattgatattgcgctattgccattagtggcaccaaaccaaacaaacaacaattctcgccacttatccttctcctctcctctctctctctctaatatcgaccatgaggcgccagcagctacacttcgcggcagttgtcgcggcgattgtcgtcaccgcttgggttgcgcacatgcgcggcggggttggccaatcggaggccaagggttggcagttcgaggccgtgccgattgacggcgccgtcggacccgagagctgctccttcgatcctcgcggcgaaggcccttacaccggcgtttctgacggtagaatcatcgaatggcaccagacgcagaagcgttggctcaacgtttccgctattgcttcttcttcacactgggatgaagagtgtggaggaccatgtgatgagcattccaagaaagagcacgtgtgtgggcctccactaagcttgtgcgttagtacactatcgaatgagctttacattgctgattcttacgagggctgggttgttggtggtccccatgggggcactactagaggactcttatcagcaatgaaaggtgaagtctatgcttttactaactgtttggatattgaccagccaactggaacagggtac

SEQ ID NO: 15906 - DNA, 335 bp, Glycine max
  Clone ID: PAT_MRT3847_11436C.1
gggcccgggaattcccgggtgcgacccacgcgtccgcggtaacctacggaggcctgcaagcgctctcctagatgacctctctcgctctgcctcttgagatgctcacatgcacggagccattagctgtaccgtctccaagaatgtaggctaacccgtgtctctctggatgagactaaagaagactatgccattggcataggtccagcgctgataaggacacccataggataactcacccatcaggttcagagaaaagtgttcaaagttactgaacggccatgagaggtacagcagcagcagcagcgaaaaccgagaagcctcttctgagggctggc

SEQ ID NO: 15907 - DNA, 496 bp, Glycine max
  Clone ID: PAT_MRT3847_114370C.1
gtcttctatgctcttgtgtaaggctgatatattttgttttacaagagaacaaaaatactgtcccataactgaaattgattccatctcagaggcctaacaaccgaaaggggcaaatcatttgacaaagaacagcgtggttaacaaaaaaaaaaaaggggggggggtcctaaaagaccaacctttggttaacctagcccgtccccctgaaaggttggcacaaaacagcctggcggggccccctttccaaaaaagctcgagagaagggtaaaacaccttttactgttgaaacatccttggggctccccatccccgactaccgagaagggagacttgaacaggactctcgaaaaaagagctttcttggaacatttcagctggccgacccaacacatcattttccccccgaagaaccagagacccacagacccgctgataacctgacaaaaaggccgggctctaacccttttaacaccatccgccgaccaaaaaccgagct

SEQ ID NO: 15908 - DNA, 517 bp, Glycine max
  Clone ID: PAT_MRT3847_114371C.1
gctgcgagaagacgacagaaggggagacaaaattttgtttgagaaattgatgattatctgaatgcgtgcatggtttggtcatgattttgcagtcagaaatcctcacgagataccaccaccaaccccatgacctcaactacaacatcgccagggtcagggacagtgacaggaacaggatccgaaggggcagtggtgtacacgggtgcagacaacggcgttgtgtataatacagttacgggttccgggtcaagttcagtaaccggaggagaaacaatgctcccagatgggtcatatctagctggtttagccatgggagactcacctagaagaacagcttccaccgctagctttttgcttattctcttcctactgctttagctgctgcaccagcattgtagattttgtttgtttgttaaatgtaaatggctcttagattttcgggtttttcgtggtgggttcaagaattttggctttgccagtaaagcctgcagattctcactcattgtaaaccacccgc

SEQ ID NO: 15909 - DNA, 1294 bp, Glycine max
  Clone ID: PAT_MRT3847_114372C.1
agtggaattgagactcgaattatattagaattggtttggtttgttgtcgtcctccatatcaccagttttccttaatggtgaaaggagacaagaaaataaaagataaacaaactttgttatgaggtacaaaagaacatgttcttaagatgctaaaagataaattaatggctgttgagttttcactagtttttagacatttccatctgttttcttttcacaagttttcggttccatagctttgcaataaaggaacattctcagtagctggtgattccgagtaatcaacttcttcctctatctcctctgttgctttgccccacaacacagcataaaagccaaatgatactattgccgctccaactatactttcaacatgaagagagtcaccaaggaagatgacacccatggcaatagaaaaaaacatttggaggggtgagaatgatgctagatacacaggcccctttaagcgcagtgcccacgtggaaagtatatagcccatgtcaaagtgcagcagcagttaacttagaaaggtatcttacagtgcaaataatggagattaatgaaatattcagtcctactttccaagcatttgcgtttggcactgcaaataaagctacaagtgtagacatgactgtggaagtcacgttgtaaaagaggactattgtcacttcatccgggaacacttttagaacatcagcctgcacaatgtaacataatgaacctattaaacattcagctgtgagcagaatgccagcaatgacccaatctgcatccccagatttaagaaagctaaatggatgttgaagtggtatggaaagatcatgggaatgagctttgatgattgaatggcctttgtacaaagtcaatacaaatgctcctgttattgatattatgcttccaactaccttagcttgactacttctgcttttggcagctatcttttccatcctgaaaatgatggcaagaatgaaggtgaaagcagggcccagattggcgattgatgaagcaagtgttggagaactgtagctaactccaacataatacattatctgagatgaggttcctatcatcccaatgaacatgattttggatgctatggagaaactaagtggaggaaccactcttgatcttcttctgaaaaaagtgataggaaagagtagagtggcagcaacagcagaagtataagcaacaaagacatggttgttcatcccttgcagcgtggcttctttgaacagtgtgactaatgctaccaaacttaattggttgcctataatcaccaaaactggcagcatat

SEQ ID NO: 15910 - DNA, 490 bp, Glycine max
  unsure (1)..(490): unsure at all n locations
  Clone ID: PAT_MRT3847_114373C.1
aatctctgaattcgggtggagtgtacatctgataantcataantggtggaaaggggtgctatttatgattaaaagccaaattaataacgggagaatggtcgaggggggggtacacacaatgatttcattcaagacatttgtaagaagatttaaataacaattaccattttgaagccagctcagatatcactttgatacacattacattcaattaaactatgcaaagcagatctacttgttaaaattcttataaaaaaccctaatctcgtaccaattaccctaattaacattaaactacttggtctaatagtaatgggaagaaaacttattttcagcaattcataccagattttgtcatcaattccattcactattgagatggataacaatcaaagagttccttcttacttttcaattttttgatgtacataatggtaatataccttatgaattaatattttaaaccaaaggaagcctatttatttacctt

SEQ ID NO: 15911 - DNA, 181 bp, Glycine max
  unsure (1)..(181): unsure at all n locations
  Clone ID: PAT_MRT3847_114374C.1
tccaaaaccaaagaatgtaaggtccaattcaccctttaatttaccattaaaagataataacancctcacaagctacccaccattttcagtaccaaactacatgactccaaccctttcagcccaagccaaaacacatactagtagtaatcctagagaaaagcttaatagaactccaactact

SEQ ID NO: 15912 - DNA, 259 bp, Glycine max
  Clone ID: PAT_MRT3847_114375C.1
aaaaacaaaaacaaaaaaatccgcgattcgctcttctcttggaaaattgaacaccagaagtacgaccgaaaaagaagagcggtttagaagtgtgagaaagatggggttgtcgttcacgaagctgttcagcaggttgtttccgaagaaggaaatgaggattctgatggaaggtctcgatgctgctggaactgcaaccatcttgtacaagctcaagcttggagaaatcgtcaccactatccccaccatcggatttaatgtt

SEQ ID NO: 15913 - DNA, 463 bp, Glycine max
  Clone ID: PAT_MRT3847_114376C.1
gccacgcttcaggtaagaactgctgtttcatttttaggggaggctctatcggggaagcctttgccagacaggaaacagaaaacacgagtgaacgctagagtacgaatccctccgacatgctgttccggctcgcaggccgcgccgcccgcgcggggctggcgcgcgaccagcagctcgacgacggagtccgagcctcgtactccaccgccggaaggccggagctgagcgcgctccgcggcaaggtgatcgccgtccggcgcgaggaccagtccgtgtgggagcggcgcgcgcccctggcgcccgccaacgtgcgccggctcacccgcatgggcgtaaaggtgctgctgcagccctccaaccggcgcgcctacccgatgctcgcctaccataacgcgggcgccgtcatccaggaggacatctccgaggccagcgtcatcttcggagtcaagccagtgcccatcga

SEQ ID NO: 15914 - DNA, 705 bp, Glycine max
  Clone ID: PAT_MRT3847_114377C.1
tggagcagaatttttgagctccaattccggaggaaaacccatggccgggattcaatcgtgcgattctctagatcaggtggcaccccatcacttgctgccatgaactacccacccaataggaatgctgaaactaagttgacaaaccacagatttaggcctgacggaggcttcatcactaatccgcttgcagagattcatacgaattcgaggaattttgcgacattggagatagcttaaatcttaaaagcagatgtgctgcacaatctagaatgcaaatttgatcttttgattctcaatcagctttggtggaaggaccccccttgatggggattacgattcaatcagaatatataaatttgttgtgccactcgaaaacatttctatttagtcatgttccaagtgaaaaaggcatgaagcgagctagaccatacatttctacgtcgcagtgcagaacttcattggaatattcattgataaatcttgggcaagaacagcacattggagtgagttcgcgactaaataccacactattttaaaataagggtgaatttgtatatgaacagtggagtgacaggctgcttatttttttattttatgattaagtattgcgttgtataatgtattcgagttatggttaaaggttctacagtggcatgatgcactatcggcatttcatcattggataacaatgcttttggtctatta

SEQ ID NO: 15915 - DNA, 758 bp, Glycine max
  Clone ID: PAT_MRT3847_114378C.1
cccccacgcgtccgaaattgagaaagcatagaaggagaacaaaggaagattctgttgctgttgccccttttcttcctttctcaattttcacattctattctattctgcactctgcactcactcactcactcagtcatgtttcaaccgcccactcccactggcatcaacaagcattctcttcatacaaatccactatccatccaaggagcttcttcagcactggtgccagtggatttgaatgaaggcactgttgatgcaaaggaaagtgtgcaaaatggagaaatgctacaagtgcaatccatcttccgacactcccagaaactggaagatgatctacgtatgttagggacaaaaattaagcagcatgagaacaacctatatcatttaaactctgaaaaaaacaaattagatgactccattcttcacttgcaagttactattgggaaatcagagtcttcaagtaaggccacaattggtgatatggacaatcccaaccctacaaatgatgaggaagtaaataaacagatattgcagcatgaaaaatctgctgctggtattttgtgccagcttaagattcgtcatggagctcaagcttctcatcttacattgacaaaggatgttgtgggtattgttgctactctgggcaaagttgaggatgacaatcttagcagactcttctcggagtatctaagtgtggagactatgctggcaattgtttgcaaaacttatggaagggtctaaagctcttgaaatgtatg

SEQ ID NO: 15916 - DNA, 606 bp, Glycine max
  Clone ID: PAT_MRT3847_114379C.1
atgaaataattatggaacactatctcctagcttaaccaaggctcagaatctgaatggacccgccatcttcggtcgatcaagacgacgacgttttcctcgacgcgtttcaccaatgccctgccgagggctcaacggaaccttctgattccgcttccacgcttttggaccacaacgccacactctccgccgaccacaatccggcgccggccactccgtcgaggtattccgggtacccaatcgtcagattcgagcatcgtgagcgatttgatcgatgtcgattcgagaaggagtttccggcacaaatcgaggcttagaaatctcaacaaaaacgagaattcggaggagaaacccgattcggaagaaccgcgacaagttaatgcctcgccggaagagaacaacgagggctccaccgtaacttcagctgcgaacgacgacgcagccggcgattccattgactctgcacctcgactcggcgactcgtcttcaagtctcctcgaactcgccgcggggctggtgattagcctattagggtttcaaatgaagctaattttcatgttcataacttccccgtttctgttcatgttttattcgtgcatgttcttcatg

SEQ ID NO: 15917 - DNA, 383 bp, Glycine max
  Clone ID: PAT_MRT3847_11437C.1
gtcagctcggaattcggctcgaggtttcttattccaggccctcaaatatgttagtttccctgttcagactcttgcaaagtgtgctaaaatgataccagttatggtaaggctagatttaatactgtgttcgataatataaatttcttttatattgatatttatgattactggctgattgcaatattcattacattcattattggtatgtattcatatatttattagtagtgttttattcatcttcttagctattggtgcttctgttgatgaagagtggtagtagttacattgtattgttccttaacaatgaatgtttcatgcgctatctttctctcatctcacaatcatttgtgattggcatcattaatagccatttccttttt

SEQ ID NO: 15918 - DNA, 398 bp, Glycine max
  Clone ID: PAT_MRT3847_114380C.1
ccggaattaccggatcgacccaagcgtgctagagggtgtatttctagtcaggctcgggagtttgacctgactaatatagccattgtccatgcatgaggcatctttgtaaggatcttcattctgctcggtgacaatctaacctgaaggcgcaaagattgaacttgatctacataaatgatcaatggaaagacaatctgacatggtaaccaacgaactgtgaacagatgaaacctttgagacatgcctaatagaatcatcaatacgactaatacagaatcgagaagaggggatcactcatgagtgcactgatgagctcagtatcccaaggatgattgactcttagacacccctccagactgacctattcgtggcgattactagacatgactactggagag

SEQ ID NO: 15919 - DNA, 431 bp, Glycine max
  Clone ID: PAT_MRT3847_114381C.1
cccacgcgtccgattctgtgacggatcacttcagaagcataatcaacaagggcaaaaagggtgcaaaagcggaactcaaatctagtattgaggaatacgaagagaaactaaacaaggtccacatggagagaaaggaacaagaaataacagctagaaatgcacaggttcaccaacagaaggttggcaatctggaaggtcttctgaggactgagaactttgctaaagaacaaaacaatgcagataatgctgaagttggtgctggcgaaattatcaatcctgaagctccagagagtacacttgaagagaacaacccaaagtcggtagaaaatgaagagatgaacctaatttcggaggagattgaagagaacagcaaagagtctaaattaattgaagagaaccaaaagcctgaagaaaatgaagagaacataaaa

SEQ ID NO: 15920 - DNA, 123 bp, Glycine max
  Clone ID: PAT_MRT3847_114382C.1
tgccgcgtcgtagctcgaattcgctcggggaaaatggcattccgtcgtgttatggaattcaggaacctgtggctgttgctctgtctgcgcgcaatcttgctatgcaattgcatggttggggat

SEQ ID NO: 15921 - DNA, 584 bp, Glycine max
  Clone ID: PAT_MRT3847_114383C.1
gagacaagtagagacccagtagtaggagataatggttccccttttcaataaaagttgttgatgtaataccaactcaataatattcttgcacaatatcttgttttctatgtaaatgagacgaaggctatagttatcccaactgctcacttttatgcatacatgacttccattaggttaagtttgacaagatgcctgttttcctaaaactctaggaaatgcaatgctattaacccattatagtccagcaaaacaatggaattcaaaagagatgagcttgtcaaatttaaagcctggcagttgggttgaaactatttaatctgtcagtgatatggtaatgttagagcacgagagttaaagttaaaactttggaattgaatttgacctcaggaaatgtttaagaatggcctttgcttcgtcagtttgttttttttctctacagggttcttaggtttcagttttcttttctcttccagcatccactggaaaatttcacggttgtttgttcttcaggaataggagcctgcactttcacagggtgtttgtgacaggcactaagaaatcatcataattgaaatcaattgaac

SEQ ID NO: 15922 - DNA, 1107 bp, Glycine max
  Clone ID: PAT_MRT3847_114384C.1
ccacgagagccgaaaagggaaataggaaaaaagggaaattttcagattactaaaatcgactaaaacaaaactttgtgcgttttcgttctattcgttcatattcctcagtgcaacacatccaacagcaagacgcaaactagtaacagagagaaagcatttcaaagaagaaacaaaacgatgtcgtttatgcgaggggattttctttctcgaacgaggaagctcgtgaagggtttggccaaggcgcaacccgcgtggctcaaagccatggaacaggcaccacctgcaacgtttcctcggtctgccgggaaaattccgaccattactcttcccgaggatgtttatgtgaagaagttttataagaaatatccggaatccaaatcccatgacgccataaagtttcatgcttttgatccccctccgtctcgtgtatttgccttgagggttcttgaattgaaggagcagggcattagtgaggagcaagctatggctatagctgatatggaatatctgacagagaagaagacaaagaagaaagcatatacccgtttgaaggaaattgcacgtcttcaagggaagagacttcctcaaaatccatatcctagtgccatcaaggagatacaagctgaggagaggaaatatgttcgtgatcgtttcttcaatcccaagatgcttgaaattgtggagaaacagaaagccgaggcagcagcggagagattgagtcgaggtggtgattggtgacttttacgggggctaagttacaatacattgagtgtttagctcttgaaaaattggctctgacaataatatttaccattcagccactgaaaagtgcgttcttcttccctgatattaggtgaaatatttatttgttgtattagatggctgcaataaaaaaatttaccaaaatttcatgcgcggatcatttcttccaggctacccaagttttgttagtagctaacacatgccttgaggagatcttgtgttaagctctctcttttgttgtcaatttgatcattaaccagtttttcatggagtttctttgcgcatgacaaaaaaaaaaaaaaaaaaaaaaaaaaaaaaaaaaaaaaaaaaaaaaaaaaaaaaaaa

SEQ ID NO: 15923 - DNA, 485 bp, Glycine max
  Clone ID: PAT_MRT3847_114385C.1
aaaaaaaaaaaaaaaaaagaaataaaaaaaaattgaaaaattaaaatagaaaccttgttagggggggctgttttttctattcatacctgggttcccttttcttccttcccgacctttgttttttttttttggcttttctaattttttttgtcgggcgcttttcatataccttttttggttgggcctttttggttcttttcttgggaatccctttggacctccttgttttttcggctggctgggcttccccttttttttccctggtgggtccttctttttttctcgccctttctgcttttttgtaaggaggggcgccctcttgtgggttttttattaactggcccctggtggtggtggttttcgcccggcccccttttttggttcctttccctcgggggggctggtttttttccctcctatcccttttttcttttgtcttttggctttccttcctgggtttttttttggggtgtttccttttttgg

SEQ ID NO: 15924 - DNA, 247 bp, Glycine max
  unsure (1)..(247): unsure at all n locations
  Clone ID: PAT_MRT3847_114386C.1
gattgcnattccgtntttaactcccttaaccacctacttcanctaccgcttgctcttcgccttcngccanntcanggatttcttccccaaaatcttcnactggtgcancgccaacaatcttcannnttacccccccctctgcttatggctccaagatttctatattcnccgcttgnccctcccnattcannactgttttgggagaccaattgcnantgctcctgntgcatgntttgatgttntccaa

SEQ ID NO: 15925 - DNA, 250 bp, Glycine max
  Clone ID: PAT_MRT3847_114387C.1
gtgaatgagacacgctggctaacaaccctgcaacggaccatgggcagactcttagctgtatgagggacaggcatactgagctctacagacatggaagtctctgacaggaacagataaccatagtggtacacgtgacacacagaacgcggtgactactggtctgctgaagcctgcccattagagacagcctagaagcatcgttcgaagtctgctgagcatgcctagattgtcatactcagcaacactgatg

SEQ ID NO: 15926 - DNA, 256 bp, Glycine max
  Clone ID: PAT_MRT3847_114388C.1
tattttatctcccctttcaaacccaaactccctaagctattctaagaacacttatcaaacattaaaggaacaaaatacaaaaccacacctaatagaacccaatccaaacattctcataaaaaaaaaggccccaccaccaagactttgaaacccacccgaaaaataaaccgatctaaagaacctaacaaaccaaaaacacctccaaatacaaccttccgtttcatgtaaacataatataatgatatctctaccaatc

SEQ ID NO: 15927 - DNA, 588 bp, Glycine max
  Clone ID: PAT_MRT3847_114389C.1
gtccccagatatgtggtatgggggcacaccacctaaataaaaaaaggcaaaacaaaaaaaaacaaagggggaataaaggggggaaaaaaaaaaggagcacggggaaagggaataccctggggggacaggggaaaaggaaaaaacaattaacacaggggggggggggggaaaccccccccccgagacacaagacccaaaaaaagaaagcgggctcgcgggtgcacaaaaaaaaaaaacacccagaagaggggggttggggggagcgagaagaaaaaaaaaaaatcaaaccccaaaaagaaaaacccagaaaaaattcagggggaattaaggggggggggtttggaaaaaaggacaccggacccggggcgcccccccgaaaaccgacaccgggacccgggggggcaccagcttcccataaagagaggcctaaaagaggggggcagaaacgaggacagaggtggcccccgggaaaaagtgatatgcggacaaaagccccccaacacaagccccagaaaaaaaaagggaaaaccccggggcgccaaaagggggcgcccacacacaaaaagcggggggcgcacaaggcccgtt

SEQ ID NO: 15928 - DNA, 948 bp, Glycine max
  Clone ID: PAT_MRT3847_11438C.1
ttttttttttttttttttttttttttttttttttttttttttttttttttttttttttttttttttttttttttttttttttttttttttttttttttttttttacgtagtctatgttaagatttttcattaattaggcatagagcaactttaaagctttatgactagctagctctagcaacatctataatacatacacaccattcatttttttcccatataatataattatagatagtaatacttaatatcacactatcaagacgaggcacacatagctactagctatatagctccatgtcaaatacatttacccatggttggttttgcccctagatgaggatgagggtaatctattattatcgtcaccaccaccatttttatcatcatagccaccaccaccggagtttcccgaaccacttccagacccataaccaccggcatgagcaccaccaccagatccatatccatacccggatccagacccggtcccggatccaaaaccatagccatatcctctggcaaagcccgttggagaccggcccgaaccggaaccatacccgtacccggtgccgggtccggagccccatccccagctgtagtcccagtttgcaccatggccagagccagtggcccctgtgggggttccggccaatggtgcaccgccacttgacatgtcaaaacggagctttcttctgccgcctccggctgccgctgaggtggaagtgatcaagaagagaagaaagagagccaagtgtttgagagtgtaattgtatggtgacatttttgtgtttgtctagtgagatatgatgatattattacgagagagtttttttttttggtttgtttaggaaatgctgtagttggagtagagaaaaagtggggttgcccacgcgtccacccgcgcgtccgcccagccgtccgcccacgcgtccgcccacgcgtacg

SEQ ID NO: 15929 - DNA, 289 bp, Glycine max
  Clone ID: PAT_MRT3847_114390C.1
tcggtttcgcgtacggattctagtactgtaggatggggtggaccagacggatatgtttaccataaggcatatttatagatgttctgctctaaggcaaagctggatgcactagaggataaatgcatggatgctacaatggtaacttatatggatgtgaataaagacaggaactgggaatataatgagggtcaaactgaagctaatgctgtgacatggggtgaggtcacagataaggcgacaattcaaccaaccatcggtgatcctgtcagcataaatgaatggaaggatc

SEQ ID NO: 15930 - DNA, 253 bp, Glycine max
  unsure (1)..(253): unsure at all n locations
  Clone ID: PAT_MRT3847_114391C.1
aggccatataatttttttttatttgaaataatgtccgggatcatccacaagattgaggagaccctccatgtgggagggcacaagaaagaggagcacaaaggagaacaccatggtgncgcacaaaggtgaacacaaaggagaacaccatggtgagcacanaggtgaacacaaaggngaacaacaccanggggagcacaaggggggtnttgnggataanntcanggacaagaccctggtgatgccccatgacang

SEQ ID NO: 15931 - DNA, 477 bp, Glycine max
  Clone ID: PAT_MRT3847_114392C.1
tacggctgcgagagacgacagaagggtctcattaaaaggatcaatgaaatgtgccagatgattgaattggaatcctattatctacccaaattctaaagaggaaaataactcacgtgcactccattaatccaaatgttaattctcccttatatctattgaaacaaacaaacaccaattgaaccattaggactatccaagtgataggaggcttgagataatatacgtgagatcataagttcaaactttaatacgatcattatacacaaacgaatggacactagttatctctgtccgcacaggaatgtttccatcataaaaaaaaaaaaaaaacacagcataacgcgtgagcaaggaatatagcaagaagcgaaataataatagtgagaaaggaaggggaaaggagggaagagaggagaaatgtgtaatttttgttagggggaggggggctcttggagatgaaaattgtacctttttatt

SEQ ID NO: 15932 - DNA, 905 bp, Glycine max
  Clone ID: PAT_MRT3847_114393C.1
ggctcgagtggatttgcaacaggtttctgaaattattttagaaagcaaaggaaaattaaacgaaaaatctgtatctactgcattgggtggcctttctgaaagttctgtacaagaagctagagatggtgacagaagcaagcagctccaggaggttggtcggggagtgaatgctgatgaaattgttgatgttaaggtcagttctgttgcagaagttaaggcagaagcaactgaaaaattgtcacatatagctgtggaagtggatgtacagagtgataactgtactactgaagtatcaactggtggtggacagacagctgctattcttgttcagtctgattcggcaagaggaaaagatgagaatgtactccattcttctgcttatagtgttgataaggttcctgaagacttgactgaacgggagtttgaaaaagctgatgatgttgatgctgagaatcattctagtcagtctaaaaagcaaagaaatgagtgtgaaagtgatgccttgacaatgcctgagaatagaggtttatgctctattgtgactggtattgctgctgaacatgtggaggaaaatttagaaacgaaagaggttcatgaccaacctgccagagaggaacttcccaaaaattcacctagtgtcctttcacaagaaatggataagcatcttgattctaaagggtcaaaattgattgccatggaagcggaggaggctgaggagtgcacctctaccactgcagatgcttcttccatgtcttctgcagctgtgtcagatgcagatgctaaggttgaatttgatttaaatgaagggctcaatgcagatgatgggaaaagtggcgagttcaactgcagtgcacctgctggttgtttggtcagtcctgtgccgtttcctgcttcatctatgtctt

SEQ ID NO: 15933 - DNA, 626 bp, Glycine max
  Clone ID: PAT_MRT3847_114394C.1
cggacgcttgggcggacgcgtgggttttgggaactagctaggaataagtgtggggggtatgtttcattggaagatatgatttttggccatgccttatgtatctgtatattgcctagttcttgctttaatcttcaaattcgttcttcaaaaaagaaaattaaaaaaaaacaatttcaattgctgcaaattcgtactgttcaaaaaagaaaagaaaagaagtgaagttgaataaatgaggtcttgttatgaggagttgatttgggagccttgattgattttgttgatattagagggtttgggtttactacttgtgcttaatttctacttattccccgttgctcctctattcctttgggatttagctacttattccatatttttttccctaccttgtccttggccccattacaacctttaaagaccttttgatcctcatatgcatgtgttgtcaagttgtttgtcaattttagaattttgccaagtctatgtggtgtttgttttcatggatgcttcgagagtaaacagtaacctagacacttgagagatagagtgtatatcttgtgaagcttaatcatttttcattattgagatgattaactatttttccatgattgggttgcttggat

SEQ ID NO: 15934 - DNA, 285 bp, Glycine max
  Clone ID: PAT_MRT3847_114395C.1
cctcaatttatttcacagcaaactgtttggaatcaagtggcatcagtgagaacaccatttaatattgattctagcatgccaagcttttggcagttgtatattgaccttctcgcagggggaatcttatgggacaaaactggagattggatcacacttatacaaaactcttcaattagtaacttgctgagagttgctgcttggaagaaaggctgcacaatggtcaagattgtgatgtctgggcatgccactttgaaaaggagtgcacgggccagattgcaccaagtg

SEQ ID NO: 15935 - DNA, 401 bp, Glycine max
  Clone ID: PAT_MRT3847_114396C.1
gcttgttatgagcttatttttaaggtttgtgtttggcttttatataattatgccggactcgttagaccaattaagagtttgttcatattaagaagtataaaaaatatttttttctttaataaagtcaaagatttttgttaaaaaaaaacagtaagacaattttaaaccacaagatatggacaaaattaaactttcctacaaatactatatgtgatagtctaccaaagttttttaagcccttattcttattatccatctttggttatatgaattaattcatttcaaacattagaatgattcaaattatcaaactactagaataattttgtaatttaattaaaataattttaataacattcttattaaaattattgttgctaaatgggttagcccatcaagct

SEQ ID NO: 15936 - DNA, 1426 bp, Glycine max
  unsure (1)..(1426): unsure at all n locations
  Clone ID: PAT_MRT3847_114397C.1
cccagctgggaggcccacgcgtccgcccacgcgtccgcccacgcgtccgaaaagaagaagaagaagaagagaggaaagtagtagaagaatacagggcagagctgcagccaacaccacccatggctgaatccgtttcagtggacatggagatgatctttctcggcggaaaggaacatcatattcaaactggctgtggttctgtatctgtaatagtctgtggggatcaagaaaaaccagctctgatcacttatccagatatagcgctaaattatatgtcatgtttccaaggattatttttctgtccagaggcaacttctttgcttcttcacaacttctgcatctatcatatcagtcctcctgggcatgagttgggagctgctgcaatttgttctgatgatccagtcccttctgctgaagacttagcagatcaaataattgaggttctcaattattttcggcttggtgcagtgatgtgtatgggagtatcgtctggtgcttatatcctttcgctatttgcaacgaaatatagggagcgtgttcttggtttaatacttgtatctcccttatgcaaatctccttcttggactgaatggttttataacaaggtgatgtcaaatttgctatacttctatggtgtgtgtggcttgttgaaagagtgtttgctccagcggtacttcagcaaggaagttcgtggtaatgctgaatttccagaatcagagatagttcaagcttgcagaaaactactagatgagagaaagggcatcaatgtctttcggtttcttcaggctatcaatgagagacctgacataacggaaggattgaagagattaaaatgtcgtacgcttatttttgtcggggacagttctcctttccattcggaggctcttcatatgacttcaaaacttgataggagatacactgcattggttgaagttcagggttgcggatcaatggttacagaggaacagccacatgcaatgctggtccctatggagtactttttaatgggatatggcttgtataggccatgccatttcagtgacagcccaagaagcccgcttagtccatcttgcatctctcctgagcttctttctccagagagcatgggattgaagctcaagcctataaagacacgtgttttgctgtgagtttgataaagggaagggccatttacatatgtaacttaaagcagcctttcgtcttctatggattttttttagttttttgttgtatgagaggagatggcgggttgtagatagaatccgtgggaatacataaatataggtatatttgtatgtgttcattcatttgtagtcagtcataaaggaaggaaggaaatcactgagctgtatatgtactttccatatgaacttcaagttttatttatggtgacgagcaattaatactnnngcggnnnnntcgaccc

SEQ ID NO: 15937 - DNA, 352 bp, Glycine max
  Clone ID: PAT_MRT3847_114398C.1
cgaccagctaactaggacggcggccgcctctgttctttttggttcagagggaaacaacaaagtagggcagaaactaactatttaagatgggaagcttgccctctacatccgagagagagaaattggacgcaagttgcaccccggataacggggcgatgaaaaaaagaaagaatatgtctgaattaacttttggggctggcggtgaaccaccacctcatactacggggactatattcgaaattttaaaaagaataaaaagcaattcaagggagagggatcctgaatgtgtaactgaggggaccgtataaggccctccctgcgcctgtggagagccataaaaattttatgattt

SEQ ID NO: 15938 - DNA, 119 bp, Glycine max
  Clone ID: PAT_MRT3847_114399C.1
catggctttgtctgaggtgacaggattatatattccaagatatcaggttttgatgcattaaggacaacaatgttatgcttggaatgatgtgcgcgttattggcatttggggcttttttt

SEQ ID NO: 15939 - DNA, 495 bp, Glycine max
  Clone ID: PAT_MRT3847_11439C.1
ggctcgagaaactttgctagcttgagaaagagcatggtcttcatgttgatcatgatcaatattcagatttggctgcagaagccaaaggtatggagatttgtgtgtttcttttcatctgttgttggactgctctgttacgctttcagctcttcttttaataatctatttggaaagtggacatggtgcaagatattactttacattggttttagtttcattatctgccttactgtcttgtttgcaaatgtttgggagtgctccacctctcctcgggtggaagctcacatggccttttttattttgatgatcacttctgtgtactcttttttcttcgataaagtagtgaaagggaaaccagacgcatatagccttgtttcatgtgctgcatttgctatcatgtctttggctttatcaagaatgagtcattttggttttgagggtgatctcttagtctttttcagtggactcctaatattacaactcatgaaaataagt

SEQ ID NO: 15940 - DNA, 376 bp, Glycine max
  Clone ID: PAT_MRT3847_1143C.1
tttttcgactcacacgcgcgataacgcggcaacaagccacgcgccccaagagggggagattttgcagagactatggacatggaactcagatcctgggaatggacactaccactgcagaacatgaaactgctagcctgatcaacagaggatatgtcaatcagatgggtaactggaatttcaacatctccaatgtacacaaaggttacaattggtagaacatactgcatagggatattctgttccaaggcaagagctacactagtgccagtagagcaattggcataactaaaggagaaacgtattctagtccgatgcgcaaaattaccactgccaaagagcatttgtacactctactatgagctccaaaataaatatt

SEQ ID NO: 15941 - DNA, 317 bp, Glycine max
  Clone ID: PAT_MRT3847_114400C.1
aaacaccttagataatttgattcccgagtctacaacttcaactaatccaatcaccactaaagcggtccaaaggacatacttgcacgttcatacgtctcatgatatctgggatattttctcgatacgacattttaactcactgttacgcatcatacatcagatctaacatgaccaatgtccatcagtctccccagttggatcaacgccgattttccagttggatttattgattgcatcagtcttgtcaggttcatcataatttctgggagagccatgtcaagctctcacgtcggtggggggaatcgcaattctaacag

SEQ ID NO: 15942 - DNA, 156 bp, Glycine max
  Clone ID: PAT_MRT3847_114401C.1
ctcgtctccttcatagcttttatatcagaaccaccttctgactttatgacaacattctttcatccagaggattcggattatatgagatcggtctgcaacaatctattcattctcatatcttattaccctaaccttcaacctgatcttttttcctct

SEQ ID NO: 15943 - DNA, 455 bp, Glycine max
  Clone ID: PAT_MRT3847_114402C.1
ccacgcgtccggtcgtttccacgctgcatacgttaggtgttccgagtacgaagtaattaacaaaatggctaaggtggtggctgagaaatcatcgtggtggttggatactgttgatcatgtggaggctaccaccatcaacgagctgaacaagcctgttgtgaataatgaggctacagggcatgccatatctgggcaagcacgggctgcctctgaggggaaccaggaaattctgctaacaatataatcagaacccctagtgtatcaaaggcatcatcaacgtgttcattatgctagctatgctatggttactctctttgagatgatagacttgatgaacagtgaccgttctgatgtattggtttccttgacaggtatgcatgcttgttatgttctgtctagagagacaaaaaacatggtggggggtctagagtaacaagattaatacgcgtacatgc

SEQ ID NO: 15944 - DNA, 535 bp, Glycine max
  Clone ID: PAT_MRT3847_114403C.1
aaaaaaaacccccccttcacccttttttacaatatttaaaaaagggggggaatttttcaaatgggcagaccttcctcaacaagagggccatccctaatttccttttttgaattaaccaacccaccaaccaaaaaaaaccccaatttccaaatcatgcaaaggattcccctttttcaaaaaatctggcattaccctggggaacaaaaaaagctggcttaaaatttttccccccattctcaaaatcttgaaaaattcccaaaaaaatttcaaaacctgtaaactgtttgggattgccaataaggaaactcaaatcccatgaattttgatttcccccctcaaaactccccttttcaaaaccttttttaggaccccttcccttttttggaaaaatcaatccccagaaatggggtcccgattttgcccccttacctccataaaaatgctctgacctggtgctgtttgttaaaaacccttgtaccaatgaggcccaatccctcctttggactgctggtttcccaaacatcacatttttaac

SEQ ID NO: 15945 - DNA, 469 bp, Glycine max
  unsure (1)..(469): unsure at all n locations
  Clone ID: PAT_MRT3847_114404C.1
ctcttttttttttcntnnggggaggtctttaattcagatccataccttgccgggtgcaatttgaattaattttagtttatgggatgtttttaagtataacattttattgttctcttcctcaacttcatcactatattattttgaaacattgttcatattttgatagaccatctttctctattgaattgttataaggataataaattgtttattcccacgtattcattaattgtttcgtcaaataagttattcattagttaaacttccataatacgaagtcttggtgtctccattaagacagttcttaaaatctattgttgataatagcagaagttcttggaataattaatgagggcaagaaagggattgtttcacaatgtaagccttattcttcattgtccacgttgagtccatcccataaatttgcaggcaaagggatcataatacaactctgagctttagttcaaaa

SEQ ID NO: 15946 - DNA, 323 bp, Glycine max
  unsure (1)..(323): unsure at all n locations
  Clone ID: PAT_MRT3847_114405C.1
aaaaaccacaaaaaggtaccgcttccaaaaaaccacaaaaaggtaccgcttccaaaaaaccacaaaaaggtaccgcttccaaaaaaccacaaaaaggtaccggttccaaaaaaccacaaaaaggttacggttccaaaaaaagaacaaaaaggtaacgggctgccaagaaagacgaacaaaaagggggaatatcgccttaacagtaaagaaggttgagaaaagagaagacaaaatccgcagaaagcaaagaagctgagagcgagagagcaactgcacgcactgtaactcctaacttcccagatcgtcntcttcctcttttctct

SEQ ID NO: 15947 - DNA, 632 bp, Glycine max
  Clone ID: PAT_MRT3847_114406C.1
gggccggcccacgcgtacggcaaacaagttcctcatgaagcagccaaagtcccgtccaaaaatgagcgaggtggttgagtctcttggaagcattattaatgagattgttcctcatgatgaacacatcccccaagctgctgtagtagcaattggagaagaaaaagaagaaaagttatctgtagaggacactcaacctgaacctgcagctaaacaagggaactattacctgaagaaggtttttgaattgaaagatattgtcagcttaagaaataagtctattggaaggttagattggaaaagttgggcacctgggctagtaagaacttggtgaatggtgataagtgacctgtatatcttggaaagaaaaatcttcttcccctacagtcacctgctaatcgcaatgtttgttgatcacatagttttcagtcagtgaaatcaacattgtcaggcacacagttaacaacaagctggtatatatccaattttgtatcagttaataattgtatgtacaggttaattttgaggaaagctataatttgttaaatgatttggccttcccaaaagtaacatcgaatttagtcttcaaaatgaataagtatttaggcaataaaaggaattaaatgtttcatttc

SEQ ID NO: 15948 - DNA, 294 bp, Glycine max
  Clone ID: PAT_MRT3847_114407C.1
agaattcggctctagcgaaggtccaagcgctgctctatgatagtcttgcacaaactgcattaaatttgaaatgaaaggagtggaatgctagcctcgcaattatgtagtggggcgtaaataatcttcaatttcattttcaacctctgttctcataaaaccctataaacattcaaacaaggatgttttgtttggcattcaaaaaatgcacctttgagaatgtcccttctcaaaaaggggaatactaaatcttcttttttcccacgttctcattgtcaatgtggtcttttttttctt

SEQ ID NO: 15949 - DNA, 337 bp, Glycine max
  unsure (1)..(337): unsure at all n locations
  Clone ID: PAT_MRT3847_114408C.1
agcggagtagtcaaatgatngtatnccaanaattnnaatggacaagccgcacacgagnagtaggccgccctctccctttttttttttttttacactcttcattttacccacaaagcttagcccatctgagtggggggttaaagaacaaccccccaacgagccctatcccactatttaaaacgtaaccactctaatgtaaaccatacgagtgcaattgaacacctaacaacataataacctaccgcacataaacgagccatacccagcgaacctgcctggtacactctcaacaaacaaacttaacccccaagaaccctctatacaaccgatacccctt

SEQ ID NO: 15950 - DNA, 843 bp, Glycine max
  Clone ID: PAT_MRT3847_114409C.1
ggctcgagattatttgataatatagattaaataataacgagacattgacggtctaacctaaaaatttatcacatcaccaataaatctaaagaaataatcacatgtaatttttggataaattatatttttaattcttgtatatttaaaatagtcactgatttgacatcagtgtctgagaaattaaaaaataataatttaatttaaaattattagtaattatcccatcaaaattcataatcgtgaatcaccattaaatcggataacgttgtggttatgtcattaattaacattgttatttgataacatgaaattaaagtaaaagtgaaaaaaaaagtttgaaaacgactaaaagcatgaatctaaaaaagaaatcttatttaaaactagcaacagaaaagagtacttgagtgtaaattgattttcattgattcattcaattattaactgtggttttctttttacagaacttacttgtaggagctacaggtacaactgaagtcacaacaatctgggccatgactgaactaataaaaaatccaagcattatgaagaaagtgcaagaagaaattagaggcttaagtggtaagaaagatttcttggatgaagatgatattcaaaagttttcctacttaagggcagtgataaaagagacacttagattgcacttaccagcaccactacttataccaagagaaacaaataaaaaatgcatgttagatggctacaaaaattccagccaagacattattatatggtgaatgcttgggcaatttcataagaaaatcctaaggcttggaaaagatccagaaagagtttatacctggagaggttttttaaattgcg

SEQ ID NO: 15951 - DNA, 140 bp, Glycine max
  Clone ID: PAT_MRT3847_11440C.1
ctcactactcgtcgggcgtcctttttttatttgtaaagggtacaaattttcattctacacaggcattaccacccgggggggtgcttttatagacattcacgaggacatcacaatgccagcacagaaacaccatgtgtcaa

SEQ ID NO: 15952 - DNA, 1796 bp, Glycine max
  Clone ID: PAT_MRT3847_114410C.1
acgagtgacggttggggctattgcttccaccaatccagcgccaacccctcaatttttgacctcataagcttctcccaggtccgtctttcttttctctatctatttgcggtgggtcagctacgattgtaataaatggaagttctgttagttgatcagggttttgattatgtccgtagaaaaaagaaatggatcttgattttgtgtgcggttgggttgggtggcttcagcgcttaaattcggctcgaggcgccttccgttgctcgcaagagaaagaggctttcgaagcttctcagtgcattcgtttccgttgcggaatccctatccgaatccgcagataccattggaatcgtctccagagacgtcaaggtttttctggaatccgattcagatcaaatccccaatagcttgaagcaaatttccaagatagctcgctcggaacacttgtcagagtctttggttagcgtcacccgtgctgtgaccgtgggagtcttgcgtggttatgaatccatgaaccggaccggtggtgaccaaaccggttcatccgtcgtggaccgggtccttgacaaaatgttaacaccagcagggtcaggttttgcttctgtagttcttggaagctttgctaggaaccttgttcttgccttctattcagatcaacaacataaccattcaggtggggaatctaactcgatcaattccaattcggaaactgttctagcatgggtggatgtagtttgtggtgataggtgtggggaactaattgggaattgtgttcaattgtttgtgagcactgcggttgcggtttatctcgacaagaccatgcatatcaacacctatgatgatttctttgctggcttaactaacccaaagcatgagaccaatgtgagagacatgttggtatctgtttgtaatggtgctgtggagacactcgtcaagacatctcaccacgtgataacaagttcaatgctgatgtaggttcaggttcggattcatatttgtctattggagaaactctgagaaatgaggacttggttataggaatgccatcgattcaatccaaggtggatgtttgtgatgatgaaaataaaagtggctgggtgagcaaggtttcgtcttcgttggcggttccaagcaataggaggcttgttcttgatgtgaccggcagggtgacatttgagactgttaggtctttcatggagtttgttttgcagacattttgtgcttctgtgagaagatgtgctcatattgttcatgaggcagtacttgagattgtgagatatgttgcagccaaatcctctgttgttgtcacaatatgtctctcgttgtgcctgcacatgatgggtggaggttgggctttggtgcctgcttaagtagttgtgattactttcatttaccaaatagatgttattggcgatttgaactagaaaagttttctggagttgctgcttctttggctatgcatctgtatcataatatctatatatatcatacatacatacatacatcggttaattttgtaaatgattttggaattgtgaaatattaaagaatgtacagtgaccatggaagcatgacttctcttacattgtaaactcatggggcaaacaacagtactatttgtgttgggtgttatcattcatgattagaagtttagaaccattcttgaattggaatcttaatatattattgtaactgcatcagtctgtatgttattgatttgatattttctactggctaggggtacatgtgcaggtcatttgaattctgttcaaaaaaaaaaaaaaaaaaaaaaaaaaaaa

SEQ ID NO: 15953 - DNA, 572 bp, Glycine max
  unsure (1)..(572): unsure at all n locations
  Clone ID: PAT_MRT3847_114411C.1
ggctcgagctttgttctctcttctcctctgaggcgtggaatttggctttcattactgtctctctctaaaccatcaagcactcatcaatactcatctctcaattctttcttcatctttcctcttatgtactctcacagtgatttccaaacacaccactcctcagtcttttgttggaaatatagccatagccttgtcctttctcacaatcatttctttctcctctactagagcttttcacactgccactatttgaagcagacaacaaaggccaagtaattgataccatccaaaaaaaatcccctgtttcgccctctctctctctctgttttctcctctgttcactataaaaaaacagaatggacaagtgggacaataaaccctcaagaaaacagcaccacagagaaaacccttctttctcttccactctacttgacgttatctaccgttccatcgacgaagatccaacggatgagaaggaagaagcccaactcatcttctacagagaaaccatgaggaaatcagaacagagncattggttcagagaagaaaaacctgaagctgagaaacacaac

SEQ ID NO: 15954 - DNA, 708 bp, Glycine max
  Clone ID: PAT_MRT3847_114412C.1
ggtccactggcatgtgaagactaactataaggactattggcgagtcaaggttgccataacaaacttcaattacagaatgaatcactccctttggtctcttgctgttcagcatccaaatctcaacaatctcacacaagttttcagtttcaattacaagccacttcttccctatggatccataaatgatactggcatgttctatggcatgaagtacttcaatgatcttctaatggaagctggaccaactgggaatgttcaatcagagttgcttcttcagaaggacaaggatgcattcacattcaagcagggttgggcatttcctcgcaaggtttactttaatggtgatgaatgcatgctgccaccacctgacacctacccttttctccctaactctgctcctgcaagcctacttaacttccctgcgttcatgttgttattgttcttcttgcttgcagtttggtgaattggtgcatattgtgtcagaattttgtgaaatttttgaaaccatgtataccttcttaatggtaacgtgacaataggcatgaatactcaaattctttggaaacactaagccaaatctcatggctgtgttttatctgacatgtgagcaccaaaggggatgctaatatgtaaatctcaacagtgattttgtctgaatcatagattgatgatgctattactccaatgccataatgaataattcaaaaa

SEQ ID NO: 15955 - DNA, 2335 bp, Glycine max
  unsure (1)..(2335): unsure at all n locations
  Clone ID: PAT_MRT3847_114413C.1
tggtaccgcctgcaggtaccccggtccggnnaattcccggngtcgacccacgcgtccgggactgcataactctggatggtgatcaagtaagcaagacgggcagtatgactggaggattttatgatcacagacgatcaagattgaggtttatgaatatcattaagcagaatgcagacactattcacattagagaggaggaattggagaaagtgatttaattagaccaaaagattagaaagctgaacagagtcttgatcatgcgattcctggtgatgtgagaagagggttgaattcatttaggaagaacgtaagagagcatgacatttctggagttcatggtcaaattatttagttgctgtgatttgctgaaaagtttttcactgctgatgaagttactgcaggaaacagttgagttcgtgtggttgttgaaaatgatgacaagtcaaaacagatatttagacatcttaattctcactaagagcgatgccaaatgtgctcatgacaaatctgtgatcgaacagcttaagcaggatattgctaatgctaataagcagaagctgttgatttctaaagcacttacaaaaaaggagaagtctgttggggatgtccagaatcaaattgaacagcttaatgctagtatcgctatgaagaaagctgagatgggcactgagctcattgatcatttaacaccagaggagaaaaagcttttgtcagatttgaaccctgaaatcaaagaccttaaagagaagcttgttgcttgcaagactgatcgcattgagactgaagcacggagagcagagctggataccaatctaaccactaaccttaggagaaggaaacaagagctggaggctgtaatatcatctgcagatgctgactctttggttgctgatgctgaatcaaagtggcaggaacttagtgatgctaaaatattggttgatgatgcaatagggcagcttagaagtgttactgaaagtataaatgaccgaacacgacaaattaaaaagatcaaagatgaattgaataaattgaagtctttggaggacgagtatgaaaggaaacttcaggaagatgcaaaagaattagagcaattgcagagtaaaaaaaatacatatgctgctaaagaagaggaatatgccaagaaaataagggaactggggccattgacatcagatgcttttgaggcgtatagacgaaggaatattaaagatttgcacaaaatgctgcacaggtgcaacgagcaattgcagcaattcagtcatgtaaacaagaaagcacttgaccagtatataaattttacagaacaacgagaagaacttcagaaaagacaggctgaacttgatgcaggagatgagaaaattaaggagctaataacagtgctagatcaacggaaggacgagtcaatagagcgcactttcaaaggtgttgctaggcattttcgggaagtattttccgaacttgtgctggggggacatggtcatctggttatgatgaaaaagaaggatggtgatcatgatgacgacgaagatgaggatggtcctcgtgaagcaaatccagaggggagagtagaaaagtacattggagtgaaagtgaaggtctcatttactggacaaggggagacacagtccatgaagcagttgtctgggggtcaaaaaactgttgtcgcccttacacttatctttgccatacagcgatgtgatcctgctcccttttatctatttgatgagatcgatgcagcgctggatccacagtacagaactgctgttggaaatatgattcgtcgcttggctgacatagcaaacactcaatttatcacaacaacattccgcccggagctagtgaaagttgctgataagatatacggagtaacacataaaaacagggtcagccgtgttaatgttgtgtctaaggaagatgcactggaatttattgagcatgaccagacgcacaatgctgaataaggtgcttcttactcacatggactgaactgaaatatttcaattctgggcactcttcgaagattgtaacatagagattgcagattcaagttcattcaaattcttcaacctactatttgtctgttgtgtagtgactgtgtgatgccaacctaggtcctggagtaaccaaaaagcttgatctgtttacaaagttgaaaaattatttagcccccttcattgtacaagtttactcactttgtgtagtgttttagatttgttattttccattttatacaccaaaaagtatcatggggactttatctctttaaattaaaaaaaaaaaaaaaaaaaaaaaaaaaaaaaaaaaaaaaaaaaaaaaaaaaaaaaaaaaaaaaaaa

SEQ ID NO: 15956 - DNA, 763 bp, Glycine max
  Clone ID: PAT_MRT3847_114414C.1
ttttttgcagttaaaaaattatgtttgaggcaaaattaattttgccagcagatcatgatctttatttttgcgttcattttgcttttatctgttggatttacattggaacacgcatcgtagcatttgcaactgcaaatcaaacatgtaatgtataattacgcccagggttttatttagaagaatgactactaagaaattattccagcctcctttcatatttttgttagttcttttggtctgtcttcttccagaattgttccagccttgttcagaaaggcctcagatgggggaaccaaaaggtcatttgcgaagacgtatgataaatttagaaatttaacatttcatagctctatccagggcctgtattatcacttccaactgtaaatttgttagctaccaatcatcaaaatcacatgttccttaaatgcagggggggcatcttgaagcttcaaaatcgaccaagttatcttaccaacagcacataccgtttagctgattgaacgttttgctttattttgctttaccaacaacattatatctgaaaagtgatcctcttccttgctctgctgagtctctaataaatgtaccatgtttgctatcgaagatcctctactagtcttttttcaaaaaatctttaatgctgctccaatacccccaaggtctgccatccaaccaatgccctttgaaaaccaatgctcatttttaactaggaagcccagtcaacagtatgctgctttagttgatgctattcatccacacatct

SEQ ID NO: 15957 - DNA, 245 bp, Glycine max
  Clone ID: PAT_MRT3847_114415C.1
ggggtgcgataactagcgcggtgatagcaattgcaagaattcttactaggctgaatcacagtctacatcgcatgttaaccttgtcttgaaaaaggtctcgaaaccatcgatcgacaacttcatccagattacgatccctacgacaccgccattcgtgccccacttaaccaaaccggcgtcttcgtcaccgtcaaagccgttcgagaaattgacgtcccatcttttcacgtttacgactggtattc

SEQ ID NO: 15958 - DNA, 697 bp, Glycine max
  Clone ID: PAT_MRT3847_114416C.1
aaaagtaaaatataattaattagcgaaagtgatataagtgaaaatccttgaagacaaggaaaagagaatgaagataatctccatgaagtagattagtccaacttttgaatgccatatctatggggaacacaactaatctgataagaaccattattgcctaaaagctacagcatgtggaccaaaaaaatgaagatatgatgtggaaaaagatcaagaattaatgtgatgaaatttaatttgaagattatcttcctgaaacttgacaggtatatatatttatcagttcctcccttgggtatttgaactttctgacgttataactacggtttctgctggctcggaggaggcacgcttcttactctgtgaatcactaggggaaggagggggttgccttttttcctgtgctctcaattgggataattggagcttcaagaatgtcagaaatctgctcggaatatttgcgcatttcttcggttggagtctcccaagctaggcctccaacgaagaccttagtgaacgttgtgtctccgaactgtgatcggtaatgcgggtaagccatagtgtctcaaaggaagaaataaagggtgcccttgttcatgcatgaaaaaagctagttaagctcaaaagggtgtgtctgtgtgtgtccttgtttcttcttctgatctctaattataattaacaagtctctgccattatc

SEQ ID NO: 15959 - DNA, 420 bp, Glycine max
  Clone ID: PAT_MRT3847_114417C.1
gtcacagcttagcccgtgctgatttcattttctgttagagtatacttatatcttgaccaaaattgcttaaaccataaacatttaacagcctcattttggataaattattagggttttagcatgtctctctaaatatttgattgtttcttggcgtaactgttggttttttagttcatttttggatggtttattgggtactttgatagtggtcactaaaatttggagcattaatggttttactctcacctgaaaatgacacagaccctctcatcactactaactatattagtggatgtatttgggaaaaactcccagacatcaattgccgttgatgcatcagacatagcagatatcattgacttgctgtaagtgttactgatttgttataagatgccttacttaataaaaaatgtctaaaat

SEQ ID NO: 15960 - DNA, 421 bp, Glycine max
  Clone ID: PAT_MRT3847_114418C.1
gtgaaaagggccaccaatgatagtactaggggcctacaatacaaaacattgttaactgaaatttatgatttcaaaggccgaccaccgggggtgatggctatctgaagcttctctacctcctgcttgggacttattcacaagaccctattaccacaaggatttctacaatttgtcaatgcttttgcattgcatccttttgaacaatagctgtgtaccatgcacaaaatgcacaacattccttctacaactttctcgaaatattgtactgaccatttcctactttcatatgatcaacagacctaacaaacatatatcagtgattccgttgaatgcatcgcctatgtctctctgggtattcgaacgtcctgctctatcttgtagaagactgcctctgaacttacaattgggatggccttaagat

SEQ ID NO: 15961 - DNA, 553 bp, Glycine max
  Clone ID: PAT_MRT3847_114419C.1
ggctcgagttcaaattttcacaatatgtaaaaaaaaaaaaaaaacacaacacaacaccatctctctccaaaagacaaaatgacactagctgtcgaattccctgcacaagttacttcattacttcactaatcactatcccctccacccccactcttcaccttcaaaccctagaaaacttctaaatcttcccaaccccacccaccctcttgaaaaaagatcccatcttcgtgctcggtttcctaatgggtgcaaccaatgcgaatgggtcgtgaccctcttcttctttttattcttcttcttcttcttcttctacaatgggaaagtccgaggaagaacagcagcaacctctgcccctgtacgaggatccgccgcggaatgcggcgtgtcggtgccgctgttttcggattcggaaacttgtcggcgtcagatgcgtactcgtactggttgtgtcggtggcagtgtttctctccgcggcgtattggatgcccccttttataagcctggccgatctgaagaacctacatgggtggttccagattcaaaggtgggggtt

SEQ ID NO: 15962 - DNA, 426 bp, Glycine max
  Clone ID: PAT_MRT3847_11441C.1
ggggaatcaagtaaccagagcttcatgtgaatgaacacctgatttgaactgagaaaaacaaattatatatcggtattcttcattttatgcaacaatgatgagtttcatgtttttccctgtaagctctggtcatatatgaatctcatcattgttgcataaaatgaagaatagagatatatatgacgagagcttacaggcagaggcgtgaccctttatcaggcagatcggagtgtttgctctctgctaatgcctaaggattgtcaaggagcttgctgacttagctatggctcccctactgattaatggaggatagattcgattctgttctcttctaccgttagcagattttaacccttcatacgttgagggaatatctatgcttgattgtgatctgaatagaattgtccttttgtactaggaaggaaa

SEQ ID NO: 15963 - DNA, 334 bp, Glycine max
  Clone ID: PAT_MRT3847_114420C.1
tttttgattgtcccctttaaatgagggtgatccataataaggttcaaccatcatatgagaaaaaagaaagactagattcaattctgttcaacaactattaaaattaattttagaagattaccgcatatagatcatctgtatttggatatgatcttaccaaacatacgaattcccatttcctacaccaacaaagtgtgcaaatcgaacaattttgcatgcctgcctttctatatacactgttggacttgaagaaaaaccattttatgctgtggatcaaattcatgatatttatacctaacctatttaacactcacgtatacataatcacctatga

SEQ ID NO: 15964 - DNA, 381 bp, Glycine max
  Clone ID: PAT_MRT3847_114421C.1
gcgtctcttttctatttgactaatgggctttttaccttggtgctatatatagaggattgagggatctccatttgcactcagatgaacaaccgacaatggggggaaccacatgactaaacatccatatgtttgtgaacgagggggacaaaaaagactagaaaagtgggttgtgctaaagataaggaatcggaagtgacacgtgcatggtcgttgtactggcgcatggcactaaggacatgaaccaggtgaagagcgttagctccctgaaacaaagctggtatatggaaatcatgctaagatgtagagaataaggtccgagccagagctcgtgcctgctaatccaatacttaagatgggcaatggcattatcaggcgggaatc

SEQ ID NO: 15965 - DNA, 390 bp, Glycine max
  Clone ID: PAT_MRT3847_114422C.1
tcgagcccaggcataaatgttcacatatcatctgacagagaacctgataacacatattatcggcggctgttaaacaaccgggccctacttacattatatgctcacatgacaaactctgccaagggatattaaatcccaaaccagatagagtatgaggggactcttgcaccaaccgaagaatgtactgaacgtactgacaagtacatcattcaacccactactactgagcttgccaaacactattctgcagcaatttttgcaaaccaaagaagagctaatattgtcaagtaccatgtaggacaaacaccaacgttattactacaaaactgcatcgaatggacaacattggccacccaagacaagatctcctatagaaggaccctatttagc

SEQ ID NO: 15966 - DNA, 299 bp, Glycine max
  Clone ID: PAT_MRT3847_114423C.1
ttgtttttttttttttggttttttttttttattccctcggggaaagtgcgtaattggacaccaaaaaacctttcaacaaaacagaaccgtggagggaaaaacaaaccccaagcgataacgaagcaacccgcattcaatactccggggggggggcataaaaccacaaccccacgcttggccctacaccacaaccggtgctccctccgtcacccagggaaccacgccataaccatctccgtgccgcagaagaagaccaagccgccccagccttcggcaccgggggagaccctgctcaacca

SEQ ID NO: 15967 - DNA, 226 bp, Glycine max
  unsure (1)..(226): unsure at all n locations
  Clone ID: PAT_MRT3847_114424C.1
agggaatgatgaggaagctaccctctgaggaatctgcaccataacaaaatcagcaacaaatatccaaaaaaaaagaagaaggagatttctgttgaatgatgaggaagctaccctcttgcgctgattgaggataagaaccagaacaggttgcagttaaaaaaaaaaaccataacttgatgcaaagaggagtagcagaaccatgtaacaaaccnnnnnnnannnnnnn

SEQ ID NO: 15968 - DNA, 385 bp, Glycine max
  Clone ID: PAT_MRT3847_114425C.1
ctccttttttttttttgggggctttttttttgttttggggattatactttttatatcaaattctgcataaccccatgcccccaagcataatgaatttgacgaaactcccaccaaaaacctctcaaaatggatcggaccaaatgattccttggctttagaattaaaacaaatcaaggggtgagaccttcacatgctaaaacaattagcaattccaagaatggtggagaacaatctataaaccttttaaacagcattaataatggaaatttcaacggaggtttaaaattggagggcagaaatcggacttatgggaggacaaacttaaagagcccacatcatccgcaattcataaccaataacaggaatgcccaaaagcttagcaacg

SEQ ID NO: 15969 - DNA, 286 bp, Glycine max
  Clone ID: PAT_MRT3847_114426C.1
aaagaaacaggctttatttgagcactttgggactctcaattctcaagggtaccctctctatcagcttctgcagattagctggaagaaatttagggggagaaagtttcccaaaggggttcaaaggcgccggtttttgcccattttttggttggaaattttgggaatgcttcccctctgttcccctttttgggtcccgggtttgcgttaaaaagcgggttccttccccttttgttcccatttaaaagggtttttaaaaacacatccccaaagaatttttcgggccttc

SEQ ID NO: 15970 - DNA, 325 bp, Glycine max
  unsure (1)..(325): unsure at all n locations
  Clone ID: PAT_MRT3847_114427C.1
gggggggcggaggaacaagggagggngccggcgccgggggccgggcccagaagacacacgcacacacgaaccgaaacaagccacaaagggggccagcgaaaagccggagaggggggccggagggacagggcacacgggcgcgcgagcaaacaaacgcgggggaggggcgaaaaaanggcaccaggccgcagacgcgggagagagngagaaggaaacagaagagaggcccacggggaaggcgcacccacgcgaaccaaanggccccgagggggcacacggggcaagggaagcaacgaaggccgccgcacgaggccaggggaaaagg

SEQ ID NO: 15971 - DNA, 1523 bp, Glycine max
  Clone ID: PAT_MRT3847_114428C.1
agacgttaaaagttcacaaaatttatataaatggagagcaacactcttattgcattgtctactagtatttgatgcaccatggatgccatggaactatgctcactaaaccgttgcaatgaaattttccatcatcttctcattgaacagacttttttgtaactaggatccgcctctacaatcatagaccacttcatttcgcagctgctactacaacaactgcaacctcttccggaccaaactacttctgcaagagaagccagtgatgatggaccaatggcattgtcctccgtaatgtccctaaaggcaacaattaccactgaactccaattctaatggcatgaggatgtccacgttgttgattcaatcaaaccttggtttataggcgggtgcactggaacaaggagcaagggatcactatggtgatcatcatcaccatgaagaatcaaaggatatttgggaggccttaagcagctcatccatcaactaattgaaacagtccatgtttctttgtccccaagaatcattaccactgagggtcaagatatgttttgacaattatttttgttctgaccatggacattgcattttgaatacatcaatgaagtgttggtcctctctagtttgtttgactttgttggtatcatttctctttttgtcctccaaatggtgccatagaaagactaatagttattagctatatttcttctcatttaatgagcattaccatttcaccatacttctccattaatggcagaaaatcatttgacaggacaactaaatgcttctctagtaggcattttattagaccatcatgcattgcacattaggtattttaaattgctgtgatgtaattagtattgagctaataagccaatttggtgaaaatcaggaaacaattgtgtattttccttacaaactaaggcagtcaagtctggataaactacttcatcaatcaactctgtcaccagtaatctctgcaagaacaaaatccatctttgaacgagtggaagcggcttctatctctcacaatgacttctactttataaacttaagaaatcagcttcatcacagtatggcagtccccacaaaccctcaggttcttcacaattcttaaaatccttcccttgggaagttttgctattccaaaagcagcagcaagcttctcactgtgcttagaaactgaatcttctttttcttcctcttcaatatcatgcaggacactccttagctgtggtgcataacctgcttctgttctgagtctcaacattatttccctcagtttttcatgagcctcctccgtaacctcattaggcttttcaccagcaacaaaaccataaatgaccttgtcaatttcaatcatgctccaaccaggagtttttttcatgctatgttcagtcatcgttcttcttatgctggaaacatccttccatttccctgcaacggcataaacatttgagagcagtacatgatcaccggagctgtctggatccagttcgatggcaagccttgctttcacaagctct

SEQ ID NO: 15972 - DNA, 385 bp, Glycine max
  unsure (1)..(385): unsure at all n locations
  Clone ID: PAT_MRT3847_114429C.1
cgctcgtcttctcttattagtcgacggcacactctcttcctttttgcagctcccaccacaacacagcgagtgtctttttaatagggttgggggcgtgaaatcctaaacngaaaagcaacttgagcaaagcagatacctaattccaaaactagcatcgaagcctgtgcaacacctgctagacgccctcgaccttgaatccgtgatatcactccaccaatccggttaccaaactctacacccttccgatgcccctacaccccatctcttagacagtcctctcttccacttgcacaacctttactctttcaaaggcttttttctgaatggcgatcaccatctctctcgccctttttgttttaaacaacattaccattccaattcctct

SEQ ID NO: 15973 - DNA, 1214 bp, Glycine max
  Clone ID: PAT_MRT3847_11442C.1
ggaggttatcataatgttacgactaccagatgctcaatgcaaccacagaatgataatcttcattcttctattcagtttgataacactgcatttccactacaaaaccagctaatgagtgcttcacaccattctcagtttccaagaaatgaaaatgggctaactcttggtacacgacaaccagccactcctggatttcagaatgtcagcatttcaaatcctaattatagaggattggaggactacttcccagaggatgagattcgaactagaagtcacgagatgctagaaaatgaagatatgcagcatctgctccgtatatttaatatgggaggagggcaatctcatgctccctttaatactcaagaagatgcatacccttattcatctgcttacatgcctgcagcctccatgagctccaacttagatgatgaacaaaaccgttcctcaggaaaagctgttgtgggctggctcaagcttaaagcagctttgagatggggcatttttattcggaagagggctgctgagagacgggcacaacttgttgagttagatgaccaatagaatatgaaatcagagccatcttacctgttatgatctgagttctgagctataacttttatggttacagcatcaaatacaactttctggtactcagaatagctgtcacgctgaagttttatagcatgagaagacatgaaatctggattgaattatttggtgcagccttaacttaaagctcctaccgtgccttcataaacagttgtgcagcgacctctgtctgtacagaatatcaccctgcaacaactcttgtatctgttttacttgtcatttttttccactctatattcttgcctgcatgttgtgaagacctgacagtgttccacctggtttaaagtttaaacctaagtttgctgtggcttgatattgccagggtatcgatccggaaacttggaaaactgggggagtttcttcacacttggcagggtgtactgaatttcgtgttgaaagctagatgggttgcttctaattggtttgttttgtgtagttgccttgtggtacagtagttataatcaatgccgaattgctggatttggaactgctatttgcttatttagctttgtgaatgtttgagcagacatgcatgccatgtcacgggctactagtcctgtgatactgatctaaaaagtgagaaaagatttcctcgctcaaaaaaa

SEQ ID NO: 15974 - DNA, 292 bp, Glycine max
  Clone ID: PAT_MRT3847_114430C.1
gccattatatatgtctggggatatagtctattttttatatttgtaaacaccaataaggtattaagtacttctctaatccatggtcagcactagggtctttacatttgcacaaatgtgaggggagccttcgagaagccatagattgcattgtagttttaaagctaacctggtattaccgcttaaaactcccatgtcaatttctctcaagtttcattcaggcacactgggggtcaccaatatatggggctcttaggtgggccaacatggatgttaccaagttgaataccaagtt

SEQ ID NO: 15975 - DNA, 216 bp, Glycine max
  Clone ID: PAT_MRT3847_114431C.1
atcgtatgtgccaggctctctgtgtacggttctaactctaccgctctgaatacgtgagctggctgataacgaactgtcattaaagagcatatggaagctcatgtagcgagcattgaacatcatatacatgatgcttgcatactatgcactgctactgcagataccatcactgacagatatacgctgtgcagattgctggggcgacaaggcattgca

SEQ ID NO: 15976 - DNA, 249 bp, Glycine max
  Clone ID: PAT_MRT3847_114432C.1
ctcaacttctgctcttccaactcctacaacgctcttctccgcactcatgggcaaggtcaagatcggaatcaacggatttggaagaattggccgtttggttgactgagattctctgcaaagagacgatgttgaactcgttgacgttaacgagcctatcattaccaccgattacatgacatacgtgtttaatccgacagtgttcacggacactggacagcatcacgatgtcagcgttaacgacgagaagac

SEQ ID NO: 15977 - DNA, 446 bp, Glycine max
  unsure (1)..(446): unsure at all n locations
  Clone ID: PAT_MRT3847_114433C.1
ggggagcggcgttatcagccccaagtggcaagaacaacaaggtgagagatgaagatgagagactaanattatggggaggaacagagtccctggtcaccctcctcgccgaccaagccatggaaagggtggacaagacgagggctagggctaagatgaagataaacctcgtcctagtcgaccaagccaagggaagggtggacaagaccaggaccaggacgagggcgaagatgaagatgaagatcaacctctcaagggccggggatggagatcggaaaagacacaacccagaagacctagacaaggagaaccacgtggaagagggtgcgagacaaggaacgggggtgagggaaatatctgcaccttggaggttcacgaggacattggtcggccttcacgcgctggcttctacaaccctaaaggtgggcggattagtaccctcaacaggc

SEQ ID NO: 15978 - DNA, 418 bp, Glycine max
  Clone ID: PAT_MRT3847_114434C.1
aggggtagttgacaggttttcacatcataacaattggctgcttctgttacagttttaacttcattggaagaatttctcatgtgcttgagtttgtggtggttgatttgcttaaattggtttattgagttctgttaggtcaattcctttgatctatgtggtgtttgtgtttgttgaggttggttatacttatggcttctcacttcactataggtataaactttaaagaagtctgttgattgagaagtgctcttttggttcctgaaaatgcaagttaccttaggttgaatagagagctgttaggggcatgagtgtcatgaatattttaatattattaggtctaaagtgaaaattttgtaaattttttttatcgaatttgagctaactgaatggtttaattgactttatgaatttggtcccc

SEQ ID NO: 15979 - DNA, 322 bp, Glycine max
  Clone ID: PAT_MRT3847_114435C.1
aaaaaaacaaaaaacttttttttggtggggacaaaccaaattttcctccaaaaaaccctttcccttggggggggcaaacccgttcttgttttctttggagaaaaaaccacatgccccttctgggggacctctctgaaaaaataaaataaccttttttagggggcccaattggatagattttgccccacccccccttttttttgtcttggaaaaacctgccaaaaaatttgaaaaacccaaggaggggagggggctttgatcaagccctggaatcgagggccctaatggggctaaaattcagggggggcctgcccccaggggg

SEQ ID NO: 15980 - DNA, 401 bp, Glycine max
  Clone ID: PAT_MRT3847_114436C.1
gcctgagaaaagtattaaagttattgtggttacagatggtgaaccaattcagggacttggggatcttggatgacaggggatgggaaaacctgaaggttaaatggtcttgtacacatcactaggaagagatagaccatcagcatgtttgcctattacgaaaggtgaggcgacaaacaaagagaaattactagaatgatgagttttacattggacttagacaaaagagggcatctggtcatgaatattctgaacttttgaacaaacagatgactgctgtgcagcaaaactacaggaagacagttcttgtatagaaagaaaaacatgcaaaccacattgctattgagctgctagcacaatatggcacaactgatgttgatatcaacgatgatattgaggtgact

SEQ ID NO: 15981 - DNA, 629 bp, Glycine max
  Clone ID: PAT_MRT3847_114437C.1
ggcgtttttaaatttcccttcactttcctttccttcttctctctttatttattcattcatttggctcctccttctttttcttcctctgcaaccaaaatctgaatctgaggacaccaaaccaacaccaccatcgatccaaatccaatccaatgggttcggttcccgcagaactgagcttggatttaagacccactttcatccccaaaaccatcaccgatttcctccgccacctctccgacaacaacaacccccccgccaccctccacgatttcctcgcccgcctcgaagacgagctccgcaagatccacgccttcaaacgcgaactccccctctccatgctcctcttaaacgacgcaatttcagttctgaaggcggaatcgcagaaatgcagggtcgcgcgtgattctgcgccggtgctggaggagttcattccgttgaagaaggagcgtggtgatcagagcgaggaggaggaggaagaggaggagaatgatgatgatgacgacaacgaatgccgggataagaggaattggatgagttctgttcagctctggaataacaacactaccactgccaccactaataataacaacccttctgatcgcaaacaactaattcacaaattacaaacc

SEQ ID NO: 15982 - DNA, 334 bp, Glycine max
  Clone ID: PAT_MRT3847_114438C.1
tttatttgcaaactccttgaccaacttcaccttctgcacacacctctttcatgaccacttttttctctgaccttcttgcttctcccacagacaacaacaaaccaccacatggtggtggtggtggtttgtctgagagaactggttctggtgtccgcaaagtcaatagccacaccaccaccttgtttggctctttatccccctgcccatttttccttcttcctacttttcaatttcttctggtttgaggcttgcctagcttcttgactcacccgttctttcgaactcttctcacatattggcatcttcaatgctgcagcctttgatgcttggagct

SEQ ID NO: 15983 - DNA, 291 bp, Glycine max
  unsure (1)..(291): unsure at all n locations
  Clone ID: PAT_MRT3847_114439C.1
aattacactttgacagaatannattaattacaagttagncnnacatacacaatcagttagatgataaacagacctttcagaccaacaattatcaaacggggcgcggggggagtttacataactcaaacagggttttggaattaattttcgtgctgcttatccttggcattgaaaggatngnaacctgctttacttacaaagaggtcttcaatatctccaaccccaaacctttacattctctgatctgctactccctcctctccccacctttgagggtgaaacataaaaatg

SEQ ID NO: 15984 - DNA, 491 bp, Glycine max
  Clone ID: PAT_MRT3847_11443C.1
tacggctgcgagacgacagaaggggataggtagctactcactagcattttagttcccaccattcgtatcccttcctctgatgaagactctccctcaaacaccagggaaaaccatcccagatgcttgcgactacaaaggtcacccagcagagaggtccaaaaccggtggttggactgctgcggccatgattttaggagtggaagcatgtgagaggttaacgacaatgggtgttgccgtgaatttggtgacatatttgacgggtacgatgcatttgggcagtgctaattctgccaacacggtcaccaacttcatgggaacctctttcatgctctgtttgttcggtggttttgtagctgacacttttatcggcagatacctcactattgccatcttcgcgactgttcaagccactggtgtgacaatattaacaatatcaaccataatcccaagcctgcaccctccaaaatgcataagagacgcgaccagacgct

SEQ ID NO: 15985 - DNA, 319 bp, Glycine max
  Clone ID: PAT_MRT3847_114440C.1
gactgataattcaagccattatattgttccttcacattctgaaatatgtgactttgtctttgcgctgcgcgcgtctttcatcaccgctgactcatgggctgctgtttctacccttcctgttacccctgaagagagtgccgtttactactctcatcacacagctgcgaatgacttctagatggtgtatctgaacgatatggttaagaagctactggcatgttatctgcactctgaggtctccgtggcacttcatgtggatgcagcaagctgtgtgtttgatcacatgagtcttcttgatgctccggcagactgccacgaa

SEQ ID NO: 15986 - DNA, 1104 bp, Glycine max
  Clone ID: PAT_MRT3847_114441C.1
gttgaattaaatgcccgtcaatagctaaacaactttatgctgtagggcatcgttgtatttctgcttttccaaccaaactcatctgggcacccagaaatttgcaatctttcttctatttcaaccatgttttggcgcttttggaaactgggtgtcagcaagtttgggtctttacggtgaagaaattggtgggttgactttaaattgggggtcaaacatgaagaaatttatgtttttgcaacttgtcacatggatttggatatgtggtgttgctcacagcagaaggcctggcagtgtgaacattggtgcggtttttgctttcgacactgtcataggtagagctgcgaagacggctatggaaatggccatttctgatgtcaatgaggaccccacagttctcaagggaaccaaactcaacttgattatgaaggatgccatgtgcaatgcctttctgggatcaattggagcttttcaggtacttgagaaaggggttgcagccataattggtccacagtcatctgccgtagctcacacggtttctcaaattgctgatgctctccaagttcctcttgtttcatatgctgccaccgatccaaccctgtcctccctccagtttccattcttcattcgaactacacaaagtgacttggcacaaatgactgcaatggctgatctaattgactttcatggatggaaagaggtcattgttgtattcttggatgatgattatggaagaaatggactatctgctttgagtgatgagcttgaaaaaaggaaattgaaaatttcttataaactgcctttaagtattaagtttgatttggatgaaatcactaacttgctcaatcaatccaaggtggttggtcctcgtgtgtatgttgttcatgccaaccctgatccgagattgagaattttttttattgcccataaacttcaaatgatggccaaggattatgtctggcttgtcacagattggctctcagctacactagattcattatctccagtgaatcagacctctttcagtgttctccaaggggttgttggtctacgtcaacacattccggacttcagcaaaaagagagcttttgtttctcgatggataaa

SEQ ID NO: 15987 - DNA, 1998 bp, Glycine max
  Clone ID: PAT_MRT3847_114442C.1
atacggctgcgagaagacgacagaagggggagggaaagcgttcttcaatttcagagttcgggcttcatttcagactcagagtaacactacagagtacaaacatcaaacaccttctctgcacgcaaaaaccgcgaaaagaactagaaccgaagatgcagagattcaaagctctgctacctcaacaaactaggtcctcacttcgcactttctgttctcaccgtcgagctttctccgctcaaccgaattacgcaaagcaccacgacgacgattctcaggaacagattttagtcgaaggaagagcgaaatcacgagcagctattctcaacaggccgtcttcgctgaactcgctcaatgcttcaatggttgctcggttgaagaggctgtatgattcctgggaagaaaactctgatattggctttgttttgatgaagggtagtggcagagctttctgttctggtgcagatgttgttaggctgtatcactcactcaatgaaggaaatactgacgaagctgaacagtttttcaaaacattatattcatttgtatatcttcaagggacatatcttaaaccacatgttgccattttggatggaataacaatgggatgtggatctggaatttctctaccaggaatgttccgtgtggtaactgataaaactgttttttctcacccagaagctcaaataggtttccacccagatgcaggagcttcttatgttttgtctcgtctacctggctacttaggggaatacttggccctcacaggagataagcttaatggtgttgaaatgattgcctgccgccttgctactcattattcactaaatgcaaggctctctttgcttgaagaacgtcttggtaaactaatcacagacgaaccttctgttgtggagtcatccctcgcacagtatggtgatcttgtttatccagataggagcagtgtccttcacaggattgatactattgatagatgtttcagtcacgaaactgtggaggaaattattgaagctttggagaaagaggctgctgagtctaatgacgaatggtactcgactactctaaggagaataagagaagcctccccgttgagtttgaaagttactttacaatctatacgtgaaggtagatttgaaacacttgataaatgtcttgtacgtgagtatcgcatgtccctacgtggtatttcaaagcatgtctcctctgatttctttgagggtgttcgggcacgaatggttgatagagattttgcaccaaagtgggacccacctagattaaaagatatatcagaggacatggttgaatactatttctctcctttaagtgaagttcaatctgaattagtgctgccaacagctttgcgagaaccttacatgtaaaaccagcaaacctcttagaaaggattttgattaaaaaaataaattccgtgtaaagaggcgttgatgcagttggaagatggcacaatccatgaactatcgcattcacctgcctttgacaaaacttccaccaccaacggttcctgtctgactatctgtcggattaccgaatgaactttccaatgttcggaattatctttgttcttgaatgtgtgtagtctaatgttggccccataaatataagtgaaaggaccatatctgcttctttcattgtttatgctttgattgctcacattggcatgagatgcttttctaatagacgtgctgcagtgatgcctatttttatatcttatttttcgtgcttttatgttgtctgattatgttatttgtagaatacaacacatgttaacattaaaaatctgtttgtagaatacaacacatgctgagttcttgtcctttataaaatgcccctggaaaaacaaggaatagttgtcttaaaatcatttttttcccactcatcacaatgtcaattcgttggccatccctagagtccccaagaggaagaattattaaatactagtaggtggtgtgtaaacttgtctataaaattaagtgcatgtttgcc

SEQ ID NO: 15988 - DNA, 748 bp, Glycine max
  Clone ID: PAT_MRT3847_114443C.1
gtaggcagtgaactgaacatttcagattttgttagatgagacaggggaaagaagctactgaatcttgtgacgaatggtgtttgaatactctaaggagaataagagaagcctcccctttgagtttgaaagttactttacaatctatacgtgaaggtagatttgaaactctcgataaatgtcttatacgtgagtaccgcatgtccctacgtggaatttctaagcttgtctcctctgatttcttcgagggtgttcgagcacgaatggttgataaagattttgcaccaaagtgggacccacctagtttaaaagatatatcagaggacatgattgaatactatttctctcctttaagtgaagttcaatctgaactagtgctgccaacggctttgcgagaaccttacatgtgaaactagcatacctctaagcaatgctcttagcaagggtaagacaaataagttctaattttgttctcaaacttcattagaagtttttaaaatatgtttgttgtattggcataaaaatgtagaagtcacacttgtatttttggtggggagaggtggttgaattattcgcagtctttcatgaaaatgtagatcatctaattttctcactcatcacaatgtcaattcgttggccatccctagagtcaccaagaggaagaattattaaatactagtaggtggtgtgtaaacttgtctataaaattaagtgcatgtttgcaaaaaaagaaacaaaaaaaaaagtaaaa

SEQ ID NO: 15989 - DNA, 444 bp, Glycine max
  Clone ID: PAT_MRT3847_114444C.1
ggtgacttactggactggcaccgccaggagaaaattctcctgctaactttttttcttaagctttctgtcaaacaatgaggttgtagggggaggtagggaagaatgagctgaatttgtagcatacagcttacctgctagaatgttcttaccctcttacctctcctgtagcgttagctctgcagagctaagctttgggagaatgaatctatcactgagaagttttactactcattgaagcacaaaaatatccgctacacaggttcacatcagggtaggatcgttaggatggctctataattaggacaggccagaaccctggccactgtataaaattggaaagtctctaagacacaggcaaaccaggggacttaatgatttggttcgtttatttaataaaagcttttaattgagaacctactattgaccaggcactgttcaagacac

SEQ ID NO: 15990 - DNA, 287 bp, Glycine max
  Clone ID: PAT_MRT3847_114445C.1
ccacgcgtccgctgagttctgacactgaagatttaagttcctttgcactcagccagctttcttgtgcaatccatgcgcctggccctgaatggcacaacttacaataacattcacctccatattcttaattcaggaatctaataagtaaaactatcctattctgaattttaatattattaatttcctccatcaattgctgtaagattcattttattttctaaacttttaagatgtctacgcgcattaacttggtaaattcttattagaagattcggtggtatatattc

SEQ ID NO: 15991 - DNA, 137 bp, Glycine max
  Clone ID: PAT_MRT3847_114446C.1
cccacacgtccgcacaaattgtatttttctgcactagcgcaccagtttatatgatacggtgatcatgtttaaacgctctaatattataagttttacctctatttttgttaatatacacatatcattctgctttttct

SEQ ID NO: 15992 - DNA, 754 bp, Glycine max
  unsure (1)..(754): unsure at all n locations
  Clone ID: PAT_MRT3847_114447C.1
gcgctagatgtcgcatctgggtatgggaatgggtgcaccttccttgccttccatttacaacccgatgcaattgccaaaagtgccacatgatcaagccatgtctgtgcctcagatgccaaaccagaatttaatgtgtcaaaatcaagttttgggtgcctttaattaccaaacccagatgcaaaacccttgccttccagaacaatatgcacgttacatgggttaccatcttatgcaaaatgcctctcagcctatgaatgtgttcagatatggttcccaagcagtgcaacacagtcaaacgatgattgcaccaggcaataatagcagcggacccatgagtggaacagctaatattgatgatgctgacagtggcaaagcgggttcttccacctttaattgaatagtgaatagcaataccttaaaattactcaattgggggaattacctaatggagtacgtcaatcctcacaagcaccaatatgtgctccaattttatgtagtttggagttcatgcaatttataaccaatttaaagtttgttgtttaacttcgagaaattatattatatcaaacaagtcgttgattgtgggtcaggcatgtaatcagcttcgtaggatcgatgatcaggttcaggcatttgttgtattgtttgtagattaggaacagtaaattatataagttaacgtgctaatttgtacttcatatggaacccatcaggttcaggcatttcatgtatnntttatatgagttaataacgt

SEQ ID NO: 15993 - DNA, 491 bp, Glycine max
  Clone ID: PAT_MRT3847_114448C.1
acccccaaaaccctccattaaatggggtcccaccagcccttcttgaaaaggcacccaccagggttcaaaataagattctcaaagagtttcctccaattatggcaagtgggacaatgcgtgttagtgaggctgcagctctagccactaaaagagtcatgcaaagatacggccaatactactgctgtgtctcagaattagctacttttcttcatcagaaacgatgtgggtctagtgtctcagaattagctacttttcttcatcagaaaacgatttgtgggtctaaaacctcttactatcactgcaataattgcggtgtttcatatcattggttattatttgaaccgggaaaaacatgatcaacttgtagcacctattctatgagtttacttaatggtttcaagttaatgtgcatgtcggatgaaatgctgattaagggaatcatttcaccacattttctgaaaaaaaaaaaaaaaaaaaaaaaaaaatataat

SEQ ID NO: 15994 - DNA, 122 bp, Glycine max
  Clone ID: PAT_MRT3847_114449C.1
agcttttcttctttcagatggcacaccttgcgttttctttgtcatctctaaacttagaaaattgaattaagcccgacacgactagaacactgtgcctgactaacttggaaacctaacctagg

SEQ ID NO: 15995 - DNA, 587 bp, Glycine max
  Clone ID: PAT_MRT3847_11444C.1
gtctaacaaagtaaaagtaaaatacaatattatccttattttttaactttttattatttaatacttttttttatatgggctttcttctctaaacctctctcaccaaaatttagcaacttcaccgccctcctctctactgtgtcatgtcagagttttcccaattcacctccctcctcgccttcgccacatcccttgccgcggatctattggaccgctcctccctctccattctcggcgtccccaacatctacctcgtcgccgacaatcacctctccccggctgtccttgccgacatccttcgctacattcctccggttcctttcctggtccccgacctttgcactctctacccctctagcaagctcattaccatgctccttcaaaccattggccgcgccaccaacaacttcggctcgaacctcatccacgactcccaatctggtgtcatctcgttccgctcccctgcaccataccccccttctaatgccaccatcctctccttcataaagaagtgcgatggtgccggaaaaccactaagcactgctgtgctgcgacaaatcgtgttgaacttcctcctcgctggcagg

SEQ ID NO: 15996 - DNA, 204 bp, Glycine max
  Clone ID: PAT_MRT3847_114450C.1
ctgggttggttttttttttttctttgattctttggggggaccatgcgtctctcgtcttggtgcttctccaatttacatatggggggtgactttgccccggggggtggtactacactggcttggcacttccttccaactgggtttctttgtggggggggggttttctttaattatctcttttcttatggatgccttgggggttac

SEQ ID NO: 15997 - DNA, 1299 bp, Glycine max
  Clone ID: PAT_MRT3847_114451C.1
cgttcccttcgctctcggtttctataaacccttttattctctctttctgcccccccccgaccaatgcctttcccacctggcccgtcgcgacagacatgatgtcaccttccggcgccgccaggtacatggcttttcccccctctccctccgcgcctccgtcgccgcacctctccggtcttcgctctactcccctctccgacccgcacacacatctagctgagttgttgagagaacgtaactagcttagtaccttcatggctgtgcttcctcactgctttcgattattgaaccaagaaattttgtatgtaaccacgcacatggggaatgcatcagttttaggtcaaagtgggcttgaacacgctagccccctggctactgggggaatattttcatattgaagtgcctatgtaaacgaatggggattgcgatctcaagatcaggggccgaggtagctttaaggatccagctagggaggaaatgatgagagggaaacctagctatgaacatattaatgaacctctccccattctagttgaggcagaattacatgttgaaatagtagatgctcgttggatgcaggctcgtaacatacttgaagatttgctcaaaccggtggatgaatctcaggatttctacaagaagcagcaacttcgggagttagcaatgctgaatggcactcttcgcgaggagggttctcccatgtctggttctgtttcacccttccacaacagccttggtatgaagagggccaagaccagggggtaaattcccctaaagggtgagagggcttttggagcttgtgttaattttctacatcatcacttaccatgccacaggtgatgctgtcaacgaatgccctgatctgcgatcggggcactggcatcatagtgccagttctaacttgttctatgtgcagtgtgtttacattgagtttgggggaggtttaaagatggtagcacgtagtaaaggtccaattgagtttggtgaatttgctttttttttttttttttttttgtgttggttaggcggtttggttaaatattcaccaaattgtctatattatatatggggttatatttaagcttgcaaggacagttttgatatgcttttggtattttctgcgaggaaggtaatgttatggtttgtacccagattgtgaggcagataataatatctacatctactcaatgcgtgtatgggtgacattttgtaggtatctaatttagattataaattcgtgaaataccttttctggggtcaaatagtttttatacaattgctagtagtatttcatgtgga

SEQ ID NO: 15998 - DNA, 376 bp, Glycine max
  Clone ID: PAT_MRT3847_114452C.1
ctctcttcttacttcccttctctctctgtctctaaaaaccctttttttctgtctctttcacacacaccaaccagactcgatcagtggtggcagatagagagagacatgatgtcaacttccggcgccggcaggtacatggcttttccgccgtctccgtccgcgcctccgtcgccgcacctctccggtcttcgctccactcccctctccgacccggacaaatatctagctgagttgttgggagaacgtaacaagcttagtcccttcatggctgtgcttcctcactgctttcgattgtttaaccaagagacccagcttgttacagtcctcatcaacacaaaactggctgagtccacaaggtagctcatctggtattatt

SEQ ID NO: 15999 - DNA, 750 bp, Glycine max
  Clone ID: PAT_MRT3847_114453C.1
tgcaacttcaaatgtcagggcaggaaagaataatggtcgggcaccttcagctccggttaaaaaggctgaaaccttttggactatctgtaataggtgcaggacacattatgaatatctcagggtttatttgaatcacacccttttatgtccaaactgtaatgaagcttttgtcgccgtagagaggggtccaccaccaaatgtttttaagccaccaaattggtcttctcatcaacggcatcagaattctcaacaccatgctggaagtaataatacaaattttcagtggggttctcactctagaatggctggttttggtgcaacagatgttgatcaacatctgtgctacctcaagctgccattcttgtgcagcaggcaagtgagagagtaaggagggaaggttcttttcacaaagctgaaaacctatgaagaaaaggaagacagatgatatttgcattaatggttatcaaggatacatggcaaatcatatggctacaggacatggagcggctggtttgggcaccttttctgaaccaggaaaggctaacttggaaacagaaaggaattatggtttttcaggtcttcctggcaagcattacagcacaagagaattgtcaatgtttgaaatacgaaacatgttgatggataagtcgcgcatttgaattcgtaagaaacttcaagaatggaaattgatggctgaagcttagattaacaagggccaagagaataaaagacagagaagcgcatttaatg

SEQ ID NO: 16000 - DNA, 618 bp, Glycine max
  Clone ID: PAT_MRT3847_114454C.1
gtacagatgcgacagaacgcaatagggggcgcatgactacaagtgaaatgtgtgctacttttggctcgttcccgcccctaacgatcatgagaaaccacaactaacttttgcaaccaccaggaacttgaataggttagaccattgatccttgcaactgctctaataacttaaatctaaacatcatgaatcactggagggcacactactagtccaaaatagtaactagcaataaaagaccccatgacatataccaggttttaccatgattatcactcacacatgggtctatcgaatagcatggcgaattcgaatatttctattggtatttgccatatagaagtaacactagcaataagacgtgtactgggaggcgtatcgatatactcacacgtctcgaatcatgcggcatctcgcatatactccaccattgttcgaactcgtaaactctcatagctttcatttgccttatgcgcaaaacctcttcaatgtattatacgagatgtgcattatggaaattgattttctcacacaaaacggggtacaaagaaaaagatgaagagatgatgactatccctaacgctgaaacatattgaggatcattgtaggaaggtgactgag

SEQ ID NO: 16001 - DNA, 1525 bp, Glycine max
  Clone ID: PAT_MRT3847_114455C.1
ctctcttcttacttcccttctctctctgtctctaaaaaccctttttttctctctctttcacacacaccaaccagactcgatcagtggtggcagatagagagagacatgatgtcaacttccggcgccggcaggtacatggcttttccgccgtctccgtccgcgcctccgtcgccgcacctctccggtcttcgctccactcccctctccgacccggacaaatatctagctgagttgttgggagaacgtaacaagcttagtcccttcatggctgtgcttcctcactgctttcgattgtttaaccaagaaattttgcgtgtaaccacgctgatggggaatgcatcagttttaggtcaaagtgggcttgaacacgctagccccctggctactggaggaatattttcaaatggaggtgccgatgtgaacggatgggcatcacgatttcaatcagaaagacccagcttgttacagtcctcatcaacacaaaactggctgagtccacaaggtagctcatctggtattattgttaaaaagacggtcagagtagatattcctgtggacgcatatcctaattttaactttgttggtcgcctcctaggccctagaggaaactctctaaagcgtgtagaagcaagtaccgagtgtcgtgtcttgatcaggggccgaggtagcattaaggatccagctagggaggaaatgatgagaggaaaacctgggtatgagcatctgaatgaccctctccacattctagttgaggcagaatacccagtgaaatagtagatgctcgcctgatgcaggcacgtgaaatacttgaagatttgctcaaaccggtggatgaatctcaggatttctacaagaagcagcaacttcgggagctagcaatgctgaatggcactcttcgtgaggagggttctcccatgtctggttctgtttcacccttccacaacagccttggtatgaagagggccaagaccagggggtaaattatcctaaagggtgagagggattttggagcttgtgttaattttctacatcatcacttaccgtgccacaggtaatgctgtcaacgaatgccctgatctgcgatcggggcactggcatcatagtgccagttctaacttgttctatgtgcagtgtgtttatattgagtttgggggaggtttaaagatggtagcacgtagtaaaggtccaattgagtttggtgaatttgcttttatagtgttggttaaggtttggttagatattcaccaaatctgtctatactactattatatggggttatatttgctgataaaaaaaaatatggggttatatttaagcttgcaataacagttttgatatgtttttggtattttctgcgaggaaggtaatgttaatggtttgtacccagattgtgaggcagataaatatctacttcaatgcgtctatgggtgacattttgtagtatctaatttagattataaattcgtgaaataccttttctggggtcaaatagtttttatacaattgctagtagtatttcattgtg

SEQ ID NO: 16002 - DNA, 507 bp, Glycine max
  Clone ID: PAT_MRT3847_114456C.1
agctcggaattcggttcgagaacagtagtaagggctattacaaaccctttatgaactcaaaatgaccaagaggggggactggatactgggtaaaaaaagtagcgcacattctggccaggctcaagatctcacaacaggtcagcacacgggctgagtggtgcggaatccagtgacctctttaggaaaacaagcctgctcagttattggaagattcactggattgcacagaacagcatggcatgaggctactgcccccacaggaaactgatactgcacacgctgctccggagttatcgtaatcggttttcagcacactctgcgtatgtggcagcacatgaatggctaaagttgcgggcaacccatgtacgactactatgctctcattttcttgtccatcgacctgcacctgtggagcaacatgattaatatggcggcaaatggattcttgagcttttctataaacagccttcatatgcaggttgggaagatgccctttatcacttacgt

SEQ ID NO: 16003 - DNA, 202 bp, Glycine max
  Clone ID: PAT_MRT3847_114457C.1
gttccttttaaagcgccactcatggatacaaagggcgggggtgtaacattagtggggcgctgcatttgtatgaagctgaacatacaacacctgaacatgaagcacagaggattaatgttgcacggttcgaaggcgaacagtccaatctgatggacactttatcaaaaatcaatgtgcgcatgtgaccggacatgatgaaaca

SEQ ID NO: 16004 - DNA, 269 bp, Glycine max
  Clone ID: PAT_MRT3847_114458C.1
taaaggacaatctatttacgcgtgtggataatattttaccttgtccactagaaaaggcactagttcaacccatgtttttataatcaatggggcccccctattggatggggggcaaacccctacaaaaagagcgtttggattttatgaaggggccctaaaaaattaccatggttcattcatccctatcccaaacatcacctttgttaccagaaatactataagcggttggttatttaattctgcctcttctaagataaggtgaaaatttt

SEQ ID NO: 16005 - DNA, 201 bp, Glycine max
  unsure (1)..(201): unsure at all n locations
  Clone ID: PAT_MRT3847_114459C.1
cctcncnccagacntnacnngncgngngcananacatccncntccnaacacatganntgtatnananntnntnnnnaccancacacgnnctgcatcgncncacnnntgnancccantncnnaccatcagngnagatngnannagggncnaannagacancaggngngagtaccgggcannaaagnatnngacaannttntn

SEQ ID NO: 16006 - DNA, 254 bp, Glycine max
  Clone ID: PAT_MRT3847_11445C.1
ctgggacatctctagaattcaccagagacatcgttgttcaacagagggttaatgcttcttcagttactggaagtcaaagaccttcttacccatcctcaaaacaaacaagagattgggacaagattgaagctcaagtcaagaaagaggtatgtttgctgtctttgtaaagtctcttaattctttgtattttagtgattgcaactcttgctcctaacattcttcattcatttcaggagaaagatgaaaagcttgat

SEQ ID NO: 16007 - DNA, 679 bp, Glycine max
  Clone ID: PAT_MRT3847_114460C.1
actaattttatactattctgctagccttttgtctttgtttccatttttttttgtactatactaattttttgttctgttttacttagaaatagacaaatagttgacttaaggcacaccaaaagaacagactcaatcaccgacaacaattggcgggacttgcagcactcaccaatcaaatggtatattctagtcagtgccaggctgctcctatagtggcctcatgcacattggttgtatgctgtagccatagcttaaccggaaattcagaacagcctccactccctcttgtgtaatttccctcactgatgtgataccagctagcactacatatccaccatttgcaacagatattctgggtgatcgaaatgcagtaaattaagcaagcaatttactccattgatgaggatgtgctcatatttgcaaagcacggtaatggactctattattactgttgttgaatctgcactgaagataacaagagcattgcaaccttttggaagtactaaacctttcgagcattcaaatacataagctttaagcattgaacttagtttaggcacataagattcattcaaggtgacaattttagtttttactttgggaatgttgtggatagaacactttgcatacttatcaagactctatatatatataaaaaaaaataaagactttgtttcct

SEQ ID NO: 16008 - DNA, 1760 bp, Glycine max
  Clone ID: PAT_MRT3847_114461C.1
ttcaaagacaaagtaaatctttggggaatccgttgatcagaaatagtgttattgtgaatgataattccggcatcttgactttaaaaaataggttggttactactatgctcctagcggcaagccttaccctgataactggatcattacggatgtcgtttatgagtttgaaggatctctaatctcaaggtcagggaatctggttgaagggaaccctggagcaataagtggcgatgagacggtgccatatctctccctttcctggtgcaaaaactggcttggaccgaaagtgaacataacaaaagctccacagtcagagcatgatggctcagatgtacaaattaaattgaatgtggaacatcaccatgaagaagatatcgttccaaacatgacaagatcaccaagggtgaagtatataacatattatgaagattctgaaagtcttcctggaaagaggacagcagtttgggagcttgataaagcaaatcacaggaacatcgttagatcaccagtgctaatgagggaattatggcttgagatgtggcatgatatccatcctgatgcaaaatcaaagtttgtaaaaaaagctaagcgtggtcctttaagagatgaggactgttattgggtgggggggccggcgcgctgtgcttggcctgtggtctgtgattattccggcatcctgactctgaaatattcgttggttcctgctctgtcctttgcgacatgaggactgttattgggtgtatgattaagctcgttgtgcatggcctgagtactgtgaatataggtatgtttttggtgatgttcacttgggacaaagctgcaggttgagatatacaacagctgaattgttgtcacattatttgtaaataataagtgttttctactggatgacacgctacatatgaataccagaattactccttcatacaaccatgacttttggagtttggccattctttaactttgtatacttgcatgggcactgcatatgaataccagaattactccttcacttcccacttagccatccatgataaataattggctagaattgtggtggatctgtagagctatattgttcagttggttgatagttttcatgatctagaaacatacaggctatagtgatatgctaaatccattgttaaaaagttgacacgggaagtgagaatacaaatagtgtagatgacagtagtgaagctgatagcgtgcgttctctgacttcgtatcatgttcatgctttctctcctatcttctctaatatctattgcactagctgtcctgaactcttggttttgactatgttttgttgctattagtgagttttcatttctatttttatttactttttttttgtatattcttttacttactactaagcatgtttatattgttacttgtcgttctacacttctactattgaacaggcatatgcttgaatgctttaatatttcagatcatatcttggcgatcctgttcttaatccccttacaccttgggatcggccgccaataaaaaatgtattctgcatctatgggactgattcaaaaacaaaggttggttactactatgctcctagcggcaagccttaccctgataattggatcattacagatgtcgtttatgagtttgaaggatctctaatctcaaggtcagggaatcaggttgaagggaaccctggagcaataagtggcgatgagacggtgccatatctctccctttcctggtgcaaaaactggcttgaccaaagtgacataaca

SEQ ID NO: 16009 - DNA, 1049 bp, Glycine max
  Clone ID: PAT_MRT3847_114462C.1
tttttcgcgtccgcccacgcgtccgcggacgcgtgggttcggatataaacaataaaataaaataaaacagaagagaaggaaacagaagtaaaaaaaaataaaatgggttacacaagatcttctcttctgtccgtggctcttgtcttggcattctgttcaagcattcagggtttggacatcaccaaattgttgggcgaatatcccgaatatgcacagttcaacaaatacctaactgaaaccaagctggcggaccaaatcaacagccgtaacgccgttacagtccttgcccttgacgacgccgcaatggcttccctctccggcaagtcgcaagacgccgttaaggccatccttagcacccatgtgctcgtcaacttctacgacgagaagaagctgatggaagccgaaggtagtcgcaccaaggtcgaaaccctattccaatcctccggtgtcgccaagcccaaccagggttacatctacgtggcgctcatcaacgagggggagattgcgttcggttccgccgccgccgcaccgaatgcacctttcgaggttgtgcttgtgaggtccgtgacgagccaacccgacaccgtttcggttcttcaggttagcaagcctatcgttgcacctggcgttgaatctgcggcagcagcagcgacatctgctacggtgccacttgcaacaaccgccgccgacggtgccggtgataacattgcacagtcaccttctgctttggcaccaggtcccagcagcgatgcttcccgcgtctacatgggactctttggtgctgcttccgccatcgcttccctcgtgatgctcgctctctaaatgacgagaaaattaattaagataaacaatgctgttaattatcacggatgaggagatgttaattattgcgaaaacgcttgtttatgatgatgttagtctgttgatgggattcgttctttgatctgattgaatattctttctatgtttctaacttctaactctctctgtctctatctatcgtatcaccctgttttacttcaacgcgaaagagataataaaagttgttt

SEQ ID NO: 16010 - DNA, 462 bp, Glycine max
  Clone ID: PAT_MRT3847_114463C.1
ccacttttaccctctccacgcataacaacactgacacatttttcacctcctcctcaaaaaaacgtttcactgacacaagcacacgggcaatgtctcactatatagagccactgatgaccacttcttcatagttcagagagcctttctccataattaagaaaaacgctgtccttttgtgtccttttttcttcctctgtcctcgcacacatgggtcgccattcctgttgtttaaagcaaaaattaaggaaaggtttatggtcccccgaagaagatgagaagcttttcaactacataaccagatttggcgttggctgctggagttccgtccccaaacaagccggactccaaaggtgtggaaagagttgcagattgagatggataaactacttgaggcctgatttgaagagaggaatcatctctcctctcttctcattactaatcattagtcttcatgaagtctag

SEQ ID NO: 16011 - DNA, 1040 bp, Glycine max
  unsure (1)..(1040): unsure at all n locations
  Clone ID: PAT_MRT3847_114464C.1
caggtgttgtgaaaaccaccgctaattcaaagcaaaaatgggaaaggaaaagactcacatcaacatcgtcgtaatcggacacgtagattccggcaagtccaccacaaccggccacctgatctacaaatgtggtggaatcgacaagcgaaccatcgaaaagtttgagaaggaggctgctgagatgggaaagggctccttcaagtacgcctgggtcttagacaaactgaaagctgagcgtgagcgtggtatcactattgacatctccctgtggaaattcgagaccagcaaatactatgtgaccatcattgatgccccaggacacagagacttcatcaaaaacatgattacaggcacatcccaggctgactgtgctgtcctgattgttgctgctggtgttggtgaatttgaagctggtatctccaagaacgggcagacccgcgagcatgctcttctggcttacaccctgggtgtgaaacagctgattgttggtgtcaacaaaatggattccaccgagccaccatacagtcagaagagatacgaggaaatcgttaaggaagtcagcacctacattaagaaaattggctacaaccctgacacagtagcatttgtgccaatttctggttggaatggtgacaacatgctggagccaagtgctaatatgccttggttcaagggatggaaagtcacccgcaaagatggcagtgccagtggcaccacgctgctggaagctttggattgtatcctaccaccaactcgtccaactgacaagcctctgcgactgcccctccaggatgtctataaaattggaggcattggcactgtccctgtgggccgagtggagactggtgttctcaagcctggcatggtggttacctttgctccagtcaatgtaacaactgaagtcaagtctgttgaaatgcaccatgaagctntgagtgaagctcttcctggggacaatgtgggcttcaatgtanagaacgtgtcggtcaaagatgttagacgaggcaatgttgctggtgacagcananaccacccatctc

SEQ ID NO: 16012 - DNA, 281 bp, Glycine max
  Clone ID: PAT_MRT3847_114465C.1
tacaacagaggggtttctttataataggagatcgttattttcccagagagaaagcttatctagatagtacataatcttaaaccggacatgcaggtcattttatctggttatggcggttgtaccattagcatatatggttactgttgcttatcatgtctggtcgaggcataaaactggtgcagagcctttctacaccaccatctggatcaaagctcatgcacgacgctcttgggtgccctgcctgtcgtaggacattgaaaagatgaacattttggtagcac

SEQ ID NO: 16013 - DNA, 355 bp, Glycine max
  Clone ID: PAT_MRT3847_114466C.1
gggggccacattttatgtatataccgtgagacctactggacgcactgtaactctctgaccgttctttccattttattggaacagtgttggtataaacgtcatgcgtttagaaccattcattctatttcattttcgatattcaattcttttacttctactatgcatgacgataaggttttagatgatacccttcagaacatactgatgctttttatcaatggtcgttaccttttcaccaactataccgttgtctggaaaaaaattcgcttggaacatgatgatttggtggttcccattaccctctttttggagatttctctcttgaatgaaatgcatctcattatcattgtttggt

SEQ ID NO: 16014 - DNA, 268 bp, Glycine max
  Clone ID: PAT_MRT3847_114467C.1
accggtcctgaattcccgtctgcgacccacgcgtccgaattcgagcggccgcttttttttttttttttttttttttatttttaactgaagaccttcaggtttgttttttaaacatcgatggttttctcacaatcacaaatctagtctccaaatttggttatttcataggtgtgtactgttaactttcctgtttctttcatattcaatctcaattctagtttatctttaatctcttactcgtatacatacttttatgtatacttcttat

SEQ ID NO: 16015 - DNA, 798 bp, Glycine max
  Clone ID: PAT_MRT3847_114468C.1
tgcagaataaaggttagtaagcaaatttgctggcctcgtaatgaaaccgaaacatcactgcgcagcgcaaattggaagttaatggcaatcatgaaacccctgtgccatataaaatcatctctggaaacacatgtatggtgaacaggaatccagctgatctcaccataccagaaacagggaatatctatatgatcagaggagaagatctgaaattcgagaagagttttcccaaaaacaagcctcgtttccccattccatatggatccaagcagcagaagaatttgaagggaactaaaatgaaagaacattcaaaacattgaaacccggcattattccataaactggtgaagtcttcacatggaacttgagaatggaaggtgactttcattctcagcgtagaaacaaacttttgacttggaaactgaaatttgttgactcggggaagggttgatcggatgtcatttcgaaaaccgagtgatacataaatcagtcacagaaggccatcgtgcatttatttaatgaatctgttgtaattagtattaatgtgagcaagaaaaatgttgttcgtctatcatgttggtgtcgtaaaatttatggggaagcatcgcgatagctccttaaagtatcatcagtttgtttcataaaagtttacggggaagtctcaaaatagccccgtatagacttactataatactacttggttacaattcatacaagtgccaaaaccaaggtgaaaaatatagtttgtggcttaaaaaaaaaaaaaaaaaaactcgagactagttctctctctctctc

SEQ ID NO: 16016 - DNA, 209 bp, Glycine max
  Clone ID: PAT_MRT3847_114469C.1
gacatagcaaaggctacaaagcaggaatcacaagaggtgaaagaggaattaggtggacaacaccgggatgccgagctttgataattgagatgtttgagtcacttggaagctgttaattaggccagagtagtggtctaaatcgggcagaaatagatgggtgtggagatgtgatatggcagtatctggctgtgggtgatgaaggggttggg

SEQ ID NO: 16017 - DNA, 394 bp, Glycine max
  Clone ID: PAT_MRT3847_11446C.1
ggggcccgaaaaggcccttttaaaaaaataaggggtttttcacaggggaatcccccttcccccccagggcaaagttttgggacccctttgggaaatcggcccctttcaagtttaaatttcaactccttttcccagcccttgtttgcctcagtttggaggcggtacctcccccaatggggccaaaattccttccaccccacccaagtttttgaaaactttttttttaacaaggcctttttcataggggggggaaacaaagcccctcactttttttttggggacttggggacagaaacccctttggttgcataaacaagtcccttaaaaaaatttttcttaggccgggcaacctttttgttgggaccaaaaagggggactttttaaaaggccttta

SEQ ID NO: 16018 - DNA, 365 bp, Glycine max
  Clone ID: PAT_MRT3847_114470C.1
ccacacgtcctcccacgcgtgggaatttttaagccttcagggggattcatcaacacagagagaaacacaatattggtttcaattcccaaaagcataaacgaaaaaaaaaattcgaaatcaaagcattaagaacacgcattctttacttccaattcccagttcttctggctgccctagattaaggcccctgaattattgcactccaccagcactgtgcatggatctggccaaattgctaccagtatcggtgtggtgcggtgcactaagtggatgcttgggatgatatgaccctcggcgactacctcgaggccctcgacgacgattgctacagtggcgagaccccggacactgactaggactactac

SEQ ID NO: 16019 - DNA, 259 bp, Glycine max
  Clone ID: PAT_MRT3847_114471C.1
attagtaaataaattactattaagaataaaacttatgcacactgaaaaattatctgactacatgcacataaacaaccgtcgcaaaggagacccagactatttctgtcacttactcacacgtacgaaggcaaatggtcaatgacaaggatataattggaatgctataaacgctgcgacttaatcagcgccaacaatgcgcctatttacgcgtgcaaatactccagatctacatgctcctgttagagaatacttaaacctc

SEQ ID NO: 16020 - DNA, 373 bp, Glycine max
  unsure (1)..(373): unsure at all n locations
  Clone ID: PAT_MRT3847_114472C.1
acctaaatacaacatgaagtnggaaccccgggggggagtttttagaattgtttaccctcaaccgcccaagacgcacggcaacttcgacagaaagctctttctcctgttggaaggaagcatacacctgacgcaccgaccatgctgcacaacgaaaagacccattcgatgcctaaggtgaataatggtccagattcaacccaccctactgagcggctcatgctcagatggaaacaaatttgtttaagtggatgctcaattatgccgaaacccctaaaggttgcatgttggatcttaaaggctaacacccaagaacattacacatcaaactctcagatggaggaaccattctgcgtagtgatctattggcaaattt

SEQ ID NO: 16021 - DNA, 236 bp, Glycine max
  Clone ID: PAT_MRT3847_114473C.1
ctttattcagaatgtagtgtgtttatttcttgagtgcaaccgaagtcgactgaaagcctagacgaaatttagctgcaatgtcgagttcgaattctgaagttgcaacattggagactattctaggcaagcaccacccccgacgaaaggattaatctcgggcatatacaaaaacactaagatcatgacttgtgcatcacatttcgacgtgtttcatactacatatgtggaagaattgc

SEQ ID NO: 16022 - DNA, 265 bp, Glycine max
  unsure (1)..(265): unsure at all n locations
  Clone ID: PAT_MRT3847_114474C.1
gagtntcnntnnctccgnttnctgttggttgtnctctcaagtntcanctcccaccccccctctttgacttttctntcagaagagcttgttggagttgaaanctgagaagaanacntggcagcncnagggcctgtggtagtngcntcncttctaattttntgtttagctggnagttgctntgggaaggttcacttctcttccttganangnacccttgatgtcnctgcttcccccaagcnggaacangttctggnggctggnttag

SEQ ID NO: 16023 - DNA, 442 bp, Glycine max
  unsure (1)..(442): unsure at all n locations
  Clone ID: PAT_MRT3847_114475C.1
nnttntttttttttttttttttacagattttctctaccactccgatgaagggtttttctaaaataatcttcattatttccttctgggcttcctaaactcaactcaaaactaccatcatccaaatcagaactgcaaaagtttgctccagctatttctgatttaggatgcttcttcccacttttcaaacccagtgaaggcacaaattttttgtctggggatccaaaaattttcgaagagccacctctttgtgaagcctctgtcaatgctaatgcaatcttatgagcaacatcattagtatcaaccatttgtttggagccctgcctggcagaagaaaaaaacctatccccattatctttaccaatagaatatgaaatagggacccgggggagcccttttttcaacagcatgaggccttattccaaaatgtgttttttttaacaat

SEQ ID NO: 16024 - DNA, 680 bp, Glycine max
  Clone ID: PAT_MRT3847_114476C.1
ccctctctgttcgcactctgtctttcccctgtttccgcgtcactgagtcatggcgattcgcaactcgctcaccggccaattcctccgccgcagctccgtcgccggagcaaggctcatgtcttcttcgtcctcatggttccggagcatcgagcccgctcccaaggatcctatcctcggagtcactgaagctttcctcgccgatcagagtccaaacaaagtcaacgtcggagtgggagtatcttcccatgggtggaagcataaaaatgatagaagaatcgctgaagctggcatttggagacaactctgagttcatcaaggataaaagaatagctgcagtgcaggctttatctgggactggtgcatgtcgactttttgctgcatttcaacagagatttcatcctaatacccaaatctatataccagtgcctacctgggccaaccaccataacatttggagagatgctggagtgcctatgaagacattccgttactatcaccctgagtctagaggattggatttttcaggactgatggatgacataaagaatgctccagatggttccttctttctgcttcatgcttgtgctcataaacctactggagtagatcctttcgaagaacaatggagagagaactcttcccagataaagggtaagggtcatttccctttcttttgacat

SEQ ID NO: 16025 - DNA, 1852 bp, Glycine max
  Clone ID: PAT_MRT3847_114477C.1
aattcggcacacgctctctccctctctgttcgcactctgtctttcccctgtttccgcgtcactgagtcatggcgattcgcaactcgctcaccggccaattcctccgccgcagctccgtcgccggagcaaggctcatgtcttcttcgtcctcatggttccggagcatcgagcccgctcccaaggatcctatcctcggagtcactgaagctttcctcgccgatcagagtccaaacaaagtcaacgtcggagtgggtgcgtatcgcgatgaccacggaaaacctgtggttttggaatgtgttagagaagcagagaggagggttgccggaagtcaattcatggagtatcttcccatgggtggaagcataaaaatgatagaagaatcgctgaagctggcatttggagacaactctgagttcatcaaggataaaagaatagctgcagtgcaggctttatctgggactggtgcatgtcgactttttgctgcatttcaacagagatttcatcctaatacccaaatctatataccagtgcctacctgggccaaccaccataacatttggagagatgctggagtgcctatgaagacattccgttactatcaccctgagtctagaggattggatttttcaggactgatggatgacataaagaatgctccagatggttccttctttctgcttcatgcttgtgctcataatcctactggagtagatccttcagaagaacaatggagagagatctcttcccagataaaggctaagggtcatttccctttctttgacatggcatatcaaggttttgctagtggtgatccagagagagatgcaaaagccataaagatttttcttgaggatggtcatttaataggacttgctcagtcatatgcaaaaaatatgggactgtatggccagcgagcaggaagcctgagtgtgctttgtgaagatgagaaacaagctgtggctgtaaaaagtcagttgcagctgattgctagacccatgtacagtaacccacctctccatggagcacttatagtttctactgtccttggtgatccagatttgaagaagttatggcttaaagaagtcaaggttatggcagaccgcatcatcggaatgaggactacactacgagaaaacttagaaaagaaggggtctactttgccatggcagcatataactaatcagattggtatgttctgctacagtggattgacacctgaacaggttgatcgtatgacaaacgagtttcatatttacatgacccgtaacggtcgtatcagtatggctggtcttaatacgggcaacgttggatatgttgctgacgctatccatgaggttacaaaatcattctagattattcaatcacccaacaggtgaccaaatttttgtctttggagacaaacatctcagaagtagtacccttatccaggggagcaaaataaatttaataaagtctgacaaattttcaacttgtttcggggtaagatagtgatactcttcagggtttaccttgcatattgaagacccttattgcaatacgtatccgatttatcatatccatgcaccatagattatatccatttttacagacatcttgtttagcactttaatgagcataaccctgtatcatcattttttttataaaataatttgagtagtagattgaataagggctttatttatggtgaacaggaagtacgtagcttcattcttactacactattattcctgttagtgaaactttgcgattgttgaagctaaaaaaaatatttaaaaaataatttctttaaaaacacccgtaaaaaaaaaaaaaaaaaaaaaaaaaaaaaaaaaaaaaaaaaaaaaaaacaaag

SEQ ID NO: 16026 - DNA, 370 bp, Glycine max
  unsure (1)..(370): unsure at all n locations
  Clone ID: PAT_MRT3847_114478C.1
ggcccccccacacggtgccagggggcccacaacacccccctttttcaaagcgggggtccccccgccgtttttttggggggcgccgtttaacaaacccgatataagggccccttttttttttccccatggggggaggggcccccccccctctaaggttctcgcattggcccccgccctcccggggggttcttccctcctgctccgggcaggcctccccttgggtgaatctcccccgggggggggggagaccccccctttttttattatttaccccccgggttttttcccccccacgttcatttttggcctgcccgcggccgtttttcctgggtggggtttttgggacccaacggcnctcgcccctttctgg

SEQ ID NO: 16027 - DNA, 1048 bp, Glycine max
  Clone ID: PAT_MRT3847_114479C.1
gtccagtgggcctccctcattcaggctctcgcctccaacaaaacgggcccaccgggcccacaccttcgtataaccgcattgtcccgcaccggctccggacgccgctccatcgccaccgtccaagaaaccgggcgccgcttagccgccttcgccgcctcccttggccaaccgttctccttccaccattgcaggttggagcccgacgaaacgtttaaaccttcgtcgcttaagctggttcgcggagaggctttggtttttaactgtatgctaaacttaccgcaccttagttaccgcgcgcccgaatcggttgcgtcgtttttgagcggagccaaagcgttgaagccgaggctggtgactttagtggaggaggaagtggcctccattgttggagggttcgtggcgcggtttatggattcgctgcatcactattcagcggtgtttgactcgctggaggctgggtttccgatgcagggccgggccagggcacttgtggagcgggttttcttgggcccgaggatagtgggctcgctggcccggatgggggaagaggaggaaagagggtcgtggggggagtggttgggtgcggcggggttcaggggagttccgatgagcttcgcgaatcattgccaagcgaagctgttaattggtcttttcaacgacgggtatagggtggaggagttggggagtaataagttggtcttggattggaaatctaggcgcttgctctctgcctcgctttggacttcttcctcccactcagattaattttcctttttaatttctttgactccataaatggaaacaaaatcagaaactgtatcttttacacttttagttgtacttcccatttatagtagttttagttttaggatctttgctaacacgacagtgacctacctagcagtcctagaaaaattccaacacttctcctaacatgttttctttctcacagatctttttctctctgatgaaatcttgatgaacttcattatatttacgataaattagtgaatgtttagaaattcagtacaaaatgatttctatcaaa

SEQ ID NO: 16028 - DNA, 306 bp, Glycine max
  unsure (1)..(306): unsure at all n locations
  Clone ID: PAT_MRT3847_11447C.1
aagaagcacaagggaatttgagcttgaatgatattaatatggggaaggctcancaattcaaacctctttaataagaccacatctatcaaatgatacatgaattgctacattactggtctattgagctatgctctctgattccaccactaactctttgaactcacattcatcaaacatttttattgttacttcacattcttactctgctaatttaatcaactcattctcttagacaatttcagtctctattattattaaatgctttaagttctagactatactatactatactatttctatcttcta

SEQ ID NO: 16029 - DNA, 138 bp, Glycine max
  Clone ID: PAT_MRT3847_114480C.1
tacgctctcccgcgcctcggcccattgtcctgcgcgtgtcgcgattgtgacaagcgggacgtgtggcttgtctcccctagcacccatgcgactggcgctgacgatgtggccccgcctaacagccacacagtcgcgtag

SEQ ID NO: 16030 - DNA, 313 bp, Glycine max
  Clone ID: PAT_MRT3847_114481C.1
gcaatacaccaaccctcaacagatcccacagatcgagccattttaaaaacatcaccgggatttcaaacccgcggggcattctatccgcaaggacagcctaggctcaacatcatagtgagaaattgggccttgcttacagagtattgagcactcacggtgcttccactgatagtacccgacagggcgacaccaccacctccttcgccagagaaaacccaaaagaaagcccttaaagttgacgacaggatatatactaacttacatcggcatggagatccagaacataaagaggccatgaatcgaagggattggc

SEQ ID NO: 16031 - DNA, 306 bp, Glycine max
  Clone ID: PAT_MRT3847_114482C.1
cccaaacctttttgaacccatcatacattgaacagctttcaattgaaggcggaagaaatataccttggagatattgggttaaatgcaatgtaaccccaataatgcaaactgaatcaaaggcatgcaccttctcttggttgttgggaccacaagataacaagcttggcaattgagggaaaacggacctggccaaacaaaaatatctccacatttctatggccctattaataaaaacttcagggagggccaaaggcttgaaaaaccctggttcaccaggaattctggcttaagcaaatggcaagttga

SEQ ID NO: 16032 - DNA, 405 bp, Glycine max
  Clone ID: PAT_MRT3847_114483C.1
agagggggagctgatcaatagagactcgatgccagccctgctgctgattgggactaagatatgggggctctgcagacactatgaaatagaagattctatggctgtcatgaaggagaggatggattgcgggctgactgctaataggcatatatctacaagccctgatagatgcatatttcaaggatagggaaagacacagtatcagcaaagctattacacgatatgcatgatggagcatatcacgatcacagcggtgacatcatgtgcactaatagccgagtcatgcacaatggggatagttccacaggctgaagcatactttgaccacatgactagaaatggctaggagcctaatattatgatctacactgatatgatagatagcctatgcaaaggcgatgagcc

SEQ ID NO: 16033 - DNA, 410 bp, Glycine max
  Clone ID: PAT_MRT3847_114484C.1
gctttagtcacggggtttgaaaaatctgacacgtaccggctactattgggagatcaattgcgtcacgggatggacagcccccccaatgcaggacgcacacgttacaaatgattggcttatccactctcaggaatgtggccccacaacctactgtgtgataaatgcacaaaagccatatgtgaacaataggtggatggggaaactgactctgccccatggcactttcaaacgggtgaaaagaatgcctattgctatcactggaggatctggtgcaaaacatgctatgctgacgaatataccaaatgctcgttctttcactgtggagatatcactgaggcgaactggcgttcaaagtggctaatatgactaaaacactacattcaatggaccaaatgtttgctcatagcatt

SEQ ID NO: 16034 - DNA, 295 bp, Glycine max
  Clone ID: PAT_MRT3847_114485C.1
ggatttcgagaacggttacagaggaattaacctgatggttagcatacttatcttctttcctctagcgaggaatgcgaaccctaatacggctatggaccctgcggatcctctgactgcacacagtcttgtggagcttaccctgcactattacatcacatgtatgcatatctctctgagcacacttacttatatccttaattgcttgatgagccgtcttcttaaatgcgcatccatgcaagcgtatgtggaggttgattgacgtctctagagtgacaacctccttcttcctaccatt

SEQ ID NO: 16035 - DNA, 359 bp, Glycine max
  unsure (1)..(359): unsure at all n locations
  Clone ID: PAT_MRT3847_114486C.1
tatctatccctctctttaaaattagattctttcttccttgatctacnttacacttggagtnacctnatctgtatggatgtcaaccanatctacactccnnnattttttttcnccttntctttcataaatctnatncatttattctcaaatctactttacaaaatttttctattcattttcctctctttttttcaatcttttttctaaaaaatccttttttctttcatttcccattnctctttacctattttttttttcatatactctatataatccattaaaataactcaaatccaccctctttccctttttctatcccttcacactcttttatctcattattcatcatttatttataa

SEQ ID NO: 16036 - DNA, 499 bp, Glycine max
  Clone ID: PAT_MRT3847_114487C.1
aaaaaaaaaaaaatcccttgggggaaaaaaaaaaaaagggggggggggggaataaaggaaaacttaatggtcggaaacaaaaaggggaccaccccaaaaagcccgttggggccgggcccaaaaggggaaaaaaccaaaggggattttggcaaaggccccgcctttgggttggggttttccgcgggggggtttttttggggaaaataaaaccccaaacccccttccccggggaaagaatttccttcccgggggggccccccgctccctctttatccggtggggaaacttcctaggagaaatttgggccccccttttgcgggggggtttctccaccccccccctttgggcccccatgggagaaattggccccctcatcaaactctttctttttgttaaaaaaaaaaagaaaaaggggggaaccggggggtccccccttccccccctggttggggccccccaaaagggggtccttttaaaaaccttggggggggcccatggt

SEQ ID NO: 16037 - DNA, 604 bp, Glycine max
  Clone ID: PAT_MRT3847_114488C.1
acttctacaaccattcaattcagtttgtctcaactatttgacgattcagttcagttcggcgaactgcaaatgttttacagttcgtcacaattcagttcgaattgaacagccctagctccacctttgtcaaaccaccctaaactactttatggcatttgccaaaacttttcagaacaactttgaaataaattaaaaacaaatgaggaaaatgtttttaattttaaaagctggaaaaaaaaatagaagactcaacaatcaaaattccttttctgctatagcagttttcctctcctatccgtaacaacggggaatgcaactactgtaccaccctttgtttttcaccagcatcctcccgctcaacctaaacaagtacccttgtcttctttgatttaaaatcaaggccattcttctcaagtttctttgaagataaagccattttcctttttgctctactcctatcgatggcttcttcctcttcatcatcagggcttccagcattttcatcattgtcataatcaccctgagacttaagagttgcaaaaccaccaaaatcctccatgtcttcttcctcttcaagttcatcataaccttctacatattctac

SEQ ID NO: 16038 - DNA, 611 bp, Glycine max
  Clone ID: PAT_MRT3847_114489C.1
tttttccctgttatatcaatcacttctttacacactctcacatacatggacctaaccaacgacacaaattctcaaacccctccacaacccaacaccaccacaaacggttccctcaagcaccaccaccaccacccaaccaccgtgtcaccgccgcaacagccaccctccacgacggttttctacaaagagtgcctcaaaaaccatgcagccagcataggtggtcacgcgcttgatgggtgcggtgaattcatgccctcttcttcatccaaccccaatgaaccgcgctcgctaacgtgcgccgcgtgcggatgccaccgtaacttccaccgccgccgcgacacacaggaaaatcatcaccgctccaactccaggcccaatttcataagcttctaccactctccgccgctgtctcgtcacgggccgggcctgagcccaactccaagcccgatgtcgagcccaagcccgagccccccgccaatctcgcatcatttcccaccttcctcccaccatttccaaggtccaataccggcccacgggcttttgggccttggaaatgaaaatcaccatcatcacatgagttttaattttaactcttcttcccactccaccca

SEQ ID NO: 16039 - DNA, 490 bp, Glycine max
  Clone ID: PAT_MRT3847_11448C.1
aattcggctcgagcgacagaagggtccaccccaaagattgacgaggtttacctatttaaatttttttaaaatcttttatttattaaatgcctattttgaagttgtgaaattatgtctagatctatgaaagccaaatactcaaattggcaaagtatagtgtcaaatgcatgtctaacaacgatatgcatataatatgccaatttagtttatttttaattttttttaccaacttttgggatacatactcaggtacggtctgagatatgatggcactttgatattttcaattgaaatgattgtgttgtagtgttaacccaaagtttctgttaccattttgcccatagcactgtcacagtaaaatgggaatgggctagggctcgctggtttctcacatctggatgttgcacattgcttctatacttccaatcatgcatcacaatatcaataatcttgaaagtccttgagccttgcacatagcatctgtttacac

SEQ ID NO: 16040 - DNA, 298 bp, Glycine max
  Clone ID: PAT_MRT3847_114490C.1
aattcggctcgagctacttatacttacctgtggtctcaaaccttatcccttatcctcccaaaaccaaagcatgtatacctacgcggcttttctaagcactcccaaccctcactctccagaactcgacaacctttctgctctaccgaatgcttttacttgtacgtctcccttacccctaacgccaaacccatttgcattaccgtcgtttttctcacaacaacgctgacgattgcgtctgcagggccgatgcacactcggttcgatgcccacgtgtctgagctggaacaggatgaggaca

SEQ ID NO: 16041 - DNA, 486 bp, Glycine max
  unsure (1)..(486): unsure at all n locations
  Clone ID: PAT_MRT3847_114491C.1
gtccggnattcccgggtcgacccacgcgtccggggagacctaacctatatctcttcatttcacccttttagcttttgcacaatgcttgaccctttcttgaatcgtacttaatcgcgagaagggggtataggtgaagttgattggccacccattaattgcaggtctgaatgatctgcaggattctaaagtagggaagaaaaagtagcctgttaacaagtaccttttggacgaagatgctctccattacaccattgaagacgtgcgaccacaccgcggaattaataagttcacatctgctgcttactccaactgcatccgcaagccatgctgacatttcctcagctgtgtcacgacatacaccccgctgtcttgcatctgctatattattctagtctctactttccccttttgttgttatcttccttgccctttatgtgatctctacctatacagcaagactttacttatttttgaaggacgattggt

SEQ ID NO: 16042 - DNA, 443 bp, Glycine max
  unsure (1)..(443): unsure at all n locations
  Clone ID: PAT_MRT3847_114492C.1
attccgttccaggaaggtttcccgtcatcactgtatgacgtcctccttctttggggggggggggggggcgttaaaaaaagcgtgttggttagactaaagcggagcgataagaattaaggtgttacgttacacgttacttgtggaaagtgatcttaataaaagtggttaaaggtggcctcattaagtcacacaagttcgtattcctctccacaactcaacgggttcctcaggtaaaattgcgaacacacacaccccgaaataaagaagaataaggtagacagtgtaggtggtggtggtagtggggcatagcaggcaaacatcatgtccgtgtccggtcaatgtccagtggtgttagcggcacgtcatcaaccatcaagtagcgtancgcccatgtcgggtatttatgtcttggtcatcttattcaggtgtatactcacggtggt

SEQ ID NO: 16043 - DNA, 553 bp, Glycine max
  Clone ID: PAT_MRT3847_114493C.1
gaaatctagttttatttttcttcatgtgagcaccatgaaaattttagcattaaatattcacctaacagaggatgccctatgaaagagagatgaatgcggatctgatgaggccgtcctgactgaatcttaacctgacaaacaaggcaatcagggatgttaagattctggatttctaattttatggtagcctttttctttcttttgttgcttcttaaaagggattcataacaagatgcacacaagcaaaacttagggtaaccaataggttacatgttaaaataagagcaaacaattttagaatgactaatccaagagtgcggtttgatgcgacatcaatgaatattgaacaatatctgagaacagagcagtgctgcaattttttttaattaaacccataataatgcatagtatttttcacccaaattgtacagatttagtttccttatttcttgtaattaggattatttttcattgtttatgtatttcctgtaatatgtacagatttctagcctaaaattattaggatgcgttttatccaatgaatacattgtac

SEQ ID NO: 16044 - DNA, 236 bp, Glycine max
  Clone ID: PAT_MRT3847_114494C.1
agagtgatataaccgaggagatgatggtgggtataatatctcggacaacagaattgtcgtaatgcgtatgacacggcgcatcgaatcaagggcatagtgccttggcctactctggatggaatacgggggcctctggataggatttataacctattacacaactgaatgatagcataggggataaacaacctgtaaaaattggatagggcacgatttcccgtgcaggaacaatgcaa

SEQ ID NO: 16045 - DNA, 148 bp, Glycine max
  unsure (1)..(148): unsure at all n locations
  Clone ID: PAT_MRT3847_114495C.1
ctaaccaggggcggggggggaactaaccactgtnccctccaacaaacaatggttcacttgttacaccaaaagggaaatgggtctactgataaccattctccctctacctgatacggtacttatttttctcgtacttaaatattgggag

SEQ ID NO: 16046 - DNA, 394 bp, Glycine max
  Clone ID: PAT_MRT3847_114496C.1
cagtggtgaaccttgcactggatcacttaccatgcatatacactacctgcatatctgcattcccactaaacaggatatactatatcatccattcaccactacatcttttctaagacgtacatactttgatgaacgaaacctttccttggttgcttttaactgagaccctgcgaacgaactgaaacgctccataaaggctctctaaggaaccactgttggcaaattctttgaacttgaaaccctcttaactcgaaggtttaatggaaatgtgctgaatcagaactggctcattgctgatagaacacgacctacacgggtagttttggataaacggttgttataacaaccgaacctaatttccatgcctttttgagggctctatgggaccagcctc

SEQ ID NO: 16047 - DNA, 776 bp, Glycine max
  Clone ID: PAT_MRT3847_114497C.1
gcagcgatagtacccttgaagatcagaagcgtgggtggatttcctccaagtcgttgctgttctcacttgtctccaattgcaatcggctacaactatggagccccataaggcctttaatttgcaggtttggcccatgaacttctttgcttttgctaattagttgagaactgtgctccccaatttaacatggcatctatgagagaattttccagagtcatactatctcacttaaaaaaaccccatgcttctccatctcaacttctcttcctccgaacaatgacttccaaggtttttgttaaaggtctagcattttctacgacagaggaggaattagccaaagctttttctcaatacggcagtgtcctgaaggctaatataatactgaataaagccaagaatagatccaaaggttttggatatgtgacttttgctaaagaggaagaagcatgcaaggcacagattgacatgaacggaaagatattacatggacgagttatatatgtagacgtgcaattgcctaacaagtgatggttgcggctcaatgaagatttgcacaagtattaaacaatcatagccttgatatataaggagggaaggagccacatctactccaagcgcttcttgataataatggtcattttgttttcactgtaaaacgttaattaaacggtcacaccaatcaacaactacttgttgcaaaaactatccagttgttatctatatactatatctctttggaattcatactcatttttgcttttgaaaaaaaaaaaaaa

SEQ ID NO: 16048 - DNA, 493 bp, Glycine max
  Clone ID: PAT_MRT3847_114498C.1
ggtgctgaacactacaacatgcacacaatggttcaggataatggcttagatggacagggaagctaaattgtgtttagggagttaccttaaagcatgttccttgtttatcgattatgctaaatacctgctaagcagttgaaaaatgatctatcagaccaaaaaaaaattgttattacacctacgcctaataaaaacagttggaatgatgctaacggtgtcgggaggaaaggaaaccctttaagaaatgtggaaaataggaaggaggaatatgaccggccactggcacgtatctttagtagctctagaagctttgaatcaggtgatacctcattcgaggctccaattgatgggacatattctttttctcacccggatgagaatgaaactaacaagatccccatggctgattcaaaaagatatatctgtaccagagatagttgattgactccagttgtcttactcagtgatagggaaaaggatcagtgtgatccag

SEQ ID NO: 16049 - DNA, 281 bp, Glycine max
  Clone ID: PAT_MRT3847_114499C.1
tgatttaccatttaccacaccaaaaccaatcggatcgtttcctctgcggagtcagaaatccatggatccctacaagaatcggccatcaagcgccttcaattctcccttctggactactaattccggtgctcccatctggaacaacaactcatcgctgactgttggatctagaggtacggtatggtattcaatattattttctctacttcatgatcacattttttcatccagatgactctaacccaagactttacttaacaacttaagtcaggaccactcgg

SEQ ID NO: 16050 - DNA, 1420 bp, Glycine max
  Clone ID: PAT_MRT3847_1144C.1
ccacgcgtccgcatttgtttccctatccgtgctttccttcatcttcttggcctgtttcttcgtcccctcttctccaacaagtaccgcacagggtaagtattttaatctctgattggaaccgtgcctaatctcctcaacttccaaccttcgacctaggacactccgaaatttcaaattggggtttaaacaaaagcttcggcaaaactctgctgggttggcattaagagcttctcgcgtcagaaataactaaggctgtgtgaatatgggtgtcgaggagcaaggcgaggaaattaatgtacagtctatgatagagcagctctctcaggcatttcttgaattggaagctcagaagggggagactgagaataagattcagtgggttgaaattaagcaacatttccatgaccttgagacggagttgaataagaaacttgaagagctggaagctaaggagagggagtacgaagcgaaacaagtagaagtggatacactactcgcagaaaggaagactgtgattgcttctaaagagcaagacctcttagatcggttgcaggagcttaaagatgctgctgtagcttccattgtagaggctcatgcaaatcaccggaatgccactctggagtctgtgtatgatgggaagaacaaagatcacaaggtaagcagctctcttggcgatacaaattcctcagaggacgattttcctcataagtcagatgaaaagtctaaaggtgtggctgttgagggcaggccacatccagagctgacacaattttgtgagcaaatggatgcaaaaggtcttctgaattatattatggagaataaaaaaaaactgtctgttaattgtgaagaaatttctggagcattacaaagtgcaactaatcaattacgtttggggctggatttactggaggggttttaccccaccaatgaaacttcccaactaaaagataaatctggtgcttccctacagggcatgcgcaaatcctgtattataattttggaagccatggccaccttattggcaagggctgatccaggtgcagatcaccttctgaaccctcaaaccaagcagcatgccaaagcaattgctgatgagtggaggcccaacttagctagagcagatactgatgctgccaatggaaattcattggaagcaaaggcattcttccagcttatttcaacttaagattgcttcagagtttgatgaagaagaactctgcaagcttgtacttgcagttgctcagcttaggcaggcacctgagctctgctgctctattgggttaattcacaaaatgccagctgttgtagaatcattaatcaatactgggaaacaaatagcagctgtacattttattcatgccttccagctccaagaaagcttccccccagtgccccttctgaaagcatacctcatttctcg

SEQ ID NO: 16051 - DNA, 154 bp, Glycine max
  Clone ID: PAT_MRT3847_114500C.1
tacctaagcctaacgctagaaccgaatcttctcatgaaacctcccacgcgacactcgagcggatgagagtcaggttcgattcccgaaccctctacaaatcgctatcatcacggtgcagtttcagcatggagggctctgcagaggatttcggagc

SEQ ID NO: 16052 - DNA, 413 bp, Glycine max
  Clone ID: PAT_MRT3847_114501C.1
gagcgggaaacaaaaagaggggggtaacccttccattggggcgtgcccgtgcccaatcgtgcttactggaattgacaaacaagttgagttccaatctggtccaaaaaaacaaaagatgcccaaggaaaaaaattttaccccattttactcaagttaaaaataaatctttttggggggttgggctgttcttttgaatttcaaaggagtaattgacctccaagttgctttttggatcggcggctaaaaacttggttcttgctagataggttcccctgacaaacttcccaaaagggattgttttttcttcccaattaaatgtttatggtccctggtaaggacttaaaatctccaacctctttttttttggtgccactttaaccccatttttcaaaaaaacgtttggtttttttaaa

SEQ ID NO: 16053 - DNA, 1317 bp, Glycine max
  Clone ID: PAT_MRT3847_114502C.1
tacttatagcaacatggtctgaaaactcaagatactctacttttactcggggcatagcagatgctgatacatgaaagcgaaacctagctatcatcatcatcacagaagaacaacaacagaggaaaaaagaaaaagaaaaatgttagaggtgaagagaatcggtgtggtggggagtggccaaatgggatcgggaatagcccaagtcgctgccatgcacggcatcgacgtttggcttcacgacctcgaccctcaagctctctccaaagcctcctcttccatctcttcctccatcaaccgtttcgtttccaaaaaccacatctctcaggttgcgggtgctgatgctttgaaacgactgcgtctcacgacggatttggaggatttacagctagcggatttgatcattgaggcgattgtggaatccgaagatgtgaaaaagagtttgtttgcgcaactcgataggattgccaagagttctgcgattttggcgtccaacaccagttccatttccgtcacgcgtctagccacctctaccagcaggccacgtcaggtgataggaatgcattttatgaacccacctcctgtgatgaaattgattgagattgtacgaggtgcagacacttctgaggagacattcgttgctacgaaagcattgtcagagaggcttggcaaggtagtgataacctcccatgattattcaggcttcatagtgaatcgaatccttatgcctatgataaatgaagcattttttgctctctacactggtgttgcaaccaaagaggatattgacacaggaatgaagctgggtactaaccatccaatgggtcctttagagcttgcagacttcattggattggatgtgtgcttgtcaataatgagagttcttcatgctggccttggtgacaacaaatatgcaccttgccctctacttgtgcagtatgttgatgctggaagacttggaagaaaacgaggtattggtgtgtatgaatatagtaaagatccaaggtctacaaaatcatcttcccgtctctaaaatgtttgtttcacttggaagaacaagttttcaacacccccattttaattaccttgtgtctgaccgtgggggtggtgcacacggctgaagttgaatacttgaatgtgtcttctatttcttttatgcatacaagcaaaaagaaaattgcaggaactaatagtaaaacatgcatagttaaatcttcatgcatagttaaaattattttattgtgtttgactggaaaattctaaacctattaacttttgtctatatttcccaagctgattccgatactaaatttttttcct

SEQ ID NO: 16054 - DNA, 384 bp, Glycine max
  Clone ID: PAT_MRT3847_114503C.1
gaagggtagggggtgtttatggaaagggacaaggaacggggaaacacagtcgagagctcgttgggagaagggacgcttggatccagcatcctatgctcacacaattaggttcggcacactgccagtggctattggcatctgcgtgatgctcctgctctaaaacatccaaggtcacaaacgctaccataggttactagagcccgagactattcgactaaacacaaacaatttgcagattattaataaccctgtgtatggagatactctagcttgtcataacttaattggcttgctagcattacgtctgaacttagcatgcgtaaaaagtaatacagcttgaaactaattctctaacattaaaatgacttgtctgaattgaaaata

SEQ ID NO: 16055 - DNA, 143 bp, Glycine max
  Clone ID: PAT_MRT3847_114504C.1
aaaagaaaagaaccatttagggagagggcagttccggaaaggggtgggataaatcccatttaaactccatcttgtgcggcaaaaagggctataaaatggggtctaactattcacactacgtttccgattgcgaacaaacaaat

SEQ ID NO: 16056 - DNA, 1370 bp, Glycine max
  Clone ID: PAT_MRT3847_114505C.1
cccacgcgtccagctttcccattcacacacactttctctctcttcttgttatatcaccccttgaagagacaacaaacatggacctaacctccatcagtacccacaacacaaacacaacacaaaccttagatgctgctaatactactactaaaaccaccccaccaacgccaatccccaccaccaccccaaagtctctatctttcgccaacggcacactcaagcgccatcccaccaccaccgttgctcagccgccgtccatggtggtttcctacaaagaatgcctcaaaaaccacgccgccagcatcggcggccatgctctcgacggctgcggcgagttcatgctgtcttcttccaccgtcccctccgacccccgctccctaaaatgcgccgcgtgcggctgccatcgcaacttccaccgccgcgaaccccaagaaaacaacctcaacaacaaccttaaaaacaacaaccccacatttttaaactgtatctataccctatcagcgccagcaccactctcacaccgagccatgagccaaagcacaccaccgagcctgagttcaagcccgagccacagccagagcccgatatctagcccatcaccttttaaactgcatctagtgtcccccatcagcgccagcaccactttcatgccgagccatgagccaaagcacatcaccgagcctgagttcaggcccgagccacagcccaagccaacaacaaagcccatcaccgccgccactctcgcacgtgccaccctaccacgcttcagcgccacacatgcttctagccctcggcactgcctattctcccgcaccctccgacgaacaccaccaccaccaacaacaacaacaaaaaagcttcaatttttcgatgatgaggagcgagaacgctagcaagaagaggtacaggaccaagttcagcaaggagcagaaggagaagatgcatggattctctgagaaattggggtggagaatgcagaaaggggatgatgggttggtccaagaattctgcaatgagattggggtctcaagaggggttttcaaagtgtggatgcataacaataagaacactcttaggaagaaacctgaagatggaattggaaatgcaaatgctcctcaaagtaataatgatgatggcaatgctaatggtggtagtggtggatttgatagtgatatcaacaacccctacaacccaaatagcaacaacaatgacaatgatattcacatgaatgaagaagatgggtgtgtcaacaatgttgttcatgtttctcttaatgagatgtcatcttagcttcttagccttttttttttggtcaataaattactttacttatttagatgggaaatgaagctggaagcagatgaatcatg

SEQ ID NO: 16057 - DNA, 260 bp, Glycine max
  Clone ID: PAT_MRT3847_114506C.1
attttaaaatttccactcaattatggcatgtcctccttgcttgatgatttgcaataactaagatagtgatggagatatttattgtgttaggtagcttaatagatatcacacctgttttttatgattactctcaacaattttagtatagcaacaatgtatttgactgtgaagaagtagtttgcacacaagtttttgttatgatgatgtaggaactggtgacaaataattcctattaggttggatttgggacattttggtct

SEQ ID NO: 16058 - DNA, 600 bp, Glycine max
  Clone ID: PAT_MRT3847_114507C.1
aaaaggaaaaacaaaattttttttcaaaaaacccaaaagggcacccccgcaaaagggggcccccccaaaaaatattttttacaaaaacccaaaaaaaaaccccaaaatcccccccccctcccaaaaacaaaggggggggcggggtttaaaataacaaaaaaggcaccgcccccccaggaaacccacaggaaaggttcaatcaaaaaacccccctcttaaaaaccccaccaggaaaaaaaaacaagacttttgggggggggtttttttttcccctgggggggcccccctttttttatttttcttcaaagggggaaaacccaaaaaaaaaaaaccccccccttttttaaattttcccggaccccttaataaacccaggaacaccgggttttcccttgggatttaaccccataggagggaaattaaaattagccccccagtccaaaaaatccccccgggcctaaaaactggggggaatcttaaaccccctttttttttcttttttttgggtaaaaatggaattaaccacccgcaaaaaggcggcaggggcccctaaccctggggggggaaaaaaaaccttaaaacctcactgggggggggggg

SEQ ID NO: 16059 - DNA, 544 bp, Glycine max
  Clone ID: PAT_MRT3847_114508C.1
aacaactttgaaacatattctaggaatagtgtcataacaggttcagattcagaacctatgctatgacaacacaaacagattggtcttataaatgcatgtctgacagtggtttgctcaatttcatccacaccaaggttggtgctgccgccatggcagctatttgacaatactagaacactcaacagcccactctatctcccttttctttattaattaattttaaagaaatgtatgatataacaaatattgttagcacgcaaatccaatccttgaaggttttttggccttctattttacgaatgtaaagagataacatagaaagtgggatacgaagatacaggagagggtgaaacataattaacaaaatttaaaccgaaagaaaatactccgctcatgcactgactgcatgtttggattaggttaactttggagtcaaatacacacacacaactaacttgagcttttgagggagaaaaaattatttcctcagaaacaattgttttctagcatgagatagttttttttctcacatatttgtgtgatt

SEQ ID NO: 16060 - DNA, 412 bp, Glycine max
  Clone ID: PAT_MRT3847_114509C.1
accactttttcggacacactcttttattggatgtaattcatgtaagtccttctaaatatgcgagtttcattccacatttggtgggtttcatgtaagttcttttattggatgtaattctagtgtagtgagacacatgaatttcaatcaacaaggagaaaaatatgttggaaggaaagtgttagattgagtgttactagcactcctatgtgattcatttatgcaatcttcataatcataatcagaatgatgtgctgttctaattagttaatttgttttgtgttgttccctttgatcaatgtagtgctagagattcccaagagtatgtactattattattttcaattatcaaaagatgatgggatttaaatgaattatgataatgacttatcagcaaatgatatacattattctt

SEQ ID NO: 16061 - DNA, 674 bp, Glycine max
  unsure (1)..(674): unsure at all n locations
  Clone ID: PAT_MRT3847_11450C.1
ctgactgtaaatttatacaccattcgnannccncnnnnnnnnttnnnnnnnnnnnnnnnngnggnnnnnnnnnnnnnnnnnnnnnnnnnnnnnnnnnttnnnnnttnnnnnnnnnnnnnnnnnnnnggggnggggggnnnnnnnnnnnnnnagtctgaaatcttcatgcaagttttgttgatattgcaaacaatcttgcacaatcaatgttaattgctcggttaatatcagatgcaagaataatattacaatataagcacatttatgagccactaactttccctgaccaacaaaattagcatgctgatttgaattaattgttggaacttggaacatactcatttcttgaacagtctctctctcaaggtagcacagtaaaaacttccacatctttcattgcagggctcttgactgagtatttaaatgtccaaccatggcaggcaccagcatgttccccctttttattgagggcaacaatggctcccaaaaaatctggaaattttcttgctattcgtgttattgcatctttagcagcaagtttgggttccattcccaacctcatactctccacaacttgatagcatggaaggaagcgcatcatgatgtcaccatccccagttgcacaacatgcaccaacttcatcaatggcatatgctgaggatccagcaatggga

SEQ ID NO: 16062 - DNA, 213 bp, Glycine max
  Clone ID: PAT_MRT3847_114510C.1
acttggaactttagatatctatatatgatatatttaaaattatttttcattgtctctgaatttggcaattcacaaattaaaaattagcctgatttggtaaccttgattcccacgtacataaaggtttggcattggcagttctataaaagctcttatatgtatgataaatgttgttggcattggcagtggtcacaatgtaaagcttgtatctag

SEQ ID NO: 16063 - DNA, 320 bp, Glycine max
  Clone ID: PAT_MRT3847_114511C.1
ctggagaaaaaaagaggttagaaggagactcctcacctggaggccttatcaagaaaggcttatgaatctcgctgaggctcggagggagattgccactgccttgaaatttcacagagcacctatgaaagaagccagtgaacagagccatcaacaggctcatgctcaaaagccagcggaaaggccataagtatcactccagccatggacaggtgccaagttttaaccaagacggaaaatttaagtctaggagaaatcctaaaaggttcgcctcatgcacaagctatttttctaattacattgacatggatgagatatccgat

SEQ ID NO: 16064 - DNA, 490 bp, Glycine max
  Clone ID: PAT_MRT3847_114512C.1
actctgcataatcgtcttctaccagtcctttaaatttccactgttatactcgcacatcattatgattcgtagttgatttatacataattgacaattttagttcaaccacaaatattgtctatgattactatactggaacatatattttacactgctaagaggtaggcatggaagatgactacctctcttatttacttcttctcccaaactgttttgcatatcatatgtttaacatttgctgctggcattgagaaataaattcgtacaaacacaacattacttcttatatagcaatccaggacgatagcttagctatttattttcccttttgtctttagagctccaagactaagtaatcggcatctgttttgatccagggctccttattctcagatgaatcttcttcacagctgccaaggagtggattgggttggatcttatactgtcgcatgtaatttttcgttgacagtactgctcttttgggctgcat

SEQ ID NO: 16065 - DNA, 974 bp, Glycine max
  Clone ID: PAT_MRT3847_114513C.1
ggagagtgttaccactctctatcctagatgtgtgtatgatgcttttgcagagtatcagttgccagaaattttgagaacacctttgcaatctctctgtttacaaatcaaaagtctaagacttggaagtatatcggagttcttgtctagggctttgcagtctcctgagacactcgtggtacataatgctattgaatatttaaaaataattggggctttggatgaggatgaaaatctcactattctagggcgctgcctgacaatgcttcctatggaacccaaacttggcaagatgctaatattaggtgctattttcaattgcctggatcccatattaactgtggttgctgggcttagcgtgagagatccttttctaacaccattggataaaagagatcttgcagaggaagcaaagtctcaattctgtggtgcatacagtgatcaccttgcacttgtaagggcatacgaaggttggagagatgctgaaatggaccttggaggatatgaatactgctggaaaaattttctttcctcacaatccatgaaagctattgacgctcttcggagagagttcatatgcctggtcaaggatattggattagttgatagcaacacggccagctgcaatgaatggagctctgatgtaaatcttatccgagcaattatttgctatggtctatatcctggaatttgctctgttgtgcataatgagaaatcattctctttgaaaacaatggaggatggtcaagtgctcctatattcgaactcagtgaatgctcaggaaactaaaattccgtatccatggctagtttttaatgagaagataaaagtgaactcagtttttcttcgtgactcaacagctgtgtctgattcagtggtgcttctgtttggtggaagcttattgaaaggagatactgataatcacttaaaaatgttgggaggatatctagagtttttcatggagcccagtgttgctg

SEQ ID NO: 16066 - DNA, 1550 bp, Glycine max
  Clone ID: PAT_MRT3847_114514C.1
cttatataccttagcttttgaagaagttgaatgaaaagagcttttataaaagcgcggtggttgtggtggcttggcggcagaacatccgccgcgcatgcacgtcctcttccggttgcggatccagacaagcagttcacagcttctcgggtgtcaggtataatcctttcttttattctaagaaaataataacagggtcttgcagtggaaaagggcgacatcacaagaggcactggtttcactgctacactgcctctgcctcacacaacagctattgatttcagctctgtgcctgatgtgaaaggttcatcaaagagcttcccaaagcatgaaacgcgacacctttcagaacacaagatgtgctaggtttagtgctgatggaagatttgttgccactggaagtgcagatacatcaataaagttatttgaggtttcgaagatcaagcagatgttgctgccagaggcaaaggatggtcctgtgcggcctgtcatacgaacatattatgatcatatacaaccaataaatgatctggattttcatccacaaggtactatcctgatatctggagctaaagatcaaacaataaagttttttgatatttcaaaaacaaatgcaaagagagcatacagggttatccaggacacacacaatgttcgatctgtatcttttcatccatctggagactttctgctggcaggaactgatcatgcaattccacatttgtatgatataaataccttccagtgctatctgtcggcaaatatcccagagactagccccagtggagccataaaccagatcagatattcttgtacaggttccatgtatgttacagcatctaaagatggtgctattcggttgtgggatggcatcactgccaattgtgtgcgctcaataactgcagcacatggaacagctgaggctaccagtgcaatttttacaaaagatcaaaggtttgttctctcttgcgggaaggattctaccttaaagctttgggaagttggctctggaagattagtcaaacaatatctgggtgctatacatacccagctaaggtgccaggctatttttaatgagacagaagaatttattctatccatagatgaactgagcaatgagatcgttatctgggatgcgatgacaacagaaaaagtagcaaagtggccttctaatcatgttggtgcaccccgctggcttgaacactcaccaatagagtctgcttttatttcctgtggaactgataggtcagttcggttctggaaggaaactgtataattaatgggaaggaggctgaatgcatttacagactaattaaagttatcacttattgaaagttaactctgggaatttccatttatttttctttaatttctagtagtagcctaaggctttttgcctgcagaagtagttaatgcattcagctctcggaattggaagattatctatttctgatgatttgttttgctccatctttcaaacaattcttaacagctactactgtttcatattccatattttcacgaaagtagcttaaagttggattggatgaacc

SEQ ID NO: 16067 - DNA, 759 bp, Glycine max
  Clone ID: PAT_MRT3847_114515C.1
gcaattgtatatgtcatggataaaacattataatctctgttaagtgatagatagcagtgtagtaattacaaaaacaccttatccccctgagtgatgaatagcaacgtagtaatttttgaaatgattttaggatgctatactttccaaattgatgcagaccagaagttttaaatgaatttatcgatataactatatgttgtaatttggaggatctgattgtgtatagatttttattcccaaatttatttctttgtaagttgtaactccttatttgggagagtctcattagagtctatatatttgtaccaagctacgtattttttggaacaacagaaaataatttctgattctttatcctttcaaccttccaaatgaattagattgaaattaaggatttggaatcaaggcgtaaaacatccaattcttttgggtatgggcagagtacaccttgggcatttgaaaaattcagaatctggtgtctgtaatcatattcttcttttcctatacatgttgacatcaattagttttaattttgccagttgtagacagtgtatgaggagctggtttgaccagagtgtggcctctccaccaagtgaaagaatgcccttgcttgctttgcctgagtaggatgctcatacgtgttgaaaacagcctatttggttattcttactatttgaaaaatcttggcactagtgcatgattgggtgcatttggcttttggcttttgcttctttcataggcgctatattatatagcttg

SEQ ID NO: 16068 - DNA, 771 bp, Glycine max
  Clone ID: PAT_MRT3847_114516C.1
ggatcatgcttttaaacagataggattgaaaatcgggcaaatctctcatttggctggaggatcttacggcatcaaatccctggttgctttcgcagatcgctcccttttgcaactccaactcccttctcttgatgtccaccatcagaataggtgtgctcctctcctccatggggactgtgatgcttaagatccaagcttgggagacagagaaagagaaagagaatggacgccattgattctgtgttcgatccgctgagagaattcgcaaaggacagcgtgaggctcgtgaagcgctgccacaaacccgatcgcaaagaattctccaaggttgccgtccgtactgcaattggtttcgtcgtgatgggattcgtcggtttcttcgtgaagctcattttcattccaattaacaacatcattgtcggatctggttaggatgaagggaactacaattgcctcagaattcaggttgtcaagcaaaaggaggtagacagagttcccacatcaatagatcattttatgcccccaatcttagttctgttttcatttttgttttttcttatatctggaagcgttactttagatgtaaaattttatttatcctttgttagaccttgacacattgttttgatttaggataaggaggaaaaaacaatggtcaaacctgaaacttgatttgattctatgttgactttgctttcgaatttattttgatggctgtttattggcctttgcagaataaaaaaaaatttaatttagcaagaatctgcagat

SEQ ID NO: 16069 - DNA, 181 bp, Glycine max
  unsure (1)..(181): unsure at all n locations
  Clone ID: PAT_MRT3847_114517C.1
catnggcaacttaacttctatgcnctaaagtnagttttcttcatgctgcagaaattcataagcncaagccacccncaacncaggggttgggatccaagtggctggaatttcaacactgggaatttggatcagcaatgctctccaattcaataacaacaaccctaccaataattacatgttt

SEQ ID NO: 16070 - DNA, 344 bp, Glycine max
  Clone ID: PAT_MRT3847_114518C.1
acgcatcctcagctcggaatttgggtcgagggctcgagaagaatacgctggcacatgtggtaacgggagcaaaacttaaatgcagtgagtgtaatataccggcagcttatgttgggggatatgtcacatactggagaagaacgcctcatgttctttgtgcggtgcacatctcagatcggcgtgggcagcatgaggatcatatgttgctctgacctgcacagtgccaggtctaatgtacatgtgggaaaatgaggtccctaaaaaaggcagcactgaaacattcgactttttcttgtgtgccatctgatcactccaatgggggagaagcttccgaggatgctaat

SEQ ID NO: 16071 - DNA, 152 bp, Glycine max
  Clone ID: PAT_MRT3847_114519C.1
ggggcgttaaaaaaattcaagatttggtccctccctccctactttggtttttacaaaaaaattagtaaacaaaagaccgtttcaagttttatggaattttaagggtaattttaaatcgaaaatgggtcctaaatttcactagggctagttcc

SEQ ID NO: 16072 - DNA, 321 bp, Glycine max
  Clone ID: PAT_MRT3847_11451C.1
tcggtgtttcgcttggaaaagatatgcacacaaaatggaggattgttgatccaacaaaggctatctactggagaggataatgtggacatatctgaacgtgtatagcttagaggagattagggaaggccactgactactttaatatgcacaggatactagcaaaaggaggtcagggctcatttacaaaccgatgactgttgatggacaaaccgagctgtgagaaaattaaacgtcaacggagatgatgagaagaaaaaaacaagtctggcacattttgagaaattaaccacattaatgtggatgaggagaagggatgttgct

SEQ ID NO: 16073 - DNA, 453 bp, Glycine max
  unsure (1)..(453): unsure at all n locations
  Clone ID: PAT_MRT3847_114520C.1
cccttacaagttttgtaattcctggngtgggagcggccgaccactaaagtttaaaacatgggggacgggcttaaaaggaaacttgtttgggggaaaagagaaaattttaaaccgattgtgtggacaaagggtccatacacatttgggaggaggtggacccccaatattcactgattggctaaaaactattcgctttttttatacgaagggcccgccccgcagggtgggcaagggagaaaaagagcccttgtttttttttttttgacaggggccccacttggggccccgctctctccaatttttttattttgggaaaattgaatcccatgttggatctttccccctcgccatataggaagggctggccctcattttgtgttttactgtattgcgggtgggctcccgacaagggcacacattttgtctgggtaaagttgtataaccagccgaaag

SEQ ID NO: 16074 - DNA, 241 bp, Glycine max
  Clone ID: PAT_MRT3847_114521C.1
aagcactcttccgctcaacgtcagtgttgcatttacatgcaccaatcacaagcgaggaattcaatctagtagctaacaaaaaaaggcctcttgattgcgtctacacgtgtttgtgaccagttgcaaaacctatatagaagaacggaaacgatgtttaccagagattactccactaagggaggaggataaaccatgcagaattctcaaagcgatctctcggtatccaaagggagatggagat

SEQ ID NO: 16075 - DNA, 801 bp, Glycine max
  Clone ID: PAT_MRT3847_114522C.1
atagtctgcggagagacgacacaatcaccagttcttacttactccgttctccatagcacttcacatgattggtgagtgtgagaatcatggtgaaatactcagctactgattcagtctcctccattgcaagaagctcatactgtcttctcaatgtctgaagctttgccttctttatcttttctgcaccttcataactctttataagaatatcccatgcttccttcaaggttgtggcatttgcaattttctcaaagttggcatcatttacacactggtgaattagaaataaggctttgcagtcctttttcttcaaatctttgtaggtagatcgttgtgcctcagtagcactgacactgggttcttgatacccgctcgtgacaatctcatacacatcttgaaaacccaaaagagctttcatctgcacatgccatcaatcaaaattcttttcaccaagaactgggagattgttcatcggaactccattgctcgtcatagctcaaggttcttccactactcgaattcgtcttcctcaaaagcgtggattcacacagaatctccttcgattgcttcagtcccaggtccctcctttcacgggttgattcacatagaaacagacccttcaaccttgctctgataccactgttgaaaactgataatttggcaatctcacaaggaagaagaagaagtaaagaaagagagcttttcttgtacagattcaaagaaatcagatcaccattctcatactcagtttttctattttttacacagtactacagcaagttatatatggttattcttcta

SEQ ID NO: 16076 - DNA, 2464 bp, Glycine max
  Clone ID: PAT_MRT3847_114523C.1
cttgcaaaacggattcaggaatacagaacacaggcagagctggagaatatacgagcttctagcaattatatagaaaccgttctaggttctgatggcacccatgttgtgggtttgaactcttacagaagttttgaagcaggggtgcaacctgcaacaaccaaagggcagatcagtgcaaatcgttaagacaggattaaggtttataatgatctttaagctcatgtggatattggaaacggaggatttttgtacttgagaatcaatggaatttatattattacagaatgacgggtttcaatctcatggtctctcagtcatgtaattattctcgcttgtctgaacaaaatagtggcatgtttggtagattccgttcaagacacaatagggcttcgtctctaaatgaggatatttttggttcatgtatagttgatctgtgcacatccactataaagatggatgaagactatacagatctacgtcttcgcttccgtatagtttctccctcaaaatcttaatgaccacaggctgtatattaagctggtataatggacaggaaaaccaatagaaccggagctttaacatgggtttttaaatgccaatcactccaaaggacttaattatgttgagtaagttccccttatagaaactcagcaactggagagaacacgggcagtccttgagaggatactagcatatcgcaaatgtatagcaaccattccaaggacggatgtagtgtatcttgtatgtttgaactcttacagaagtattgaagcagtgctgagtgcagtgctcctgaaccagagctgggcatctctaaaccttggcatattgctgtgtattgaatgctctggagtgcaccgaaatcttggtgttcatgtctcaaaggttagatctataacgttagatgttagggtttgggaaaataccgttctggagttatttgataacttaggtaatgcttattgtaattctatctgggagggcttgcttctacttgatcatgaaagggtaggtgaaccaaatgtgccaatgaaaccttgctctgcagatgccttccaacacaaggagaagtacatccaagcaaagtatgtagagaaatcactgatcatccgagaagaggatatacccgagaatccttcagtttccataagaatctggcaagcagttcaggctgtaaatgtacgagaagtgtatcgccttattgccacatcaacatcaaatctgataaacacaaaatattatgatgaggctcaccatgctgctgatgcataaaaactcagcagctggtgcttctttggcaagtcaatcagaggatagtcagaaatcattgagggatggcatatattccaaggaagtggttagtgtgtcaaagattttaaggggaattcctgggaatgataaatgtgctgagtgcagtgctcctgatccagactgggcatctctaaaccttggcatattgctgtgtattgaatgctctggagtgcatcgaaatcttggtgttcatgtctcaaaggtgagatctataacattagatgttagggtttgggaaaataccgttctagagttatttgataacttaggtaatgcttattgtaattctgtctgggagggcttgcttctacttgatcatgaaaggttaggtgaatcaaatgtgcctatgaaaccttgctctacagatgccttccaacacaaggagaagtacatccaagcaaagtatgtagagaaatcactgatcatccgagaagaggatatacctgggaatccttcagtttccataagaatctggcaagcagttcaggctgtaaatgtacgagaagtgtatcgccttattgtcacatcaacatcaaatctgataaacacaaagtattatgatgagtctcaccatgctgctgatgccaaagggcatcagcatgatcctgaagcctgtctgagagttgaagagactactgagacagagaggtgtttccgtggatggtcattattacatctggcatgtcattctggcagtgcactgatggttgagttgttgctccaatttggtgctgatgtaaacatgtgtgactatcatgaaagaactcccttgcaccattgcattacaagtgggaaaaatcaattggcaaagtttctattaagaaggggtgcaaggccgtcagttaaagatgccggaggactcactgtacttgaaagagcaatggagaggggagcaataactgacgaagaactatttatcttgcttgctgaatgccagtgaagatggatctggtatatatatatatattaggaatgttgaagatatgctgttgttcattaagaaaaagaaagttcaatttcttaattttgaatgcctaattcatcgaaaggaatttcattaactttttaattcatctggatccatatttgttgcggttactatagaaaacatttaacacgtaactcttaatgaaaattttaaaatatattcatc

SEQ ID NO: 16077 - DNA, 1343 bp, Glycine max
  unsure (1)..(1343): unsure at all n locations
  Clone ID: PAT_MRT3847_114524C.1
caatgccccgaaagacaaacaaatttgttactaaaaataataataataataataataataataataataataataataataataataaaaatacaacatgcagaaagaaatgctataaaaactgattaaatttgcaagttttacgggttatatgccataattgtcaaaaggactgatttgattaccaaatttctgctaaccactcattagctatgcactttaaaacatttcaaatatggaaacagttgtagcaactcttcgcggcttcgtttcttaatgccaatacatccgttcacatcaagggtcgtaattttgttggaacaggactttgagagttcctccagacatttatcggtcacgccaactattccaaacaagcttagaaattcaagagaggtgcaaccctttgcaatggatatgaccccttcatcagtcacacgtacacaccatgtcaaattgagagattcaaggttcttgcatttagaaatacaggagagtgcttcatctgaaagattctgggcaccacaaagatccaaaaacttgagacgtgctagaaggcatattttcctgtaagcttcatctgtgaaacttgacagtgcatagagattcaaactctgaagaaatagacatttgtgcaataaactcttcaacccatcatctgttaatttgatgcacctagtcaaatttagtgactctagttctggataattatcagcaacaagttgtgcaccttggtctgaaatattcttacatccacttatgttcaagtcaattatgtgtttgcagttcttcactatatgttgtagtcctctgtctgttaccctgacattccagtagatcgaaaagcttttcagctgggggcaacaactggttatagcttcaattcctgtatccgatattttttggcagccattcagatttaaagactccaagctttgaagagaattaaaacacttatccataatgagaatcagatgtgcgtcttcaacatctctcgcaaactcaaggttaatctgcttcacattgcaatatctaggcagagaaagagcagctataaggcgattcccagcattgtttaactcgcgaaaattgagtgactgccaaaggggttgagaacagagaagggtgcgatgaagggagggagagaccagaaggagagaaacgaggtttgtgtgagacagagacagaggtaatgtggaacagacaagtttcaatacctttggcactgtttctctgcaccaaacatcttccttcgattctccctccattcgcgtcaactcaggttcctgcttctgcttctgctttcgattnccgaagcttaacttaacggcttggcaaggcga

SEQ ID NO: 16078 - DNA, 709 bp, Glycine max
  unsure (1)..(709): unsure at all n locations
  Clone ID: PAT_MRT3847_114525C.1
ccacgcgtccgacccctcttcctatttacatacatcatgacctacttgactcactaaggaaccctctaaatgactaactaacctatcataactagcttctaatagaggttatctagcagagttattgagctgatgtagtctttatacacactggcaatgattactatttggtgtttgcaaggatgattctagttccttagtacatcatggtgtattctaggtacaagaatagctatgtacattaatctgaaaacaaatttgtacaattctaatttccaataggcatttaaccactaattccaaccgggatatatgttgaatcaacaactgatagaagaattacttgtataattgaatgatgcactggttagggtggatttactttgtgatagatgtttagaggaaattaatcaagaaatttgagttcaattgttcttgacactttagtagtacagttctctttgccattgaattcagaaagcacactntccaatttatccttgctttcaaagtttgatatctcctttcaaagtttgatatttctagctctagtttctttggttgtcaattaatgactcctgtttcaattctggtcactgatcagtatttctgtagtcatttacaaactagcctttttgcccttcaagtaggctgngtcctatttttaggactgaggtcccctttccctagtgccccctgtggttttttt

SEQ ID NO: 16079 - DNA, 253 bp, Glycine max
  Clone ID: PAT_MRT3847_114526C.1
aatttccggggaacccaacccacccggggacaaaggccggaaacttttcttccgggggcaaaagggggcccctaaaatgccctgggccgggaacccggccaaaaccaaaaccaggaacaacaaccacccccggggcattaaacaggcgggtgcggaaaaaggtatacgggggggcctttgcagcccctgcaccttggagagccttttcggacaggccaaatggggggaacaaggacagtgcccccccggtctg

SEQ ID NO: 16080 - DNA, 315 bp, Glycine max
  Clone ID: PAT_MRT3847_114527C.1
ctcgagccgttaaaaacatgaatgagaaacttatacaaaaaatgtttgagtatgtatcaacaacactaatcttttgatggcaatctatacaatatgtacttggataccaaatccatgcccatggcctttatcctactagacgcacttgccttccactctctgtcagggcgaatgccacaatggtgaccacgccctggctgttcaacaagcctgggtatgctggggcatcttgtacccattacctgctcatatatagaaggccgccttggctggcacttctgatgcagtgagagagaaggacaacttcttttctat

SEQ ID NO: 16081 - DNA, 375 bp, Glycine max
  Clone ID: PAT_MRT3847_114528C.1
ccatgcaaattttgttctcttttcttatgttgtcatttattttgcaccccaaaaaggcaacttttttttcttaggacacgctgtgctaaacaaacccgttttcttgggaggtaacagacacattatagggggggggctgaacaaaggtgactcgccaccggaggggaaaaccccaaccccgcgagggggaggagcaacccgatggccgtccccccaagctaaacccgggggacgggctccctagaaacgaatacccaagggcacggggggggccctgattgtatccacacggggggggggggggggggaaccccaaaaccgtcacgattcactcattgttgtgggcagcctaggcgaccttggcttcagggggat

SEQ ID NO: 16082 - DNA, 254 bp, Glycine max
  Clone ID: PAT_MRT3847_114529C.1
ggggaaatgaatggagtgttaaacttgcacaaaaaaaaacgcatgatttttatacaagacagaagacaaggcctacaggggaatgaaagtacttaccgagttcccggaagctaaggggaatgttctctccacttgtgtgctacaccaatcatccaaagtgccatttcattttgacaggaatacaccgtacacgtccaatatagaaatttaaatccaaaatttttccacaaagcaacaagcgcgcctatcataaa

SEQ ID NO: 16083 - DNA, 398 bp, Glycine max
  Clone ID: PAT_MRT3847_11452C.1
cccaaaaaaaaactcagacaggttactaacattcataatgggggcccacctcaaaaaggtattttttcctaaaagggcggcccccaacttaaaaaaaaaaaaaaaggggacatgaaaactctaaggctgatgaaaaaggctcggaccgtaaccaaaaccgatccaaaaaaatttttgttccctttcaaatcttaaaataaaatcgggataattggatgggttgaaaaaaaaaataaaatggggacctgcccccaactgtgtaaaactaaggttttgggggctgaaatttttcttcagttttcacaagcaaagtttcattcaaaagctgcagttttgtctttaaaatgtcaaagtagtttctaaatactcaaaaccttatgttctgccaagtttttaac

SEQ ID NO: 16084 - DNA, 566 bp, Glycine max
  Clone ID: PAT_MRT3847_114530C.1
aaaatatgtttgagttttaacgggaattcctacattttgatggacaaaataagaaaaagaaacttattactttagaagtaaaagtattatttaactctctcaagaagaaacatatatatgaaatttgttcttatgccgaatcggctcgggctttctctctttggttttgtacttggtcatggatattgaggtggagatctggtttaatgccctttgtggataattaattgcattagatttcgggagtgactgattcttaataattgaagtcatacgatgctctctctctgctatgttggtttttctttttcttgctttatcaggcaataggcatggtggaataccaatttattaatactttaatttaatgtcctgttctttgtttcttgagtgctaattaacgtccacctattttgagctggattgggaatttggggtggactgagacaaaagagaatgagaattttaataagtattgtgatagaaaagaaagagagaaatgaaaagataatgaaggtagaagtgagtagataattataacttttcttggttcttttacgttgagt

SEQ ID NO: 16085 - DNA, 248 bp, Glycine max
  Clone ID: PAT_MRT3847_114531C.1
gccccgcccaacaaataaaaaggccctccttttaatcaaatccgcggattataaaactcccccccttctaacaaatttttctttcccccccaaaacccggcctatcttattctgtttctcaaccccctccacaaaaagaattccctacctccttacctgtaactcccccacacccaaaaatctcttttttttatttaagagggttttcctccctcttttccaaacaaaaacttcttttatcacctttt

SEQ ID NO: 16086 - DNA, 364 bp, Glycine max
  Clone ID: PAT_MRT3847_114532C.1
tacaggctgtgagaagacaacacaacggggaggggtgcgcgtgcattgcccacatctgatggatgggagttatcagaagaagaacttgggtgctatactttgatgccattattcaaccatgtgaaagtaagggtctgctctttttccaatctcgacggacatgaacaccagcttctatattctgatagagatcgaaacggacttcaccgacgttagaaatgacaacgttatcgttataccagttaccgcccactgctatcgggctagatttcatgggagctctctattgcagatgcacgcggcacgttccgaacatatgcctaatcctaatttacgaaggtatacgaactcaccagaagagccg

SEQ ID NO: 16087 - DNA, 320 bp, Glycine max
  Clone ID: PAT_MRT3847_114533C.1
tttgcaaaacacgcgagagtggcatgtttatcttattgcataggtcactcaatccagctttaaattactattaggtcaagtaaagactggagtatctgggttgactaaaaacagcactcttactaactcgatccaccaacttcacattttcacggactgaattctaatacaccacgctacagctgttgttgatgggatctcgacgctccataagtgaaatccgcaaagcgaagacgcccggagtgagattgcctgcgcaatcggaccaattaaggcgagcagccccttacaaatgggcgagcccaccacatgaaactttg

SEQ ID NO: 16088 - DNA, 1331 bp, Glycine max
  Clone ID: PAT_MRT3847_114534C.1
cccacgccctacccacaacaccccctttctccaattcctctcactcaccacaacaactcctttttttacctcttcacattctccatttcacagggttctgatcatgttggggaagaggccccggccaatgatcggaaagttgtcggagttgttggtctcgagaggccgcacggtggcatatttggacaccaccggaagccctagaggcccattagacatgaagatgatgcaatcatcaccaagaggcttaaaaaactatgatcttggtggtgttggtcttggaattgtagtggctcttgataaatccaacgaggttgctgcacgtgaagttttgcccaaacacgccgtttgcacctccaatttgaaccggtccggcccaatcccggttcactacaccaaaaacccagatgaatttgatgtggaggaatacacctatgtgacatgccacgtacctaacaaaacgttcactaaggtatactatgatggtggtgaaggtgaaattcggagacattacaacaacagcaacgttggagttctcagaagaaccgcaccacaacctttgattgttgaggccgaatcattgtaccccacatcgaattttctcagttcatgtcacttatgcggaaagaaactccacggcaaagacatatacatgtacagaggagagaaagcgttttgtagcccagagtgtcgttcgagtcaaataatgatggacgaacggaaggaacggtgtaggtcagaagcttcaaggtctgtggaaatgtcaagctcgccatatgcaagggaacagatattttcaactgggattcttgcgctttagcgttactctctgggtgcggaaataaattaattcaccagagattgatgagtctaagctatgaataatatacctatagctactacgtatatacataataataataatatacggctatactattattgactatctggaattaatagtatatgagagttaattaagacagcttgattggaaacaacaaagaaaagttttgatcggctaaaggggtagacattctgatgtatttttgtattaccaagaaggcaaagagttatgaattttcagatctcagttgcacacattaaagtttgttctgtttctgagttctgtttcaaagatcatagattaactcagactgtttctgggtgttttttttttttttttgttaaaatacagaataaagcttcaattttgtaatcagaaattataaaaacaattgtactaatccttccaaaatttggaccatcaaaatagtttaaaactttaaaaaaaaaaaaaaaaaaaaaaacctcgagactagttctctatc

SEQ ID NO: 16089 - DNA, 386 bp, Glycine max
  Clone ID: PAT_MRT3847_114535C.1
gactgaccaaattcaattccataaacagccgacagtgatgatgggagagcattccttgtgcaccgtttactctggatacaatacaatgcatgttgtaaaaatttgacgtgtaggaggagggaggaagagaaacatagccgaggttctcaaggaccaaattaagaaccggattgccgaatttactttaacggggggccctaatcgacaaatgatgttgctgactgagatccaagccaacaaaagcatgccccatttacggacactcgttaaagcaaatcccgaactccttatctaattggtgcaccaagaaccccgaatacaaatacttattcatgattctcttttcgcacaaatcaatcaacttgcaaccggccgcaccgatggaa

SEQ ID NO: 16090 - DNA, 1163 bp, Glycine max
  Clone ID: PAT_MRT3847_114536C.1
cacgcgtcctccttcacattctccattccacaacatcaaggttctgatcatgtcggggaagaggccccggccaatgatcggaaagttgtcggagttgttggtctcgagaggccgcacggtggcacttttggacaccactggaagcccaagaggcccattagacatgaagatgatgcaatcaccaagaggcttaaaaaattatgatcttggtggcgttggtcttggaattgtggtggctcttgataaatccaataacgaggttgctgcacgtgaagttttgcccaaacacaccgtttgcacctccaatttgaaccggtccggcccaattccggttcactacaccaaaaacccagatgaatttgatgtcgaggaatacacctatgtgacatgccgcgtacctaacaaaacgttcactaaggtatactatgatggtggtgaaggtgatattattcggagacaaaacaacaacaacaacaacaaaaacaacgttgtagttctcagaagaaccgaaccacaacctttgattgagcccgaatcatcgtaccccacatcgagttttctcagttcatgtcacttatgtggaaagaaactccacggcaaagacatatacatgtacagaggagagaaagcgttttgtagccctgagtgtcgttcgagtcaaataacgatggacgaaaggaaggaacggtgtagttcagaagcttcaaggtctgtggaaatgtcaagttcgccatatacaagggaacaaatattttcaactgggattcttgcgctttagcgtcactctctgggtgcggaaataaattaattaaccagagattgatgatgctactacgtacatacataataatatacggctatactattattcaagacagcttgatttgaaacaaaaacaaaagttttgatcggctaaaggggtagatattctgatgtattttttgttttatcaagaagccaaagagttatgaattttcagatctcagttgcacagattaagcttgttctgtttccgagttttctctctctggttaaaatacagactaaagcttcaatttcctaattagaaattacatgaataattgtattaatccttccaatatttggaccaccaaattagatatccaaatgtttgaaactttaaatgatagtcataattcatc

SEQ ID NO: 16091 - DNA, 810 bp, Glycine max
  Clone ID: PAT_MRT3847_114537C.1
caatattaatatattattcaaactcataactatccagcgaggttacatattggtaccgaaatccaaagtcataacaactacaaacatactcatttgcctcggcgcaatgaagaaaggaatgtttctagcatggaccacttactcaattggtccattgtggacaagcatttaaagccattggatgcaactaaggtctaattcgccttactcaaacccgactccaaatctgaacctggattcctgacccttgattttttatttcttttgacgaattttgagatttgcatggttgatgatttgcttgttggttgttgtgttttgaagttctatgggtttttttttagatctggatatatttattgcaaagattgaaggttagaagttgattgcgcgatagggaaggaccaccgaaggtgttggtggcagttcgctatgtcagaggtggcacgacgggcgtcgcgaactcacagagttggcgcacaacagagaaggacatcacaaaccagtacttgttgagtttgtttcatcaacaaaaatagtgattgcgatgatgatgacggtgttttggtgttttagtggatgattctgccttttattgttgggttcattttgatggatgatgatatgagataaaattgatgacagagaggaaatcagggctggtggtggtggtggtcaccggagagttgcagcacttgggggaatggacttggggaggaagagagggggaaaagaaaacagagctccaccatcaacagcttgtggcaattgacggcgcaaatccagaaaggaacatagatcggacgcggg

SEQ ID NO: 16092 - DNA, 378 bp, Glycine max
  Clone ID: PAT_MRT3847_114538C.1
ccacgcgtccggttagagatagatagcgagcggtcgatatagacgatgcaagcttacgcacgcatgcatgctactacatatcttatatatagagctacctacattcaattgactggccgtcgacaaacaacggactgactgaacaaaccctgtacttacctaacttaattggcttgaaatacatctttctttagctagcttgcttactaacaaacaggcacggaccgatcgtcctaacaaacactcacgcagaatgaatagcgaatggcacgctctatgtacccattcatcacgcgcggcgtgtgtggtactcacacgcagactgacacattcactagcgagctagctagcgctcgtttctttcgctttctttccttt

SEQ ID NO: 16093 - DNA, 503 bp, Glycine max
  Clone ID: PAT_MRT3847_114539C.1
aacatcagaacatacaaacaagcctctaattacaataatgtcctcatccccgttcccttcttgcttccgcccctcccccaacgccgaatcccaccctcctccccctccgccgccgcactccacaatctccaacctcacaatctaccacaccgacacaggccccgtgtccctaacatggtcacgctccattgttggacgctccctccacattcagctccaccaaaaccccttagattccccaccctaccctaaccctaaccctaaccctaacccctccccctccaccaacctctcctttcacctccacataaaacccttcctcttctggaaaaaacacggttcgaagaaaatcgcccccaacaccctcctcttaaggaacctgtcaagagcaaagtttggcgccaagcccaaactcctctaagccttctacgtggagctagtagcctaaaaccgcgggaccggcctcatcgcaggacgcgaaagagacgtgttgatgaaagcca

SEQ ID NO: 16094 - DNA, 671 bp, Glycine max
  Clone ID: PAT_MRT3847_11453C.1
ctccggctgactcggctctctcaggcttggttgttctgcatgatggggacaagggtaaggtagttgggtgcagtgcgtctggggccgtggttgccaacacgctgaaccactcgcacccagctgtttgttcgtccccctccatacgctgtttcggtggcctcgtctcctagtgcaaacacagctatctcaggattgattgtagttgataatagagacaaggaaaaagtagtagatttgagttcatctctgtcaaaggaagacaaaagattgaacaatatgcaccaagattttgttcttccctctccaaaagaaatttctgtgtgcatgacaggaaacagtacaagtagttctagaactttgaagttgagccgaagtagaagttgtaaagcaagtatcatgaggaatttatcttcagattggtttgaagatgtagacgtaattcagaacactcctccaatagggattgaaaaagccttccctggaagaccggagggctttccgaagaacatttatgcactaaactataatgccaatgcagaaaggctttcatgtaatggccatgggaattctgtacaaaattcttctgttgatgatgtacagaatgtgaaatcctccactaacaaggaaagagagggaacacaaaatattatcagggggaatttactggctgg

SEQ ID NO: 16095 - DNA, 1079 bp, Glycine max
  Clone ID: PAT_MRT3847_114540C.1
agaattcggcaccagtaagaagttcaagcagacatggaaaggattttcaacgcattcatttcgttacgtctttacaaacatgagactagctctgccctctgctgcaatggcaagtttggagtattgggcttttgaagttttggttttcttagctggactaatgcccgactcacagataaccacttcgttgattgcaatatgtataaacacagaattcattgcctacatgatcacttatggtctcagtgcagctgcaagcacaagggtatccaatgaattgggagcaggcaacccggaacgagctaaacatgcgatgagtgtcacactgaagctctctctcctccttggattatgttttgttttggcacttggatttggtcacaatatctggattcagtttttcagcgacagttctacaattaaaaaggagtttgcttcagtgacacccttgcttgccatttctatattacttgatgccatccaaggtgtcttgtcaggggtgtccagaggatgtggctggcagcacttggctgcttacattaaccttgctacattttatcttattggtttgccaatatcatgtttcctaggatttaagaccaatttgcagtacaagggtttatggattggtctgatttgtgggttactttgtcaaagtgggactctcttccttttcataaggcgtgccaaatggactaaattggatctctctagggacaatgataaagaacggcctcttgttgtttaactgaatggaattggacttatggtaaaaaaaaaaagaaaaaggtttgcattctattatgcagaagtttatcagatagggtgaacactgaacatgattttggtgaagcgtttcttgcttatattcattttgagaaagtgctcacacttttttttatattttatttgggagtgttggtcagttgcagagagtagatcttggcatataaggtaccagtctcgcggtagctcttcaagaatagatggggagtaatgtatgccaccgtgcaaagtatgctataaaaacactagcaatctgcgtgtgattgtcaatggagaaccatatgattgatgat

SEQ ID NO: 16096 - DNA, 410 bp, Glycine max
  Clone ID: PAT_MRT3847_114541C.1
attggccccatgtagcaataattaataatgaatatattcagagaaattgtacacctctaaatattcagagaactatgctttcaggaaatcggtagacatgtgtatatacttcatcaaaatttcagcaccttgagacattagtatcaaacaagtgatttcgtgaaggcaagcaaccattcagccaggctatacaatttgtagggagaaatgttttcaaaattcaaattcatgtttaagcaaatgtgatggttcaatttgaatatgatatattgaaaataggattctgttcaaaatgttcctaagcatttaccactgctaaaactacaaggcaggagcttagaataacaaaagaaaagttgtgccaaatatcaaccaagcatcatcatactaggcaccagttatagatgttc

SEQ ID NO: 16097 - DNA, 433 bp, Glycine max
  Clone ID: PAT_MRT3847_114542C.1
ttacctgctcacaagatacacctatttagcttgttccataactcaaggctaaattatgcaaagcatatctgtcgaaccaaatcttgatgcaaactaactgaaccaaagaatattttgaatgctagcccatcaatacacaagtccatctaaggaactacggcaaagagtaaatccttaagacttatttcttgttggatccggcacaacctgaccttatctacctgagaacactggacctttcctgacgctaatcctttacacgtgggctgacaccatgcattctctgtatgaccttcagagctcataaatccttaccaacctgccataccttacatatacgctgttaatagggtgcacaaactgtaacatctgttatgaggcttctcacaaagagcaccttattgcttgtgaaccccttacaatccgaggggcg

SEQ ID NO: 16098 - DNA, 445 bp, Glycine max
  Clone ID: PAT_MRT3847_114543C.1
aaaactcgaactcaaaattattatttaagctgagacaaactcgcttggttattagtgcaccaaaaaaacaatgtatatcaaagcccttaaaggagcttctctgcatactatagggggttacggataacctggtccatggaggggcttctcaatgagagctccatgaacctagaagatgatagcatccgggtagagcactaacgagggggggccatatccacggcaatcggagtgagataaaaactatggggcatccctttggtaagataaggctccacattaattgttgggcttcatgaaggcctcatagtactgcatttccgtgttcctcaccaagttcatcttcggcaggcatagcagcaccgggggccggcttagcccttcgagtggcggtgccgtctgaaccatcgggcagcgaaaggggtggttcttgatggccccaaca

SEQ ID NO: 16099 - DNA, 158 bp, Glycine max
  Clone ID: PAT_MRT3847_114544C.1
agtaaaatattagtactagatctatctattctaggagaattattgttgaagaaaaaagaagacagcacaatcttgctaggctaacatacagtatatatactaagtccaaaacaagacaacacatatatgaagacacatgggtgtctaaagagtgcatc

SEQ ID NO: 16100 - DNA, 1408 bp, Glycine max
  Clone ID: PAT_MRT3847_114545C.1
agcgaatattggatatgtgattcctacaactgttgtatctcattttttgaccgattatgaaaggactggcaggtatactggtttcccttgccttggagtacttatacagaagctagagaatcctgcactacgtgcatggttgaaagtacagtctaatgagggtgtattggtacgtagagttgaaccaacttctgatgcaaataatgtattaaaggagggtgatgtgattgtcagctttgatgatgttcgtgttggtagtgaaggaacagtcccattcagatcaaatgagcgaattgccttccacttcctcattagtcaaaaatttgcaggtgatactgcagagcttggtatcatcagagcagggacattaatgaaaactaaagttgttttaaactcacgagttcatttggttccctatcacattgatgaaggtctgccttcctatctaataattgctggtttagtattcacacccctctcagagccattgattgaggaagaatgtgaagactctatagggctaaaattattggcaagggcacgttattcattggcaaagtttaaaggggagcaaattgtaattctttcacaggtcttgggaaatgaagtcaacataggttatgaagatatgggcaatcagcaggttgtaaaattcaatggagctcgaattaaaaacattcatcaccttgcacacctcatcgattcatgcgaagacaggtatctgcgttttgaatttgaagacagctatgtagctgttttagagaaagaagctgttgctgctgcttcaccctccgtactgagtgattacggaatcccatctgaaagatcttctgatctttcgaaaccttatgtcgatacactagaagtagaaggtgaccaaccagcagaccaggaatttggtgatagcccagtttcaaattatgaatttggccctgatggactactctgggcataagaaacttgcatctgaagatatctgtgtgaaatttctcatggcggcagcatttgtagcaagtgatcacaattttgggctgcagagaaagtgctgcaacaacatggggcaaccttgatgtgaacacatgaatggttttatgctaccctgggggcatgttagaagcaacctatttaacagaaaggcgtaggaccataggaaagagagttcgtgattattttttcccatgtatgttttattctttcttgtcactcttcttgatttgataaacccaaatgatgtcttcaggtttgatatctacatttttcacgcgcattctgtatttttaaggaaatagtgaacataagagtgacttgtatacgcctttgatgcaatcaatgtaacattttacagtacattgattttaagtttgttctgattgaagttaaatggcatcaatttaacatttatgaagtt

SEQ ID NO: 16101 - DNA, 1057 bp, Glycine max
  Clone ID: PAT_MRT3847_114546C.1
tgatagtgtgcagttctaactatacacatgaatgaatgaacatatagatcagagcatgtatcttttattccacaaaaaatcattttctcagactgaatgaatcacattgagtacagccgcttactgtgtatagatgttaacaatcataaatccaaccttcttacaaacacaaggctttcttcaatctctcttctggtcaccttggaactgatagaccaagctttgataataaaacagtaggccaaatagggatgttcttgcgaataattatgtaactaaaagtcctgagaaagcgctcggcagcttctggaagtcacgctcagacacgacgtcattctcgcgccgccaccgccgctgtgcagcgagaacagctacacggtgcatgtctgatccggaaattacaagctctgttcagttcgacgagcagtggtacaataggctcttggattatagagttctgcagatggttcaagcaattattgagacgggctattaggataaggtgcccctaactattcggttttccggcagacagcaaagacaaaagatcccaccttaagaacagcatgcatgtctcacgtcccatcaattccatctggggaaacatcgactgcgcgcatctcagctccggcgaaatcctggtcaataaggattggcgaagaggagaagaggaggaagctggtttggagaatgaagaagcgcgaatgttggatttgatggctgattttatagaagaaattgacgttcgttgcgcgattctgctgcacgcggaagccattgacgatgagatcaaatcggaagaggaacaagcaaggaagggtttaggctcgagtcattcatgaaagcggggttcaccgcgcaactcgaccgcaccagcaagcccttactgatttgctcaatttggatgcggacccaaaactacgcatggtagtggttagggttttgctattggcagcgctctgagaagatgatggtttgtttctagggacagagaagagaaagaggcagagagagtgaaccacctcactcattgccgcaacgaagaaacgcgaccagt

SEQ ID NO: 16102 - DNA, 146 bp, Glycine max
  Clone ID: PAT_MRT3847_114547C.1
tagcggcaagaggcaaaggcagcgtaagaaacgcagcagactggagaacacgaaggtgtgagatatcgctgctacctaacacagcatgcactgatgccagttgccgagcaccgactcgatgaccaagggcgacaagaccaacccca

SEQ ID NO: 16103 - DNA, 139 bp, Glycine max
  Clone ID: PAT_MRT3847_114548C.1
aaaatagaaaactacccctcttcttttatttaataaacacggaggaattatggaagagcgcctgatgccgctactaataggcgaatccccccccatcgcatataagtggaaatcaaagagagcatggcgccccgggtaa

SEQ ID NO: 16104 - DNA, 254 bp, Glycine max
  Clone ID: PAT_MRT3847_114549C.1
aaaaagaacaacctttgggaaaagtccccgcctaaattaaaatttcatcctcctttataataaaaagtcaaaacttcctccacaaaaaattttagtccattaaccggcccttttcgaattttaggacaccctggtgaaaaaatgaacttttttacataacatttgcaacaaggtttccgaagaaaccctccttttccttttacaaaaacaccccagccccggcttttggccataatacccccttttccaccacc

SEQ ID NO: 16105 - DNA, 448 bp, Glycine max
  Clone ID: PAT_MRT3847_11454C.1
aaaataaagagatgcatatatatgattctggtgttatttttgattttgcaaattaaattacacaatcacagccgcacaagacacgggagttgggcctataccaactcaaattttttttatcagggggggccaggacaaaacacacgcaccccctaaaaaaaataattacccattggggaagacaaaaaacaaagactttaaatttcaaaacgaagaaaagagataaacagagcctcttaatgaaatgaacccaaaccccacaaacatatggctcggtttttgttgttgggggagaccccaacttgaccaagcatgaaccgggggggtgaaccccttgcactcgaagggaagggccctgattaccaccagggggcagagtgctgcaagaccatcacctatgaagggggccaccccgaagacccagtgggcatcccaacgaaggccctcg

SEQ ID NO: 16106 - DNA, 668 bp, Glycine max
  Clone ID: PAT_MRT3847_114550C.1
cacgaggaagcatcaagcatacacacacaaccacctcaaaaagaagaagaacatgtcaaactccacacaaatggaaaaggatctcacaatgacagtgcagcgatcctcttacttccccaggtgcatgatgtccccttcgtgcttgccaatccacaacgagtacgagtactcgcgaatccactacaaccccagaaagagggtgagaaggtggaggaacatcctcagaaggttcatgagggagagcaagaccttgtgtagatccaaacctatgtcatttcaatatgatcctggtagctactcccagaacttcgatgagggctgccatcttgatgaacctaggccagggttgcaagatgttaagtgggattcacatcattgattttgtgtaactgtggttattacatgtttaggcttgaatgtaagaaggacaatgaaatagccttttatttttgacacatgggaggttttagttactgtatggtacaactacaaagaaattaattcttctttaagtttgtatatggtgtatctcattcatactttttcgtaataccaaagttctgttaattgaaaattaatgtctttttgtatatatggtggatctaccagtagtactgatgtagtgatgccatttacttttcttactttactgtgcaatcttttgattg

SEQ ID NO: 16107 - DNA, 433 bp, Glycine max
  Clone ID: PAT_MRT3847_114551C.1
ttcgtcgttattaggtactattgaatggtgagaatgttcacctgaccaaatacaactttttctctatctaaacatatatacagatattgctgggatctgcgactaatgctaaaggatcttctttttctaaatatcgggatgcataaaacgatttggatatgcttagtacgttaattagatcatgacgcaactcattgaagcaaacccactcaattaagctcacagatttaagtgagcagaatgtaacttcacacatgggagaatcgtttcaaggtggattcttggatcccaaataagatctgggtcttgtaagaagggactgatgatcacaactcgagggacaggggaaaaagtcaaacatatatatgattttcgccaccatcggtgaccttcaattgatacgattgcattgctcactgattgcttgaattgc

SEQ ID NO: 16108 - DNA, 770 bp, Glycine max
  Clone ID: PAT_MRT3847_114552C.1
atcaaatcaattatcaaatatcctgaattggaaggtgaatctttaacattttcttccgtccattttttatcttgcatctaaaattgatggaaacctcattaactgagcacaatattggatttgctaacagagaatttgcttcgggtgtaacatctatttcattgtaaaagccaggaacttttggctttggcaataatttatcataattcaacattaaaatttaaaaacactgaagacatgtatgacctatcttctgggctttgttgcacgcacataataatactaccttgtatgtatcgtatgacttcagagaacatgcactgttctcctaatacttcatccaacagttcagcttcctctcttctctccataatttccatgctatgtcccaacaaccctgtttgtgtttgtctcagcttgcaatccacaccacttcatatttgaactcatccatcccttatccagatttgtttgaaatccttttcacagctaactctttcctttctatcagtgagcccagcactatgttgttgactcttaaccactactccttgcacccacacggaggcatcacctttagccaacccacattcttcctcccaacaaccctcaatccagtggccttgccccgagccccaaagatggctgatcgtgtcacagcagtggaagatcgtttggaacgcgtggaagccagtattgtatcgttacgcgagttcatcggcgccgagattcagcgtgcgatggcgagtcgtccttctcctccaccgggt

SEQ ID NO: 16109 - DNA, 764 bp, Glycine max
  Clone ID: PAT_MRT3847_114553C.1
ctgcgaaaatcatcttggagggatgtctcacaatccggcgcttgcatacatcttcttataggacgtgggtttcacggtgatatttttgtaaataattataacttttcaaaaacgattttttgaaaatcgtctttcagaacgctttactgagtcggtttcttcaaaaatcgtatttgaaaagacattctcactacttgaaatggcgtgtctctctttctcacttttgagctaacacaaatcatatcatcgtttcgcaaagcaaatccctcccatagtggaaaccctaagccccaatcccgcgaatggtttaggaaacaaatggggttattggctctgttgtgagagggagcaacaatttgggggtttgagggcttttgtgatgaaggagaaggaggaggaactcgcattgtttctggtgatgaagaagcgcgagaaggagcacaatgaccttcttcttaacagctccgaagagttctatgcacctctcgaaggctggtgttgatgatattctaaattcaaaaaatgataagaatgactataactggttgcaaacttcctatttcctacttctcttaaagattattctctgcttgaggttgagacttgcttgaaagctcttgaagcacttgagataacaaggatgaactttcttgctctgggaaagcaatttcaaaattctgtgccaagtatccatacctacagctgcttaagagtgaaacttacttaggtggagatttagggacatctttatagaaatcttttct

SEQ ID NO: 16110 - DNA, 300 bp, Glycine max
  Clone ID: PAT_MRT3847_114554C.1
atacatgagagccgccttacacttataacggaagacaagcagttatttcttgcactatttacccaaaaagaaaagccggccaattctttccaggagaaacagaggggcctttaacgctctttttagtgaagattatatgataagcggtgctctctgtgcccaagtgctggatggtcacacgagatccattgccggagcttcaggacgccaagcattgtgtttccaccttgatcccaagatggcacatgcacttgcgttagtccaatctcctaagaaatatcacaatatacgcgagaatga

SEQ ID NO: 16111 - DNA, 319 bp, Glycine max
  Clone ID: PAT_MRT3847_114555C.1
accaagaaattaggcaaaaaggccaccgaacatgtattataaattgaaaaaaaacgaaaacaattacaaacccaaaacgagtttttttcttttttggtgttgttgttgttacaaaccccaccaaatttgaaaagtggaacacaataatgaaacaatatattaggcatcccaaatggccaaactgcacaaaacaacagtttcaatgggaagtccaggtccaaaaccgaacaacacaccccattcaagtccatcacctggggttttaagcccattttcagcaaatttccacctcaactcaaccaagatgaaaagaacacaa

SEQ ID NO: 16112 - DNA, 509 bp, Glycine max
  Clone ID: PAT_MRT3847_114556C.1
ataaaagcaagcagggtcttgcagaactttatgagcaagaatatgttcagaagacagaccccacttctgctccattgtcatttaaagatgaacaaaagaatgaggcaagcatgctgtttaagagactctgtctgaagctggatgccctttctcattttaactttgctccaaaacctgttatagaggacatgtctattcaagctaatgtgcctgctctagcaatggaagaaattgcacctgtggctgtttcagatgctgctatgttggctcctgaggaggtatttgatggcaagggtgatattaaggaagaaacagagcttacaaaggcagataggaaaacaaggagagctaataagaaaagacaatttaaagctgaggcagtcaaaaggacgaataagaaggcacaagaaggggcgattcgtagccaagttaatgggtaaacaacaattcaatattttatatgattgttcacagaagctgcacaactaacaataagttcaaggggaagc

SEQ ID NO: 16113 - DNA, 330 bp, Glycine max
  Clone ID: PAT_MRT3847_114557C.1
ctcgtcgccctcctcaatggcaagacaaagccagagtggtacgagtggatgaaggagcgcgtcaagaacaatgttggctactcgacgccgaccgacctgccagacccgtttgcgaatcggggccagcagcaacagcaacagggcggcgcgaggggcgcgctgtccggcccctcgtccttcctttcgaacgccatcaacaacgggacgctgcgcttcgggcggggcgacgacgacgacgatatggagggcgacgattccgaccagtacaacacgacaaaatccgccacgtcgctcgacgaggacgccatgatcgaggacacgtcgtcgtcg

SEQ ID NO: 16114 - DNA, 1940 bp, Glycine max
  Clone ID: PAT_MRT3847_114558C.1
tctgaattctctaattctgtgtgtcagttaaagaaagaagcgcacatgccaaaagggatggcttcagtcaccacattttcactaatgttacagtttctgttctttatactatgttcttcgtttggtcagctaagcttagctttcacgtcgcaagagtaccatgaggctcttgagaaatccattctcttcttcgagggacaacgatctgggaaattgccttccaaccagcaacaaacatggaggggagattctggattgtccgatggctcttcctatcatgtggacttagtaggcggttattatgatgctggagacaacgtcaagtttgggttgccaatggcctttaccactacattgttagcatggagtgtgattgaatttggaagctcaatgcaggaccaacttgaaaatgccagagctgctattcgttggagcacggattaccttcttaaggcagccaccaccacccctgacacattatatgtccaagtaggagagccgaacatggatcataggtgctgggaaagggctgaagatatggacactccacgcaacgtgtataaagtatcagctacaaacccaggttcggatgtagcagcagagacggcagctgcattggctgcttcttcaatagtattcagagattcagatccaagctattcctccaaattgcttcaagcagccatcaaagtattcaattttgcagaccgttacaggggttcttatagtgattctcttaattcggttgtctgtccattctactgctcttactctggataccatgatgagcttctgtggggtgcatcatggatttataaagcatcaggaattaacacttatatacaatatatacaatccaatggccacatattaggggctgatgatgatggttacacattcagttgggatgacaagcgacctggaacaaaaatcctgctttccaaggaattcctagaggaaaattctgaagagttccaactatataaggcacatgcagacaattacatttgttcgctaatgtcgggaacacccggtttccaggctcagtacacccgaggggggcttctgtacaaagggagcgagagcaatttgcagtacgtaacatcaactagcttccttctcttgacatacgccaaatatctgaacacaaacggcggtaatgtagttcgatgtgggacttcagcagtcacgggcgaaaacctagtaacactagctaaagcacaagtggactacattctgggcaacaatccaacaaagatgtcttatatggtgggttttggagagaggtatccaaagcatatccaccacaggggttcctctctgccttccatccacgcacacactcaacacatttcatgcaacgacggctttcagtttttccattctgcctcgcccaaccctaatatccttgttggagccatcgtaggtggtcctgataacaatgacaacttctctgatgatcgacataactatcagcagtctgagccagcaacatacatcaatgcgccgtttgtaggtgctcttgcctatttctctgccaacccaccaacaacctattaggattaggaattaataatccacctataatcaagttttcaatatcgaccaatgccgttccaaatgtggttgcagacacttaaaaaaccttgttgcctatcattaatgcttgtatgcttggtgttaggctgtttgttagttccttcatccttgatgaatgtttacgtttccatcaaaagtgatgtttattagtgaagaattgtttgtttcttctcccatacaacctatttagtgcgtgtgtgcatgaatcaccttctacacgtaaccaatgctgccactgatgctatgcttgctttgctaatctgcaaatgcaggccatttcgaacaacgcatttgggtacgttaaactttcaaatagaaaaatagtgcaacattgattaccc

SEQ ID NO: 16115 - DNA, 402 bp, Glycine max
  Clone ID: PAT_MRT3847_114559C.1
cccacgcgtacgggggcgcttaagaaccaacgcttcttttctgcggaagtcatcattaccaggccttccggttggtggctagacggaacgctctgatgtacgcttgcgcgacgtgtcacaatgtcacgatatgtgacactcaccctctagggtgtgtagaatccttatgcgtactaataagctggagcatcactacacatgactccatccacgtactccctagcaaggtgacctcaaaagcaccgcaacatcatactcccggaccctcacatatctcagcccgcatctgtttctaatgcacgctagatggactacgcgtaccttacttcatatcatgtactcgacgaccagcaccactataatgtgcttcttgcgttgatagctaatgcttgattcttaggt

SEQ ID NO: 16116 - DNA, 780 bp, Glycine max
  Clone ID: PAT_MRT3847_11455C.1
atggaggagtctcagtacttgctgtggatcaagagaaaacaaatcttgaagtcacacattcaacaaccatttggaaccagcaacaacaacaactcatcatcatgggaggaaagggcttttgcagaagatgctgctaggatacttggtgggtgcatatggcctccaaggtcttactcatgcaatttctgtaaaagagagtttaggtctgctcaggctctagggggacacatgaatgtgcacaggagggacagggctagactcaaacaaagccttagtcaccataatgaagcccttcaacatcatcaaaaaaatgattgtacagttgcaacaagcaaagtctcatcttctagggcctcaactatatctacccaagaaatttgttctcatcagcctaccatgtccctttattcttccttaattgggtggggacatcatcaccacatggagtctcctgattcagaaccaaaagggcaagtgaatgcaagggaagaatttttaaaaggtttgggttgtaatgattatgttgaaacaagtttgtctgtgggacaaagtgcagtgtttggccaaaaattaccaacaactgaatcatgtggggacgaaagcatcagttataaaagatcaaagacttctatgcctcctttgcctggagttttcctcaagccatgttcaaatgatagaaacctaacttttcagtctgcagaatttgtacttggactcaagcctggaatggaagacttagatcttgaactcaggctggggaagccacagaaagttatttag

SEQ ID NO: 16117 - DNA, 378 bp, Glycine max
  Clone ID: PAT_MRT3847_114560C.1
gaaaagagcattttttttttctttcggttcagagctatgatcttttgagtcttcttattcaaagtatgaccttccctcctttgttgcctgtttgacattttagcaactggttataccaaaataggaagccgggtatgagctgaaagttattatcaacttatatctttgctgtgccacaatctgtattttcaagtcataaaaaagtacagaactacagattgaacaatttttcagccactgtatttgcaatcttcctagtgatcttcttctccttttcagcagtacttcttgcagtctttgttgggtgaggttgaactttacatttgctttggctttgactcaagaagtatattctctagtgaatgatcatggtgaaag

SEQ ID NO: 16118 - DNA, 142 bp, Glycine max
  unsure (1)..(142): unsure at all n locations
  Clone ID: PAT_MRT3847_114561C.1
ttcacnaaggngggaattttcttaananggtttggtcaaattcanggtgggttcctggaaaacanactctgttggcttgttggttggccctatttgtaatgtaatggaattgtagaccttgactatctgcaaccatggatac

SEQ ID NO: 16119 - DNA, 572 bp, Glycine max
  unsure (1)..(572): unsure at all n locations
  Clone ID: PAT_MRT3847_114562C.1
ccacgcgtccgcaaattcttgacccttctcctatacacgctcatgacctatttcaccacttaataacaaaaatgccttccatttgacctcatcatcactcactctcctccattatttcccactttctgttgttcaaatgttcatctcttcaatgatgaaaacaatcactttttgacccaaacacagtttcaactcccacattacccatgcaattcacattaaccccaacatcagcaacagaaacagcaacttcctcgaagaaaagatctcactatcaccgcatttcattctcattattcttattcttcactcatgcctagggtaaacgaatctgaaaaagatggatctgaaaccgaaaccctaaaaccaatcatggatccatttccctttccacatttagctaccacgaaacgtaattttaatttctctctcaagagtcattttccgatgaaacgcaccgttcggcccctcttcgcgctcctcctcctcctcgtcttcgctgccaccctcacctcacgcgccgtnctccgccgnggcatcctctccatcgagctcgaatcccgcgtncggat

SEQ ID NO: 16120 - DNA, 344 bp, Glycine max
  Clone ID: PAT_MRT3847_114563C.1
cttgggcttaatattttcttctatacatatatatttactaaggtggatccgcagcaggtgggacaggaaaaaaaggggcaccacatcaacaaactggtggacaagagacaagggaaaggactcggcgggggacaaccctggcgcgcaaaaacatggacgcccgaaaaagggggagagagaaccagggggggtgcaaaaaagaccaagcaaaggcatgtgcctgcaaaaaggggcgctaactcaaaaaacctggaagggggggggggaatacccccccagcatacaagcgccgagagaaggggaggacaataaaaaaacctgcggactgacgcccacggggggcc

SEQ ID NO: 16121 - DNA, 1334 bp, Glycine max
  Clone ID: PAT_MRT3847_114564C.1
ccacgcacttgtcatcaatgaacttggcccagaaacgagccaaggctctatggtaaggatcagaaggcaagatggggttgtttttccatgtgtcatcgatgtactcaacaatcacaagggactcggatatgggcttttcattgtgaacaaacactggaatcattttataaactgggttatacttgaggagcaaatcactcttgttgttcaaatcatcttccaaatatttgtattcaactcccttcaagtcaagagaagaagtgaagtgctgcttcaatggcttcaagtcaggaagaggtgatccttttgggggttattggaagcccatttctgcacagggtgcagattgctctcaaattgaagggagttgaatacaaatatttggaagatgatttgaacaacaagagtgatttgctcctcaagtataacccagtttataaaatgattccagtgtttgttcacaatgaaaagcccatatccgagtcccttgtgattgttgagtacatcgatgacacatggaaaaacaaccccatcttgccttctgatccttaccatagagccttggctcgtttctgggccaagttcattgatgacaagtgcgtggctctagcagcgaaatctgtttttattgttgatgagaaagagaaagagaaggcaaaagaagaattatttgaggctctgaattatcttgagaatgagttgaagggaaagttttttggtggagatgagtttggctttgtggatattgctgctgtgatcatacctataattcaagagatagcagggttgcaattgttcccaagtgagaaattcccaaagctctccaaatggagccaagacttttacaaccattcacttgttaaccaagttatgcctcctaaggaccaactttttgcctatttcaaggctcgggctcaaagcctcgctgctaaaagaaagaattaacaaagactcagaattcccaaggagattttaatattgtagaaagtgaaagctacttactatctatgtttagttttcgttttgttcaacaatctatgtttagttttcgttttgttcaacaatctatgtttagttattgcggttatattttcatttcaaaatgaattaagcgatataggatttcgccatgtaaaaaaaataaaaatccaaggttgttgacattttcgctatcagaatttccatcgaggtttcagtattgtatgaaatgaaagctacttgtctatgtttcgttattgcggttgtattttcatttttcaatgaattatgtgatataggatttctccatgtcaaaagatagttcaattcaatcaataaaataaacgaatgagcgg

SEQ ID NO: 16122 - DNA, 316 bp, Glycine max
  unsure (1)..(316): unsure at all n locations
  Clone ID: PAT_MRT3847_114565C.1
gtcgnangcacgcgtacgtaagctcgggaattcngctcgngcttntcnncttagtngnttacncaagnatgtntacnanntnnananagtngntncatanngttattngggngtatggtncgngatgnnnaattgncnaacaggnnnaaccattnggggtgtangannnatnntgaanncgtgggagannggggnttcnngtanncccntggtcgggnnttgngcaggagttataaantgtgggtagcacaatgtgcagggtctgttgcttattttgtttttattggacaaaacctttattctgtattccaaggcc

SEQ ID NO: 16123 - DNA, 324 bp, Glycine max
  Clone ID: PAT_MRT3847_114566C.1
tttttatttccttaattttatcgaggggaatgagatatatttggtggttatgattaactcaatgcatttttattattgaataactaacaagtttttgtttaaacacaaacaaacaaaaggggtagtgtgtaattattctgcccctcatcttgtacgaaaaaaccaatttcatgattcaaaggttgaatgtagaagaaaaggacttttaacaacactagggggtttatttcgcttattggtatcccaatctcaatgtttaattgggctagggctcccttttcggttataaattcttcaattaattagaaaactaaacccgatttg

SEQ ID NO: 16124 - DNA, 884 bp, Glycine max
  Clone ID: PAT_MRT3847_114567C.1
tttatgcgtgggcgcccccgcatccaccatggcgtgtccaaacacatttttggttctgccgcaaagtgtttgcgtgtgactctatccaacggccacgcttccatcatttctttcaacccgcttgttttccacgctcttcattttcaaaacaaagatcgaagaaaagcgataaatgccgatgccgcgtctggatcgggattagggccctagggtttttgttcgctccattcggttctgcttcggatttcgatcggaaatgtccgtaccttattcaccgacccgaacctccgggtatctcgacgcgctctcttcttttatccgtttctttctacacacttcattttcaaaacaaagatcgtagaaaagcggttgcgttccggttcggttaattaacacaccaaaaccagaccaacctttctccgtcaacatttaattccttccgtcgctagaaaaatgcccaagccacgtctggatcggaaaaattagggcgctagggttttgttcgcttcatccgattctgcttcggattccgatcggaaatgtccgaacctcattcatcgccccgaacctccgcgtatctcgacgcgctctctcaggcgatccacaagaagcttcagcgggcgttggctgattcctcgcagaggcgcaatttgttgcaggagctgtttgcggacatagctttagaagtcgatgaccgagccaaaggtaagtttgcaattaaaatcaatgcgttattcaatctgaagagtttcgtcctgttgctactgtgagtcttgtgattgattatagagtacggagattcacgtgccaacatgtgctttgagcatgttattgcagttaccatgttcgcggcatggcctgctttgctacatttcccacccccc

SEQ ID NO: 16125 - DNA, 564 bp, Glycine max
  Clone ID: PAT_MRT3847_114568C.1
cctcgtgccgttttacccttgcatttttttcttaatttcttttttgcgctctatatttcattggtgctcctcacaggatcttgcaagttcggggaaatttattttcgctgcttattacattgttatagagtttgttattgtgttggcctaatttctcccatcaacatgattaaacatttcattgcttttattttgaggaagctgcagcagcatcttgctcttcctaaagtattattggacttgtccccaaaacacgagtgatgctagagaagaatatttgttcttattattttatcatttgggcttcaaatgaatactttaaaaaaaatcaaaatttaggactaaaagtttttttttattttttttatttttcaaggtggtcaccaatatctaaggacgttactttatttattgaggtatgtaatgagcttgtataaaataaatttctttaagcattaataacttgaaactacatacggaagtgctcctaaacttctttatagtcttcactatttctattggctgacatcgtttttctgtcactttggccctcacacactttga

SEQ ID NO: 16126 - DNA, 2122 bp, Glycine max
  Clone ID: PAT_MRT3847_114569C.1
ggcttaaaagcggtttattaacactcctaaaccagcctctctccgctaaatttaaaggttagtttaatttgatttatgatcccttgcgttgctagataaatgccgatgccgcgtctggatcgggattagggccctagggtttttgatcgctccatccggttctgcttcggatttcgatcggaaatgtccgaacctcattcaccgacccgtacctccgcgtatctcgagccggacaaaatagatagcttcctgaagcaatgtcccgctttcccaactgctttcttaattggcggtccagcagatatatttgttaccgaactcactgatcaggtacatttgaattacctcttcataattaagagccgtatcctctttttctatgaagagttgaagatgtaaacccttaatgtatggttttgaattttttgttgtctcgggccagcttcagatgctaaagttcgtaccattgtgcttccattaccattcggaaattttcagacgccagagaaaaaacaaacccctgccacactctatctaaccttcttcttttccacgtttctttctacacacttcattttcaaaacaaagatcgtagaaaagcggttgcgttccggttcggttaattaacacaccaaaaccaaaccaacctttctccgtcaacatttaattccttccgtcgctagaaaaatgcccaagccacgtctggatcggaaaaattagggcgctagggttttgttcgcttcatccgattctgcttcggattccgatcggaaatgtccgaacctcattcatcgccccgaacctccgcgtatctcgacgcgctctctcaggcgatccacaagaagcttcagcgggcgttggctaattcctcgcagaggcgcaatttgttgcaggagctgtttgcggacatagctttagaagtcgatgaccgagccaaagatgtgattgtcaacaaggaagaagatggcatttctcccgcagaggatattaatgatggtccgttatgcttctacgatgtgcttgctgattattttgtgctagtgtctgagagtagaaaacctatccttgactggattgttcaactttggagccaatcatttgcttcacatatctttgccctactgtttcacaaatggttatttgaagttcatcttgataatccagaagtgcttctccggtattcatctgctctggttcaaggtgccacaaatgttttctggattgacattcaaacaaatacaaggcgattccagtctttattccggtaccttttggaagatgttgcattagaccacactcgattgaacaaaattcctttccaggctcagcgggatacatatcttatgctctcaaggttcattctattttacaacaaagctgacaaaatagatggcttcttgaagcaatgtcctgctttcccaactgctttcttagttggcggtccagcagatatacttgttactgaactcactgatcagcttcaaaagctaaaggtggaaccagtgctgcttcattacctttccgaaattaagatccttcagggcttggaattgagaatgactactagtacgagattgaaaacttgtttgtatagctttacttctcctggtggtccaatgtatcccactagagccgttcgacatgcagccagggaatcattagatttactttttccggtgggacgttacccgcggcatcttattagtttgttcttcaggttgctttatccgtggtattggccttcctcttgttggaacttcgtggtttcttgcattcaggctattttttactccgtgctggggtttatattttctacgcggaataagattgccaagccaaaatcacaatagatcctaatatctgtacagaacctgcatcatatcttcccagccgtcgtgaattctttgagccttgacctttttactttttctttagtgaaaatttgtgtacaaacaagcttgcttgctaaggttatgtatatttgttgactatggcaacagtaagtttatttaggagtgtaataattctgttcaagttatggtcaaaagacttcatagctgtagcgcactgcagcaatttatcgagaagagtaagatggaaaaaaaaaaaaaaaaaaaaaaaa

SEQ ID NO: 16127 - DNA, 630 bp, Glycine max
  unsure (1)..(630): unsure at all n locations
  Clone ID: PAT_MRT3847_11456C.1
caacagcaataacattgattacattaaaggcacaagaagtgcagaaaattacagcaatgaaggcagcagactaacaggccagtccgctccctctataccagtttacacagcctacacgtattgaaccacccacagaatatactatgttgcaaataatccaccataatacatgtataacattagcagcaacttgatgtaactgttcaacgaatcattctatttaaaaaaaaatcagcattcccctcttaacaaaaatccaaacaagccttatattcctttgcaaattcctcatacacaaatacacgtgcatagatatagtaactatcaatcccgtaacggagtatcaatcaatcacttaacggagttttaacaaaattgaaacatttgtcgttttattcaactgagacatataatgttgttaccgctaaaaacaaagaaactaaagctaaacacgaacccttataatgcaagctagacaaaaacaaaccatgtggacagtggacacgtcatcatgggaactatagatatatatggttntagttaatatatttaattaaaagttaaagactaatcccttaatatattgaaagaataattccaatcaatgaaagattaaactaaatttataat

SEQ ID NO: 16128 - DNA, 295 bp, Glycine max
  Clone ID: PAT_MRT3847_114570C.1
ctcggcattcggctcgcgcgtccccacccccaccccctccacgcccacgcacacctccaccatgtgcatcccgtcacgcgatacctcctcctccgcgcgcgcatcctcctctgtgtccccgcgtccttcttccagcgcgtggagcacctcgtcctctggctcgccggctccgtccaaagcctccggtctggaaaacacgtcggccgcaaaatcttcctcgccctcatcttcatgctcgtcatgtcggtcttcctcaaggtttcgcttctcggaacgggcgttgagatgaacggga

SEQ ID NO: 16129 - DNA, 358 bp, Glycine max
  Clone ID: PAT_MRT3847_114571C.1
gtcaatgaacatgtgtaaaaattaaggtcataggtaactctgacaaccttctaacttgaggggaccaaaaactatcatatgagaatactatgacgcatatacccaggcgattatgttctaaaaaacccaacaaattctcttgccacgagaaggcgtaaaaatggcacggtaagacctaacacctttcaacttttgataggatttcaatcctacacactcatgaggaatatggtagtatcgatctatacaaagtttcttaaaatgatgatacccatttggccaatgcctgctctgctagataaagcataatctggctgaatgatttgttggacggttcgcccagatgaagacggcatac

SEQ ID NO: 16130 - DNA, 642 bp, Glycine max
  Clone ID: PAT_MRT3847_114572C.1
ttcgggacatgactctcggcaacggatatctcggctcttgcatcgatgaagaacgtagcgaagtgcgatacttggtgtgaattgcagaatcccgtgaaccatcgagtctttgaacgcaagttgcgcccgaagccattaggccgagggcacgagacgacagaaggggggcactcagtagagaattaaataaaatcaagaaagcatgcatatgatgaagaaggtgtgtgggtttgcaatagtggtgatggcagcactttttctggtggagatgagtcccatggcagaggctgtgacttgtagccctgtggagttgagtccctgtttgggggcaatcacgtcctcttcaccaccatcgacaacttgttgccagaaggtgagggaacaaaggccatgcctctgtggttacctcaaaaaccctagtctgaggccatatgtcaactctcctggttccagaagggttgctagctcttgtggggttcccttcccaacttgttagtcactttttacttcatatatatgtaataaactccccctactgttggctggaaattatatatatatatatatatatgttgaagaaattcactcaataaatttgttgtgtatttcagttcttgacccttttcacaacaaacattattg

SEQ ID NO: 16131 - DNA, 369 bp, Glycine max
  Clone ID: PAT_MRT3847_114573C.1
cgccgtcagcggcactcgcagaacctccctcttaacctggctcacttccgtcatcaccgtcttcatcatcgccttcatcatcgtagtcggcttcgtccacggaaaagcctccaacttgacgccgtttctcccttacggcgtcgacggcgtcttcaacgccgccgcagtagtgtattggtcctactccggtttcgacatggttgccaccatggcggaagaaacaaagaacccttcgagggatatccctattggcttagttggatcattgtcgatgattactgttatttactgcttgatggcattatcccttgtgactatggttaattacacccagattgacgttgatgcagcttattctgtagcttttgg

SEQ ID NO: 16132 - DNA, 395 bp, Glycine max
  Clone ID: PAT_MRT3847_114574C.1
ggtattttagaactggatccaattttgtttgattccgctgaaaagaacatatcggggggcatttgtttttgtggccgacgcacattctttacgatctcttgaaaaatcaattttcggatttgggatcaatccgaaatggagaacgtgaacaacatttttaagtccaatcgaaatacgtagcatctattgagggattggctgatcaagcttcgccaagggtgtttcaacatttagcgccacattcgctatatgcttagagtagaaaacaatgtgcacaaggcgattagcgaagcatagacaggaatgacatgggctctgcacatgcacttggtaaggaacttgtgagatctaagaaaacggtggaccgggtctatgaaaatgaagcacaaatgaat

SEQ ID NO: 16133 - DNA, 407 bp, Glycine max
  unsure (1)..(407): unsure at all n locations
  Clone ID: PAT_MRT3847_114575C.1
ataaagctaaagatttagtattttttcatagcaacctatgacttctctcaaggaatactctacaatatcatcaaaaggaaactaaaatgtgggatgtagctggagatgattttgggtcacttgatgattgtggtattcttgaaattgctagtttgtctttagatgaaccagagttagagggtgtctttttcaatgatgatttctagtttgtgaaattcttgaagacttgaagttgctaattcatcatcttgctttataattttttttttgtaaacaaacaaagtgtacaaattgtataatgaggtctcttagtattttttgtgactcattatcataggaaaagtttttttgagatgatgatgaatatataaatcttaattctcnnnnnnnnnaannnnnanananaa

SEQ ID NO: 16134 - DNA, 209 bp, Glycine max
  Clone ID: PAT_MRT3847_114576C.1
ctacatgtatgctgctctactccttattgacattaagaatgctgctgccgtgcatacatttggttgtggtaatcgaacaggggggtagggggaaaaaacaaccaaaatctattcacctttaccgtatgcttcagctcaagttttaattcaacaaccatatgtgctaatacaagctatcgtatataggatctataatctatgacatggat

SEQ ID NO: 16135 - DNA, 301 bp, Glycine max
  unsure (1)..(301): unsure at all n locations
  Clone ID: PAT_MRT3847_114577C.1
ggggaatagtgtttaatattataagcagagattgataatgcaaactagccgaactttatacagaagtgaccaattaccaaacattaaaaaaaaaaagaagagaggcccttgaaccttacacacccattataagttccatacacttggactttcttactggctgtaccttgcgccagtaagataaggggggggggagagaaagaaacacaccacgggggggggtagcgtaacacaccatgaaacctcaccccnctccccccccccccccccccccccccccccccccccccccccccccccc

SEQ ID NO: 16136 - DNA, 1188 bp, Glycine max
  unsure (1)..(1188): unsure at all n locations
  Clone ID: PAT_MRT3847_114578C.1
actatttcaaagcgtagccgctgggtggttctacttaatttgctctaagcttttacatatagatagaaacgagctttctccttcactctacaatcttccatttctctctctctctctgcgccttcaaactacaaagaatggcggcgttgttccacttctctcttcttttcacagttctcctttcttccattctcttatcgaatcactcagtaaaatgcgacgaccatgatgaggaagatgatctttatcagggaatcaacaagtatagggaatcattaaacttgacatctctaacaaagaatgaaaatgcgaattgctttgctgatgaaattgctggccagttcaagaatcaaccttgtacgaataccacaggcgcaaacacagtaccaggcacggagcctcagttctccaactacccagaccttttgaataaatgtcaattgaatatttctaacacgagggatggaattgtaatgcctgcttgtgttcctggcctggtttcgagcgttgtccttacaaatttcacacaatctctctactcgggtaatctcaatgactccaagtatacaggaattggtattggttcagaagataactggattgtagtcgtactgaccactaacactcccgaaggaagctttgttcctgagactgagactaagactgacagtggtgccaatttcgtttctaaaattggatcgatttactgctcaatgtttttgttagttagtaatcttttcctgttgtgaacaagaggatgccgttgttcccattttagttttgttttagtattttcaatttgggggccttgctacctccataaagttcttactaatccgtgcccaggaacactgaaaataatgtagacaactgtttttctagtgaaatatagatggctgtggatacaaatcttatttttattattactatcaataataggattcttgagaagaggaataggggaacaggatttctccccaagggttgttatcttactattgtcattacccacaggttcactttcttttccttctgtggtttgaaaacgttccttcttgccaaatcagaatagaaggcaataaattgtagcattgataacagcccactagtactttaatttcaaaaaggaaagtacgttggcttttttcngaaaaaacaacgcaaaaaaaaaattagggcgnccgctat

SEQ ID NO: 16137 - DNA, 369 bp, Glycine max
  Clone ID: PAT_MRT3847_114579C.1
attttagagcgttgtgtttttttgcagcgcattcttcgtattaaaggaatgattaaaacggcggccacagttggtattcctgagaatacaggtatagcatgggcctgtgctatgaattgctctattagggggcgtgccagttctgatgttcacaccatctgctctcaagactgtgaattatggaatcctgcttgcgcacaagcaatgactatgtcgtttaatccaaaccgcgcatctgatgcatggagtgtgcaatttgtgccgcgcaccggatctcagtgtgatatcatgtgtgccactggatggactgacactgcaatgcaagatgttcaggctacaattgagtggattatttcctgtcatgaatgt

SEQ ID NO: 16138 - DNA, 261 bp, Glycine max
  Clone ID: PAT_MRT3847_11457C.1
cctttagggagggaaaaaagaagaacggaagttggatgaatcaagcaagcaaaacccaaggtcccgattatattcatcatgctgttgcccaaatgaaggtttctgattcacaccattatgattcaactagccagaattgtgtggactcctctacatcaaaagagtttgttttgttttctgtaaagttaaagcagggagatgctcaggtcactgactacaaaccaaatgatgagcttgctgctattgttgtcaaatcagcta

SEQ ID NO: 16139 - DNA, 138 bp, Glycine max
  Clone ID: PAT_MRT3847_114580C.1
cactttcgtacgcacgcgcgtgcgaaaacccgtgggggtaaggatattttagggcaaatggcaccttgcataaacaaaaggcaacaggccgagagcacaacaaccaagggcaatattatacaaggaaaacatcatgaa

SEQ ID NO: 16140 - DNA, 401 bp, Glycine max
  Clone ID: PAT_MRT3847_114581C.1
ggcttacaacacactcacaatatttattcgctaaaattttaataggaagaagaagaaaaagcaaagcaataaattataacacaatccttgccattcatgcatgttgctggttttatattcttcattggcaagtgtttgtagtagagaatttatggaggaacataaacaacgacggggctccttacttgaaaagtgccatcatcccaaaccaaagacgaagaaactatatctgcatcaatgcttccttcaattgtaagggtgaacgacctcttctgacccaaagatgagaagaccaaaacatttggcactacttggatgtttaagaaagatggatttggagttattactttggctacatacctggatgtagctgatccaacatttgtaacagttctactaaa

SEQ ID NO: 16141 - DNA, 488 bp, Glycine max
  Clone ID: PAT_MRT3847_114582C.1
ggctcgagggatgttgcttgcttggggagcagatagacttcaattagattcttctgggtaagaaaatgtcatttacagtttcaagatccattgctgtcagtgtagatcactaaggaaaagacttgaaggttcagtcatcaattatcagtataaagatgctaagttcctaaatatgcatatctaatttttaatttgctaattaatttctctttattcatttaaacaaggaatgaatcaattgataagattcattttttttacttaagtgaatttcccaactgtcttgaaactttgaaatttgcttgctggttaagaaataacttttatagactcagaatgcaattcttactccttaaaactgaacttcatttgctgaagaagcaaattcattattgaaatacttaagcttatacttcagagactgtttgactataatttgtgcttgatatctacattgtgcacctcaatatcttaaaataaggcttatg

SEQ ID NO: 16142 - DNA, 435 bp, Glycine max
  Clone ID: PAT_MRT3847_114583C.1
acctcttccacctcttcaagtcccgtattctcttgctcagccattatttacacatatctgcaactcttacgttatacggctgcagaggtcgctctttgcttgcgtgcttcctcccggccaacactctactaatttgctcctgcttgtgcctggatcacaagccctgaggcctatgcctagtcatcactattcgacaagctctgttaagcccagatgcctctcgatagactcacgcgctacgagcagtaccgaatgctctgacagctcaaggagttccggcagtaacgccgcgcctccgaggtacctgtcggttcagggtgaaacgcgaagcattattgtccatgtctcatgacgcctctacataggtgcaccggcaaaaatgtcaatacgggtaatggccactctgactgatctgcactgctcgatgagtagtcc

SEQ ID NO: 16143 - DNA, 276 bp, Glycine max
  Clone ID: PAT_MRT3847_114584C.1
tctagatcgcgagcggccgccctttttttttttttttttttttttgtgatctttgctcagaaatattaatggatacgattttttgaattatggaaataatcatctgtcaaatcaaatgtctctagttttataagttattgcatcaaagttgatcagtttctgagtgtatgtttattttctccaatgtcatactccgtgatgagtccaagattgtcaactaatttgtgatgtcttagatatcctgcacactagtaagatgaaattccaattactttc

SEQ ID NO: 16144 - DNA, 1965 bp, Glycine max
  Clone ID: PAT_MRT3847_114585C.1
aaacatcacccacctctgctctttcacaaaatccccagctggtcgaataaagatcaatctaggtgcaacctttccatcgatctatcaccctctttcatatattcctaacttgtcccccaaaatcaaatggctgcgaaacggttttttgatgattctgatcaagacaataataagccaccaggcgataaacggatgagaactacaccaagaccttcttttgcttcggtaataggagaagtggtgatggtgaaaaacttgcagaaccttttctcaggcttggagcccttgcttagaagagtggtgaatgaagaggtggagcgagtgatgaggcattgtactgtgccacgtacaataagtaggtccccttcgttgaggatcgaagcagcatcattggagaaaccatcgaactatgaactcatgttcagcaagaagctattggtccctatattcacaggaagcagaatagtggacatagatgggaacccaatccaggtgattctggttgacaaaagtggcggtgatggtgaattagtagcggttcccacgagtgtgccccaaccgataaagccagagatagtggtgcttgatggatttgtcacaaacaacaaggaatcatggacgactgaggagttcaacaacaacatagtgaaggagagaacggggaagaggccattgctcacaggagaattgaatctgaccatgagggatgggattgcaccaattgaagagattgagttcactgataactctagttggatacgtaggttcagggtcagagttgctgaagtcttgttggcccattacataaactctgtccaacctgccttggcttatattgggctttcttttctttctggttaggcgtagtttattatgaggcccatttcaaggatatgtgcaaagatgaggcctggctcttctgcaaaatatgcaacctgcctttgctgggctaatgttgctatgttttataatttcagctatcacgaaacagaatgatgctttataaatagtgataagataaatgatgcaatcctttgattatactgtgatgtcagaaaaaatgtgggaagtgacaatgaagcaggctcggacttgcgagaagggcaacaagtactacgtgtaccgtgggcctaattttagcgtctttctgaattccatatgccagctggttagagctgatatcaacggccaaagttttccgagtagagagcgaagcaacatgaccaggagctatatggagaaattggtgagagaagcatatgttagatggaatgacttggaggaaattgatgcggctttcttaacccaaggtgaaactttggagcaatttccaaacaatcatcaagcatcactaatagcatatgatcagaacgactattttggtgataaatctgccgaagttggtaactatgtaccaacccataatgcacaaattggatgcagcgagtgggcagtgaatggaacatttggcacaacatcatttgtgaatggcataccttacagcttcttagattcacaatcggacagtgacataagcccctcagttgatggtgccgcaaggtggccttaggaaaataatttagtactttgactttcagctgtaaatacgaattaacagttgaagaatcaaattaggttcagtgacttagtgtgtgaagtcgtgttggcccattacataaactgtgtccagcctgtcttggcttatattgggctttcttttctttctggttaggcgtagtgtattatgaggcccatttcaaggatatgtgcaaagatgaggcctggctcttctccaaaaaatgcaacctgcctttgctgggctagtgttgctatgttttataatttcagcaatcacgaaacatcaatgatgttttataaatggtgataatgatctaatcctttcattatactgtatgcattcaggatttgggttaagagccccattctgcttttagcttgcaaaaa

SEQ ID NO: 16145 - DNA, 1654 bp, Glycine max
  Clone ID: PAT_MRT3847_114586C.1
agcaaaccgtaggggaaggaaagaatggcagaaaccctgaaaacggcgtccttgataacctaactaaccgttttagattcgtttgaaccttccgtaacacccaactgtctcggatagcttcctgagcaactccgatgggccagggccatgaaccccccaaatcccctgcggctgcgccaccgttgctccgccgcatccacaacctcgacaacgcaatctccctctacatccacaccctgacccgccccatcgctccacgtcccctcctccgcttcctagagcttttggcggacttccgcttcttcttccccgtctccctctccctctaccttgccgctccctcctcctcccctctccggcggaacctcctcctccccctcctcctctgctccctcctcgacctcctcttcatcgccctcctcaaattcctcgtccgccgatcccgcccctcctactccaaccactcccaatacaacgccgtcgtttcggtcgacaacttttccttccctagcggccactcctcccgcgtctgcttcgtcgcttccgtcttctccctctcccgctcctcactcctcgcggatctcagccgtccacgtgtcgcaatcctcgttcgtcgctggtttgcaggagacgacgctcttgccgtggatatgctcctcgccgccatttgcgcctgggccgtgatcaccgtggtttcgagagtcgctctcgggaggcattacgtcatcgacgtcttctttggcgcttgcttcggcgttctcgaagcgatggtcacctttcgcgttctcgaataccgagggttgatttgaggttctcatggagcacatttagcatatgcttccgacgggaaagaatgcttttaattgggtttccaacggatgatgaagtcatgaaggttttagtgcattggctgcttggtcctcaccagataattttttagacctttaatactaccatcttgaaaatattgccttgtctcaactctgaactctgattcaattgttaaaaatgcttcggagctgcattgctgtcagtaatttattccttggcatttaactatctgtctccctttactcccctacataaatgtatcggctcgagatagcatacatggtacagcaaagttgtatatcatttatttgaagctttttgtcttatgttctattcagaactataagatgcatgatttacattgagttctttattccttgagcaaatttgctactgctgtcagatgcttctaacttttgcagaggtactaatgcaaagacagtttgtactgtatcgtctgaagacttgaaatgcacattatcttttctgacaattgctgccagaatatggagttggtttatgtctagcccatctccaattcccacttttcccgttcaggtgaattgagcattagtgtttgaattctggagtagtaatcatcaagaaacattatattatgataattatatgtaagtgtacgctcaatgacattctgtgctctgttgttaagtttgagcaacgaagggttttgtaggatttggttcgaaggaccgtgtgtgtttgtgtggtgtgtctgatattttggccattataaattgaaggataaaaagttgttaggtcagttcctccttttgcatgtgcctctttactccgggcgatgctt

SEQ ID NO: 16146 - DNA, 1184 bp, Glycine max
  Clone ID: PAT_MRT3847_114587C.1
atttttccctagtaattttccccttgtgcggctattccaccccactacgaaccggcccatctctcgctccctcgcgcgcgcctctctcccgccagcggcgcttttcgctctttctctcctccagcgttttgcaaaatttagatcgttttaaaggcccccaatatgtaaagctaaaaaaggaccaaagcttgcaaatatgacaaagattatcacttcaacagcaataaaaagatacaaagaaaaggttatgaacccagaaatgttcaaacttattctggaacacttttccttaaatataacactgcactgggacccccttttcctgttttgttggacactgacctcatccatctttatcttcttattaagtaggatcagttgaaagggatgatggactgctaataaataaaatctagcgaaaggaatactgaatttcttatagccgaactggacaacttaggttaaaaattgcgtgaagctataaggttagtcaaggggccgcaaatagagagtagattttataatcatcaagggacctatactgatgactatcctgttgacagagttactcagcacaagtgctacattgtttctacatgtgatcgggacttgaagaggagaattcggaagattcccggtgttccaataatgtacatcaccaaacgcaagtactcgattgagcgattgcctgaagcaacaattggtggagctccaagaatttgatgcagtaaaactaaaacaggcagagctggctataacaataatattgatactaatttcttggtcgtgaagtatgaaatcctgctacagtacctagcatattcggtcttttgctggctgggctgaattctatcggaagcttgagacttgaacaaaagcagcacttcaatggtttatacctgaaattttcttagtgtaagttggtagatttaggttctgtcaaattttgttttcctcatattgcctatctaatgtatcatggtaaaccttggagagtgtctgaactatgatgacattttcatagttctgggcttgtggcaattaactctcttgaaacgatactttttttgttgcaagagaaaaaccttattttccttgaatctaaattttattagtttcaagcttgacatgccagaagactgagttggaaactggaaatttcaaaaccactgtttttcttcttt

SEQ ID NO: 16147 - DNA, 278 bp, Glycine max
  Clone ID: PAT_MRT3847_114588C.1
ctgacaatatttttaatgaacaagtcagcaagtttgaagatgatgatgtttcaaacgatcataatcaagccaaagaatcttgtaaccaagagagcactcccatgcctgaaagttcgtttcaaaggggaaaatgtcctggtgaaaatactttgaagaaggagttatggaccaagtttgaggtagcatccacttggggatgtcaacctaaggtacccacagttcaaaagagtgctcacaaagggtttcttgacctactggaagaagcttcctgtgatgaa

SEQ ID NO: 16148 - DNA, 1164 bp, Glycine max
  Clone ID: PAT_MRT3847_114589C.1
acggctgcgagaagacgacacgaacgggcgcatctctctctctctcgcgcgcgccgcttttctctcagccagccctgcagggttttgcataatttagctctttttctccgcccacaatgggtaaagctaaaaagggaccaaagtttgctgttatgaagaagattgtcacttccaaagcaatcaaaagctacaaagaagaggttttgaacccagaaaagaagaatcttatgaaggaaaagttacccagaaatgttccaactcattcttcagcgcttttctttcaatacaacactgcactgggacccccttatcgtgttttggtggacaccaacttcatcaatttctcgatccaaaataaattggatctggagaaagggatgatggactgcttatatgcaaaatgcaccccttgtattacggactgtgtgatggcagaactcgagaaattagggcaaaaatatcgtgtagctctaaggattgccaaggatcctcgatttgagagaatactatgtactcataaagggacctatgctgatgactgccttgttgagagagttactcagcacaagtgctacattgttgcaacatgtgatcgggacttgaagaggagaattcggaagattcccggtgttccaataatgtacatcaccaaacgcaagtactcaattgagcgattgcctgaagcaacaattggtggagcaccaagaatttgatgcagtaaaactaaaacaggtagagctggctataccaataatattgatactaatttcttggtcgaaaagtatgaaatcctgctacagtaacttgcatgtttggtttttggctggctgggctgaattctaacggaagcttgggactgaacaaaagcaagacttaaatggtttatacctgaaattttcttagtgtaagttggtagatttaggttctgtcaaattttgttttcctcatattgcctatctaatgtatcatggtaaaccccggagagtgtctaaaactatgacattttcatagttctggcaatgcaaatctcttgaaacaatactttttttgttgcaagagaaaaaccttattttccttgaatctaaattgtattaacttcaaccttcacatgtcagaagaccgagttggaaattagaaatttcaaaatcacggtttttctttttt

SEQ ID NO: 16149 - DNA, 635 bp, Glycine max
  Clone ID: PAT_MRT3847_11458C.1
agtgccaggccttgttcaggccagaaactgcgatgaatgtaaaggtacggcaaggcctcatcgtcggtatgcaggtccagcaccaggtcggcgtcggacgccaactgcactaaacttttttgccagtgcgccaggttgctcgccgggcgttccatggccagggaatgatcgaacgcacggttgaaattctgcccggtggcctcatgaaaacgcccgagcaatttgccctggcgaaactggccaatgccaaaggggttggcctggggcaccacggtcacactgccgcgcaggcggccctgggcctgacacgcctgcaagcgcggcagcagttggtgcagcaccagcattccggcgatttcatcggcgtgtacacccgcttgcaggtgcaccttggggccactgccgtcgccttcaaagcgccaggcgccgatgtgcagtgtgttgccggcatcgcctggcacctgccacgaaaggtcttttgccatgccttgccctcctctgatcatttaatcgctagagattgaacacacgttcaattaacctgagcaccctggtcttttatcaaaggcatgcccgtgaccattgacccttccaaactgcgccgcgccgaccccgatgaacgccgcgacttattg

SEQ ID NO: 16150 - DNA, 221 bp, Glycine max
  Clone ID: PAT_MRT3847_114590C.1
gccagtttgatcagtcagtccaacaggtgactgactgaacagattagctgattgattaaaatccatcatgtgcagccaaaaccaaaatgagcaacaaattaactggatgcagttttcaaaagacagtcagtttatataagggcaactgatgctatttctgattataatcagatacagcatggtgactcgactcttctgggtgcggagacaacttcttcttc

SEQ ID NO: 16151 - DNA, 390 bp, Glycine max
  Clone ID: PAT_MRT3847_114591C.1
aattggtcggggccggcccgaaacaaagcacttattccccggaaaaatttgaatgaaacaaaattaaccgcactcgttaatgacccatgagccacaccaattaatttgctaacatttttacaatctcccccacttagcaacaatatgacccatgagtccaacaacaagccatgaatggtcctgaatgataatggggaacaacgcctcgatggccatttcgggcgattactggattcgccttttaaacaattcccctttttgggtaaaagacgacacacccccgagggcaaaacattacaaagaagcgagccaataactaaaatattttagacctgaaacaagaattaacaaaatccactcccaaggaacgaccattttcgtgggagtctt

SEQ ID NO: 16152 - DNA, 335 bp, Glycine max
  Clone ID: PAT_MRT3847_114592C.1
tttatagtcattggcccgagatgtatatggaaaggaggggataatactattcactggtctctccataaaccaatcataatatatacatttagaacgggcttaatgtaacatttaagcctttttacacaagaaaaaaaccttgacgagaacaatatgttgcgatataaggcttgtgcactgcccaggtaaaaaaaaagttttttggtatttataacctaagaagatgcttgtggcctaaattactaacaacaaatttgtatttactctacaaagtaggagctcaagggccccaagatgactattactaaaaatctttctttccatggccaaaatag

SEQ ID NO: 16153 - DNA, 406 bp, Glycine max
  Clone ID: PAT_MRT3847_114593C.1
attcacaggccaaagccgcatcccctaaacccaacaaatcccccttggaaaaaaaatttagctttagttattcaaactttaagtccaagaaatctaataatcaaattttacattttacggaaaacccaaacctgatttgaaatgcttatggtgccttgcacagccttctaacttttcactacccaaagagctaacccaaatctcaggaccggttttttatacacccattgcttgatccccacaaaacttaggccgtttaccacacacattcccaatttcttggctttttttctctcaaccccattgatggccattaccttcaattggggagccaggttctacaggaacaaaacccctgcccccaaaaccaggacgcatgaatgccttattaaacttaccccccaaa

SEQ ID NO: 16154 - DNA, 1537 bp, Glycine max
  Clone ID: PAT_MRT3847_114594C.1
aacaatgccactaaataagaaaaaccctgtatacttcaattacaaagcttgcaagcattgtttaattgtttgtcagctgacgagccgacgaatggtggggactaaagatctaacaaatactatgattctcattacataagtcaaaacaaaatcatgtatcccccccaaagaagagctataagattaactagaccccgctggaaagaaacactaaggtggtgtaatatatgcatgtcaacaagagcaaaaaataattgcagtatcaacttctatatctgccagatatattacagaaaatgaggtaaatcccaacattaaatatgggtgagagacaacgttagtagtcaacaatttacgcctaacctttagttcttgtaattgtgatgctaccttttccaccttcggtgcgaatttttgttttaccaaccacaggcttccctgagaaggctgacttggggtaagcagatggatcatcatcattgctttgctttgatttcaaaggaggcggtgtttgaatgtgctgatttatttccttcagagttacgtctccatgggcaccacttggtttaatgaaggcaaatggataggccacagaagaagccaactttgtcggcatatgtataaaagatttcctacctttgaagataatattacgggtggttcgagggatatgcgtttgttgaaccacattttgttcacgtgatggtttgatggcactaacctctgtaccatcaatttgaacatcatctgccactgaaaatttcaattcctcgggactgatatccatctcagcatcattaaagtaatccgcaagccacgtttcagttgattccaggtccacataatcagatgcagatgcatttcctaaagtgaaatctgatgcccctgacacccattgcgacacctctggaaaaatctccttaactgggtcttccttcccattttttaaatatgacaaagacatcccttcattggatagagattgatcgctctcttggctgttgaactgtagcatccgccgcctcttggcttgcgaataagtctccctacattcctccagttccttttgcatattatcagcattattgacattatatgccaaatcaccacaagccttaactggagttgtttcatcatctaacatgtatgaaagatcttcttcattttgagggacatcattccacagctcttccgaaatttcaaaatcggacgtccttccgagactataattcttcccatgccaatcccacggctccctagcaccatggtcattattgttgtaatccatctgagcagcacagcaaggatgaaaccaaactctccgatcactcactgatcagagagcctctgctctatttttattttcttttttcttttttctcagaaaccaaaagtaaacgttaaagaagagatctgtgtgttgtgtcgtggtgtgcctataaactgaagcacacaagtcggtccactctgcctctctctctgcctgcttgagatgtgtaaagtgtccccttctggtctcttcacttaggcctcaccc

SEQ ID NO: 16155 - DNA, 198 bp, Glycine max
  unsure (1)..(198): unsure at all n locations
  Clone ID: PAT_MRT3847_114595C.1
gtttgttgttgtgttggaagccaaaaccctagcagccggcgagaatggcagacgttgaggttgatgtggcggcggcggcggcggcggcggctgcagggcagccaannaatagaacgttcaagaagttcagcttcaggggggtatctcgacacgcttcttgaaatttcactgtcgaactcgtgaagatgttcagtgctc

SEQ ID NO: 16156 - DNA, 450 bp, Glycine max
  Clone ID: PAT_MRT3847_114596C.1
ccaaacctgtaatttctgtgtaacaaacccaaacaaaattataggataataaagtttacaatcatacaaacatatttatagaaaggaatttaatagtataattcatgtatttataatagaattgaatcggaagttatacctagatcatatagaaaatatatatccaattatcactactaataactagtaaagcatacaattctttcatattgtagcaagaaagaacaagcaaaagaggtagacattctccctgcttttctctcactcataactctcccctagaaacatccaagttaaaactcagctaatggctttggaagaaaatcctaacaaggatatgccttctcagttgatactaaaagatctgggtgcatatcatatagctaaacattatataaaattcaccacaatagaaataaggacaatgaaaatattgactaggaaaaaaga

SEQ ID NO: 16157 - DNA, 262 bp, Glycine max
  unsure (1)..(262): unsure at all n locations
  Clone ID: PAT_MRT3847_114597C.1
agcaaatggcttcctcantgatctcttccccanctgttaccactntcaaccgtgccggtgccngcatgnttgctccattcactgncctcaagtccatggctgtcttccccnccagananaccannaatganattacctccattgctagcaaccgttggaagantgcaatgcaggcnntgtggcnaccagtnggcaagaagaattttgagantctttccgacctnnnagannttgntgatgcncnntgggcagantaagtngt

SEQ ID NO: 16158 - DNA, 1154 bp, Glycine max
  Clone ID: PAT_MRT3847_114598C.1
ttttcaacaaagcacttaaaaaaaaaaacttctctctcgtgttctccccccaccctctctcaccctccacccccatgcgcactttagcccctccatgtccatcctacgccgcctccacctaaacctttgcaccaccacccgccgccgccgccttgccaccgcttccgccgcactacgccaggacaccaccgtctggaccccggcccctctctccaaggtcgagcacgccgccgagtccctcttccacatcgccatcgacgtctccgacgcgcccgatcacgccgcgtcccacacactcgccgggcagtacctccagctccgcctccccgacgcgctcaagccctcgtttctggccatcgcgtcgccgccgaagctcgccgcggcgcgtggagtgttcgagtttctggtaaagagcgtggcggggtccaccgcggaagcgctgtgcgcgttgaagagaggggatgtggttgaactcagccaagtcatgggaaacggattcaacatcgatcggatccaccctccgaagaattttggaaccgttctcgtcttcgccactggatctggaattagtccaattcggtcgcttattgagtcaggatttgatgctgcgaagaggtctgatgtgagactatattatggggccaggaaccttcagagaatggcttatcaggataggtttaaagattgggaatcttccggtgtgaagattgtgcctgtattgtctcaaccagatgagagttggactggggaaagtggctatgttcaggctgcattttcaagagagaagccaatatctgacccactggcaactggtgctgtactttgtggacagaaacagatgaccgaggaagtgacatcaattcttgttgctgctggagtatccgctgataagatattgaagaacttctgaccaaaatggacttttgggcactgttgtatcattttttgaatttaaaatactccataattatttcattgcctttgctgaggatcaagcatctcagcgtagaatgtacaataaaaaacaattttggaattttagtctatatataagaatttccggggtccaaatagaggacgggaataccaggcttaagaaagttgaaaaaaaaaaaaaaaaaaaaaaaaaaaaaaaaaaaaaaaaaaaaaaaaaa

SEQ ID NO: 16159 - DNA, 1255 bp, Glycine max
  Clone ID: PAT_MRT3847_114599C.1
acttccgccgccacttctcactctgactgaaccacctcaccaaacaaaactaccacattaaaaaaacatgtcactcttgttctcaccgccaccttccctcacgggcctcagccttcacccccatgtgcactttagcccctccatgtctatcctacgccgcctccccttaaaccttcgcaccacccgccgccgccgcctcgccacccgtttcggccgccctacgccaggacaccgccgtctggaccccggcccctctctccgaggtcgagcacgccgccgagtcgctctttcacatcgccatcgacgtctccgacgcccccgaccttgccgcgtcacacacactcgccgggcagtacctccagctccgggtccccgacgcgccgaagccctcgttcttggccatcgcgtcgccgccgaagctcgccgcggcccgtggcgtgttcgagtttctggtgaagagcgtggcgggatccaccgcggaagcgctgtgcgcgttgaagagaggggatgtggttgaactcagccaagtcatgggaaatggattcgacatcgatcggatccaccctcccgagaattttggaaccgttctcgtcttcgccactggatctggaattagtccaattcgatcgcttattgagtcaggatttgatgccgggaagaggtctgatgtgagactatattatggggccaggaaccttcagagaatggcttatcaggataggtttaaagactgggaatcttccggtgtgaagattgtgcctgtattgtctcaaccagatgagaattggacaggggaaagtggctatgttcaggccgcattttcaagagagaagcaaatatctgacccactgacaactggtgctgtactttgtgggcagaaacagatgaccgaggaagtgacatcaattcttgttgctgatggagtatccgctgataagatattgaagaacttctgaccaaaatggatttttgagcactgttgtatcattttttgatactccataattatttcattgactttgctgagtatcaagcatctcagcctgaaatgtacaataaaaaacaattttgaaattttagtctatattagaatttccggggtccaaatataggacggaaataccaggcttaagaaagtcgaaaaatacttgcgagggttggtttgttggcactcttgcaagccaatcttttgttctatcaatgcctgtattatcacgcagccatcatcgatatattgacattaagattgacactg

SEQ ID NO: 16160 - DNA, 488 bp, Glycine max
  Clone ID: PAT_MRT3847_11459C.1
tcgcgatctaggaaacaagaactgagagacaggaagaaatgttgtagctgaagcagtagatgactctgagacacagaaaagatttaggcaatcataaagtatgacaaaaaaggattttccatacaataaacagatattttctttggcagaggtggaaagaactcaagaatgacaaattgcaacagatattatgccattttatgaattttgttaagcatattgcaggaagaaacagaatagagaagtaaattacaagggttcgttactggcagcatcaaagataaatcagccaaagttttcagagcatcaaaagcagaaccttcatctacaaagagagaagtaaagggaagggaggaggatgataacattaataaaaattgcactatgggtgggaataacaggaaaaatttgaagcctggaaaagtggtcaggggaaaagtgtacaagacatacactaatacgaattacaaaattcaaacaaaatgtat

SEQ ID NO: 16161 - DNA, 176 bp, Glycine max
  Clone ID: PAT_MRT3847_1145C.1
ggctcgagcactgccactgctccctatatgaactcatcacgtacagtgtgggcgtcatttttcatataacacgcagcgacagtgcctgcagagcctccgggtatgagctggactacgagcccttggcgcactcgtatgtccactccttccacagtccatacaatcctctatgatca

SEQ ID NO: 16162 - DNA, 586 bp, Glycine max
  Clone ID: PAT_MRT3847_114600C.1
ccacgcgtccggactctgcagtttttttttttattcacttatataaacccttcatcaatcttgatcagggtttttcttttctcttaccaactgcacatatattactctatatctttatgatttatgtattaaataacatcttcatctattcatcgtattcttacgggacatgggtattgtttgttttttaagagaaccagaaaaaaaaaaaatcttttttttgggttttggtgtgaccaaatatatgggtgaatacttatacatgttttgctatgctctcttttttctttgtgtcttgcactgttggttgcttaggaattgggattgttatctaatcaggaggttttcaatgcaaagaaacaaactttttttttttctttaattatttagtgatgcagttgagtgttacttctagagtgtcagggtctgtctttagactggttatgacttatgagtgtgtttatgttttatgtgcaacaactgtataagaatatttattggttttaagagaaaatgaggcaattttataggttgttttcggtggaaattggagcatggagggaagagcagagaattaccatgctgc

SEQ ID NO: 16163 - DNA, 390 bp, Glycine max
  Clone ID: PAT_MRT3847_114601C.1
ttcggcacgaggcagaaccccacttatagaacatttgctccaaaatcaaacgtttgtggaagatgttatgtctcggaccccgcttaagcgcattgcagaacctgaagaagtgtcatcgttggtggctttcctttgcttgcctgctgcatcttacatcaccggacaagttatttgtgctgatggaggagtaactgtgaatggatttcttcccagcatgagaattacctgaaattactttagctgcttttctatggaacaaatgattctcattggatttcaatttttcttccttctagagtactttgtctatgagaatgagtgatcttattaaactcatgaaaaaattgtataataatagctttaatatctttttctttcaaaaaaaaaaaa

SEQ ID NO: 16164 - DNA, 193 bp, Glycine max
  Clone ID: PAT_MRT3847_114602C.1
ggggcgtaatctgtagattttcaatcatacatgcgaatcaaggagaatttcacggggccataaaacaaaaatggattatcgcatgaacaagatgcctttgtatgcccattcaaatgaatgcttatttcggccagaacaggtcacaaaacttaactggaggacgagtgtcaataattgaaaaaacccccttttt

SEQ ID NO: 16165 - DNA, 246 bp, Glycine max
  unsure (1)..(246): unsure at all n locations
  Clone ID: PAT_MRT3847_114603C.1
tggnaaccgatgcctttgnancgttnccatccctgacgtnatgaagggctntatncgnccngacatngnnaatttngtacaatnnaacatntntaagaacagccgnnanncatacnnngtgaggggtngngctggtcaaaaganctnngnnnaatnntggggtannggncgagggggggtnnnntatnnnnngtgttaanggaggnggaacnaaaanngccggnnaaggagnntttggaaaaatgt

SEQ ID NO: 16166 - DNA, 464 bp, Glycine max
  Clone ID: PAT_MRT3847_114604C.1
attaaaaaaccaaccaaaacaaaagaaaaaaaaaattgaaaaacccctggtagggagaccaggacccaaaaaaaaaggcaaaaagaaggagattcttgtaaatattttataaacaaaaaaaacttttttcaaaacacacaaaaccggggattttctatacagaaaaaaagtgtgattagcacgcatataaaaaattcaaggacggggataaagaaaaaaacctgaaaaaaaacaaataaaaatgccatcaaacaagaagaaagagaaaagtatgcagcccccgatgcaagagagaatgggaaagcttttataaaaaccaggtgtaaataccacgggaccacagtgtaataaaaaaggccaagaaccaagggccgacctgtttttttaaaaaaaaaccaacaggacgtttttttccttaaaaaaaaagcccgggcacaacgtggaaaaacatttatttgggcccc

SEQ ID NO: 16167 - DNA, 426 bp, Glycine max
  unsure (1)..(426): unsure at all n locations
  Clone ID: PAT_MRT3847_114605C.1
ttacaaaacaatacatgtttgattgaaacttttatatcacatgacatgaccctttacgaacataaacatatgtttgggcgtatgcatattaaagtaacaagtagcaaataggttattagcacagaacataaacaaaacaaaacaatccttaacatggttcatgaaaacaacttataagttggagtgtatagactccatatcgacgagaacttgatccacaatcttccaactaccatgtgattgttgaaccatacccttgttctcctgaaccctccacgccacgggaacaagatactcatctttcaaagcatgcatgctcttgttcacaagtgcaatgtcacgattcacctccaaattgaaccctcccttctacccttgtgttccagcaactccatgcaagtaagcctncaagatatgcgcactgac

SEQ ID NO: 16168 - DNA, 1013 bp, Glycine max
  Clone ID: PAT_MRT3847_114606C.1
gaaagatattccaacaccatggtaagagctccttactttgataaaaatggaataaaaaaaggtgcatggagcgaggaagaggataagaggctcatggcttatgttgagagacatgggcatcccaattggcgtcaactaccaaagtttgcaggattgcaaagatgtggaaagagttgcagacttcgttggatgaattaccttaggccaaatctaaaacgagggaactatacccagaaagaagagcaaataatcaaggatttgcataaaaagcacggaaataaatggtctctgattgctgaaaatctccccggaagaacggacaacgagataaagaactattggcacagcaacctaaagaagttcctaaagggcaatgagaacaccccttgtgatgatgatgatgagttaaagtccactgaatgcaaagagtttgaaaggtcaatgaacaaggctcatagtgctgattcccaccacattctggagagttcagtgtccatttcctcagaaacttcctacactgaaggcaattccccttcattctcctctagtcatacaacagaatcatcaaccctttccaaggaagaagatagtgttgtttcatggcaaacaatggatgtgcttagtagcaatttctggactgaaccgtttatttcagaaaatgctcttaatcaagactactttcccatttcatcctacggaacagaaccatttttcttgtggtagttgtgaacagttgttctaccaagtggctctagaatttccatagagttatacagcaaatagtgttgcatttttgctagtaagttcttgaaatttgaggaatttgggggaacttagtcacctgttatttcttaatttccaaatgaaggggaaaaaagagaaaaggtttgtgtcagcaactttgttttgcagaacaagcactcaggttatggagagaatcagaatatgttgtattttatacatgatacagtgaaaaattacagaaccaattgcataaaaaaaaaactcgagac

SEQ ID NO: 16169 - DNA, 389 bp, Glycine max
  Clone ID: PAT_MRT3847_114607C.1
gggtggggtttttttttttggggggggggtctaattttattgaaaatttcatcataataccggcggctttttaaggggcctaaattacaaaacacgcccttttcagcaccagtttttaaagcaaaggattaatggggatttcgggattaaaaattttcctatttatccacgccctttttaccataaacatgaaaaaatttttggaaaaatgccttgaagggctcatatgaatccttcacattatcaacagcacaaatttctggtgtgctatgcattgacaactggggggcccctacataaacagggcgaatccctcccccactagcaaaaataggaccaatggttgaaccacattacatgtttttgcccaccacaaattcctgaacggg

SEQ ID NO: 16170 - DNA, 419 bp, Glycine max
  Clone ID: PAT_MRT3847_114608C.1
agggcctcgtgtcatccttggaagtggttaaccgaaaccgggtccgcgtgcacctgcacagcccgatctcgccctctggatcacaatacccctccccctcgtcgtccggcggacctatcacctcgccccttccctcgtctagcagccccgcaccataccacttcacgatcggctcggtcgacagctttgaaacgcagcttacggctgcgcaggaggagctgggcatcccgtctcaggagcgcatacccgtccaatacaaggaggagggcagcggatggtcagtgctcatctcgcttgcgccgacgttgttgctgggagggttccttttctggagcatgaggcggtcgccgatgggccgtgggggtggatcgggccgaatctttggcgtgggcaagagcaaggccagatgttcaacagga

SEQ ID NO: 16171 - DNA, 593 bp, Glycine max
  unsure (1)..(593): unsure at all n locations
  Clone ID: PAT_MRT3847_114609C.1
cccggaatttcccggggttccgcccccacgccgcccgcctatcttcctaccctatctccgttcttcttttattactctgaaaggctgatagctccagaccgcatgtcctagagccgaactctctctggctgcgcttacagaactgctcccgaccccagactaggagacacgccgggaaggggactgctgggacaagatcctagcaagccagaagaggcctacatgtgctttgcttcgttttcatgcctggtaattatatgaaggtagaaggagcaagggaacataacagacaacaaaggagtgtatgcttggtgccaaggtgttggagcaaaatggcacacgatgtgtgatgctgaaaaagcaccttattgggcaaagtgtgagaaaaggaaagtgcaagggcatagaagaacatgagagcttatctcaagaaacaggcgtaagtgcctacctggggagatgaagaagaatctctgaagtctgtgtctaaggtgaatgatgaggatcatgacgaggaatgtagtggtgatgagcaggatnacgattagcagaatggactgatgataatagcatttatgttgcttatgatgatt

SEQ ID NO: 16172 - DNA, 147 bp, Glycine max
  Clone ID: PAT_MRT3847_11460C.1
aacgtacgcaaggcgggtgtgagtgtgtcacagtcggacaaagacatacatgttcttctcaagatataattatctaatgatcacatctccgtcttctatatattatcagtcgccgagtcccgttaaaaagcagcaccaccatcagca

SEQ ID NO: 16173 - DNA, 310 bp, Glycine max
  unsure (1)..(310): unsure at all n locations
  Clone ID: PAT_MRT3847_114610C.1
atatctatgtttgcttgtttactaaatccccccaccactctttcaacnacacatncttcggcnagacagttaagggcgctaactccttaggacgctaaatgagagtatgtggtgagagggactgatggaggtcggatctccacatggaaaaagaaaggtggacagaccaaccgtgacaaggaagccagaaagcatggtgagaactggaaagagacgcagactgagacaaagggacccgccagcagtggtatcgagaaggacatcaagatatggacgccaaaggcaaaggagaaagctacggaggcgaaaa

SEQ ID NO: 16174 - DNA, 321 bp, Glycine max
  Clone ID: PAT_MRT3847_114611C.1
cggtgttaggaggtgaatacatggaaaaactaataataaaagacaaaaacagatatatttcaagacaatgttttgtgataaaggatcatgtaattacccggaaatgtggaaatgagaagataaacattattcttacctcaacaagctcggacaattttccttctaggcttgatgcattcatgtccaaccccaatctctcaagttcagcttcaagctcagcttcaattttgctcatggactcagaactttgttctaccttttgatgatatgattctttagagtcaattcttggagagttatccaagtgcttttcaggggaaa

SEQ ID NO: 16175 - DNA, 2370 bp, Glycine max
  Clone ID: PAT_MRT3847_114612C.1
caatccagctcgagcggttcgagggtgcttgatcatgttttgatgaagagccagttaagccaatgaaataattgtaatttgatgatgtgaatgtgtgggtattaatgaaactcctatggcatacgccgcaacggaaattcggactggcgtaaaaaagccaaactgccaaactagagtgatgcagaggtagaaaaaaaggtgccaaccatttccaaatctcctacaccaaagttgagtgcttgtgttcactcacacccacaaccccaacaacaacaacaacaacacaagagtctcaaaattcagcctatataaagcccaattccccccatggagcctccccaaacttgattctgcccaacaacattctccaaaatcacctcaaaaaaatttcaacttctcgccatggctgatggtagtagtagcaacaccaagagaaattccctcatcctccatcaccccacaaacttaaagggtggttggaatgctgccatcttcatcatatttgtggaatttgctgagagatttgcttatcaagggttggcaagtaatctcatccaatacctcacaaatgttttgaatgaaccaatcacacaagcagccaaagatgtgaacacatgggttggtgcctcctctctcttccctttgcttggtggcttcatagctgattcctatctgggtcgcttcaacaccatactcttgtcctcagtcatttatttcgggggcatttcttgacactttcagtgtcggcactcaaacacaaattcctttttttcttggcactttatgtccttgccatcggcgacggaggtcacaagccctgcgtccagaccttcgccgccgatcagttcgacgaggacacgcctgaggagaaggatgccaagagctcattcttcaactggtggtacttggggattgtggctggctcaactgcttctgtttttgttgtcatatatcttcaggacaatgttgggtggggagtggggctaggagtgctggcaggggtgttggctttggcattggcactcttcttgttgggaatcaaaaggtacagaaaggaaggccctgcagggagcccattcaccaggctggcccaagtctttgtcgccgcatcgcgcaagtggcgcgtgcaggccacgcacggtcaccacaattattgctatgacgaggatgaggagcatcatgagccccataatcatctccatgttcaacccaaaatccacactctcctccatactcatcaatatagatttttggacaaggcagcgatcatagatgaaattgatgccaagacgaagacaagagacccttggaggctatgttcagtgacacaagttgaggaagtgaagcttgtccttcgtttgattccaatatggctaagttgcttaatgttcactgttgtacaagctcaagtgcacacatttttcatcaagcaaggtgccacaatggtacgttccataggaccacatttccaagtcccaccagcatcgctccaaggcctagttggagtcacaatactctttgctgtgccattctatgaccgtgtctttgtgccactagcaaggaaaatcacagggaaacccactgggataacagtgctacaaagaattggggtaggacttttcttgtcaatccttaacatggttgtgtcagcacttgtggaggccaaaagggttggtgttgcaaaagagagtggcctaattgatgacccaaaagcagtgttaccaatcagcatttggtggctgcttcctcagtacatgatcactgggatctctgatgcattcacaattgtggggctacaagagttgttttatgaccaaatgcctgaggcacttaggagtttgggggctgcagcatacattagcattgtgggggttgggagctttgttggcaacattgttatagttgttgtggagggtgtgacatcaagggctggtgagaagtggctaggaaacaacctcaatagggcacaccttgattacttctattgggtcttggcagggttgagtgctgttaatttgtgtgtttatgtgtggcttgccattgtttatgtgtacaaaaaagttgatgagggtcatcaaactagtgaccaacagggttctagccacaagaaatacaaacctggagtgtgaggggaaaaaaaattactgtttggcttctgatatatgcagcgaatgccaaacataccaagtccaagatgagagttaagtatagattaacattgtaattccaataaatagtaatcttagttgcatcttagagagagaggctaatagtttaaaactagttatatttagttaaaactataaatatttgaaggctttcttaagcattgtataaaatcattagagttaatatataatttaattctgg

SEQ ID NO: 16176 - DNA, 339 bp, Glycine max
  Clone ID: PAT_MRT3847_114613C.1
atcaacatcactcacgtgcatgacataactatcggatgcttgaacattatcatcattacagattgtcattttcttaacatacacttatgacaaatgtccaatgatatattggctactcgtgaagacaaagacagttcaacgtcacaagttcattatgtttcgtgcaatatgactgcgaaatgtaagaaacttagcatgtcagtctcgtcaacgagttaccagacctatatatgcacaatcaacacgaaggttcccacattagacggaaagctctctctcggattgattggctgcatcatgctaagattgatactatatcacacactcaccagttccatt

SEQ ID NO: 16177 - DNA, 223 bp, Glycine max
  Clone ID: PAT_MRT3847_114614C.1
ccgttcggagtctccggcggtcctactatccctactactactctactctatttacacggaataacaacatactatctccctactccaatacatagcccagagcggctccgttagggtttagtcctgtaccatatcgtgtaatctaatttttcatccgtaaaaatcttatcttgtggcgacgagatggcggaggttcaagtgcagcatcagagtccggtgtcag

SEQ ID NO: 16178 - DNA, 536 bp, Glycine max
  unsure (1)..(536): unsure at all n locations
  Clone ID: PAT_MRT3847_114615C.1
aaacaaaaagggtcccttttattaagccacttactaaaagaaaaagatttactttattttaggggggggagggggagaacaacaaaaaggggggggttttggcctatggactcaaaaaaacgggaatttctaccaattccgctccaagggggctaaacataaggaaagagtctccttattggggcaaccggggaggggattaaaggaatggggcagggcttatacgggggaatatacttaaataggcaagcatagcaaaagacaaaccctgaaacggaaactacaggggggtttaccccgcttttgggagcataaggggcaaattggtctggcgggggggaggggaatcccttttttcgctacctttggggggggaggggagggggttnaagaggaaatactggagggagctgacattttctcctggggggagggggaccaccattccattattttaaaaaagaacacggggggaatcaatccgggtggggcatagtcaagtacaggggacgaacaggtgagcaatgctccttgga

SEQ ID NO: 16179 - DNA, 343 bp, Glycine max
  Clone ID: PAT_MRT3847_114616C.1
acccttaactgttggtcaaccatctgcactcaccggccttgctggaagttaccttatacttgcaacttaaattctctttcaagcccatgtcaccacactcgtccttactataagcttacgagtggcgcacgtggtatcataatttgtggataagagcgtgtactttgatttgtaggatctgggccactctacttggcagtgggacttgtattgctctaatgcaccttcaccctacaacccttttcagagcaagttcttaaagacatttgctgctccattcacaaagaggggattgttactcaagtgtctgattttgggaggtggtttcacccattcatacttt

SEQ ID NO: 16180 - DNA, 500 bp, Glycine max
  Clone ID: PAT_MRT3847_114617C.1
cgatctaaccaagacatggttagaacatcctccggggttgtcaaacttaaagaaagctatgtagctgtatgagatattacatcccaaaagaaagttgtcgcttatacgaccactattcaaacttcacacggcccgtaacggaacaacaaaccgactgctatatatcacgttcgcacctgtaaagaatacaaaggcttcacaaatactgtcctattgcaacctcttctttttttttaaacatctccatattcttggcattattgaacaaacaatgcatgcccttcattcgatacccaagtaaaccaagtaacccatcttaagggcctatgggttttatataacctccatgggaaagatccttagccctcacaaattctgctaagtggacataatcatccaaagagatctttgaattcagaatctggaaaaagcgtatggttgtcctgataccaggggggggaaagtcaaaattctcctaaacagcaccaattgtgagcacg

SEQ ID NO: 16181 - DNA, 295 bp, Glycine max
  Clone ID: PAT_MRT3847_114618C.1
cttcctttttttctaacaaaagcttcaataaacggggacgggaccctatcactagctactcccaaaccattttttttcataatacatatttccctcaatttatatagaactcaatacaaatatttccaagaaaatttaatgtacaatattcaacttcttcttaaatccaacccaattcacaacaaatctccattgtttattcacaatgaaaagcccatatcacagtctattctgactgtagaatacattcatcaaacatttaataacaaccccatctttccttctgattcttacc

SEQ ID NO: 16182 - DNA, 1109 bp, Glycine max
  Clone ID: PAT_MRT3847_114619C.1
ggctcgagctcgagccgctcgagccgattcggctcgagagcgacacgtatcttcatcaataatcgcagaagcagtttccggtgcatctcatcgtcttccaaaatgaacgacgcagatgtctcgaagcaaatccagcagatggtgcgtttcatccgccaggaagctgaggagaaagccaacgagatctctgtatctgccgaagaggaattcaatatcgagaagctgcagttggttgaagccgaaaagaagaagatcaggcaagaatacgaacgcaaagagcgccaagtcgaaattcgcaagaagattgagtactcaatgcagctgaatgcttctcggattaaagttcttcaagctcaagatgacgtgatcagttccatgaaagaagctgcatccaaggaacttttgaatgtcagtcatcaccatgatgatcatgtgtatagaaaccttctgaaagatctcattgttcagtgtttgctaagactgaaagagccttctgtcttattgagatgtcggaaagatgacctgcagttggtagagcatgagctggattcagctgcccaggagtatgctgagaaagcaaatgttgatcccccagagatcattgttgacaaccaagtctatcttccacctggacccactcatcacaattctcatgatctctactgctctggtggggtggtgttggcttctcgtgatggaaagattgtgtgtgaaaatactcttgatgcacgacttgatgtagtgttccgtaaaaagcttccagagatccgaaggcagctctttggataagttgttgcttgaatattttgattgtattgtttcgttacccctgtaatgtttatatcccgaagcataagcttgtctttggagattaatagctatcgtgccattgcttctgtcaacttataattgtcttttagataacaccatatttcggtagtccagttgttcccatattgtgtatgatgggggggcatgcgttgttctagattttagcgtatgtaatatattgaacattactgtcaacattatgacggaaatataacgttctatattgtcgtatctgatgcaaagtaaaagcccatatagaatatgggttggtttgatcc

SEQ ID NO: 16183 - DNA, 672 bp, Glycine max
  Clone ID: PAT_MRT3847_11461C.1
gttggcgcacgcgttctcgcccacgaacgggatgttccacctggactcggcggaggactgggtggcttccggcgacgtgacaaaggcgtcgctgtcgaacccggtggatcttgaatccgtggcggtgcatgagattgggcacttgctagggttagggcactcttcggttgaagatgctattatgtaccctacgattaccgcgaggacgaggaaggtggagctcaacgaagatgatatacaagggattcaggttctctacggttccaaccctaatttcactgggactcctgctacctcttcgcgtgagagcgacacgagcgatggtggtgttcggcacgtgggagccacgtgcggtgtgttcttctctcttttgttcttcgttgtgtttggattgcacgtgtgagtttttgtaggacgggttttttttttttggttgtttgggagttttgtacagggggggcgtttctgatacgcacgcgggtatacggatacgtagtgtataggatttcgttttggtccgatacggtacgctttgtaccatcattccttagcattctttttgcgtgatggtctattaaagaataataatatacagttccaaaaataattctttgaaattaaatgaatctagcattttattgtggaaaataactttattttatcccctccttt

SEQ ID NO: 16184 - DNA, 1665 bp, Glycine max
  Clone ID: PAT_MRT3847_114620C.1
ttattgaggaccccagcatgtcttgggcaccagacgcccgagccgattgaggtcaataaggagaggtgaggtgaactcgtgtggggggtggtagtgtggcagcgacacgtatcaacttcaataatcgcatcgcagaagcagtttccggtgcatctcatcgtctccgaaaatgaacgacgcagatgtctcgaagcaaatccagcagatggtgcggttcatccgccaggaagctgaggaaaaggccaacgagatctctgtctccgccgaagaggaattcaatatcgagaagctgcagttggtcgaagccgacaagaagaagatcaggcaagaatacgaacgcaaagagcgccaagtcgaaattgagcaagaagattgagtactcaatgcagctgaatgctactcggattaaagttcttcatgctcaagatgacggagtaattccatgaagagaagctgcatctaattggaactgttgaatgtgagttcatcatcatgaatcatctccatgaagaaaccttcgtgaaagatctcattgttgagtacttagctaagactgaaagaaccttcggtcttattgagatgtcggaaagatgacctgcacttggtagagaatgtgctggattcagctggctcaggagtatgtcagtcaaagcaaatgttgatcccccagagatcattgttgacaaccaagtctatcttccacctggacccagtcatcacaattcctcaggatctctacatgctccggtggggatgggtgttggcttctccgtgatggaaagatttgtgtgtgaaaatactcttgatgcacgtcttgatgtagttttccgtaaaaagcttccagagatccgaaagcagctctttggacaaattgttgcttgaagattttgattgtaatgtttggttacccctggaactatatcccgaagcataagcttgtcttcatgtcttggacctgaatagctatcaagccattgcttctgtgaacttataattattgtcccttaaattacgtcattttcggtagtccagttgtccggcgttctagatttgatttacttatgattgttatgacgacaagtgttttcagctttgagcttcttggcaataaagtagcagatgtaatatatattgaaccattactgtcaatattgttgacaagaaatatagtaaccgttgtcgtgtcttgtcgcaacttcagaattagtaagatgaagttttgaaatttatcataagaagcagaagaaggagacacagaaagtaaaatcgaaagctttgaacagaaagagcgaccctatcatcaacacgatgaaatcgaagaatctcaattcaaacattaagtgcccatattgtgacagaaacacagtcaacgaaaaaaacaacaatggcgtattagttaggctgacgcgtcggtgatggacaacgcgtcacggcccaatacttgcagagcatctaggcagagtggttccaaaagaaggagtcaaaacggtgacgtgttcagatatcattgggacatttttctttgcttcgttttaaagtacgaaaggaaaaccagtaagctagcacatagagactatataagtctgtgcataggtcggcgacagcgtatgaaaacttgtgtttgttaaaaaacaattttgtaaaattaattttaattcaagtttt

SEQ ID NO: 16185 - DNA, 517 bp, Glycine max
  Clone ID: PAT_MRT3847_114621C.1
cccacgcgtccgcccacgcgtccgtacggctgcgagaagacacagaagggggtggtagtgtggcagcgacacgtatcaacttcaataatcgcatcgcagaagcagcttccggtgcatctcatcgtctccgaaaatgaacgacgcagatgtctcgaagcaaatccagcagatggtgcggttcatccgccaggaagctgaggaaaaggccaacgagatctctgtctccgccgaagaggaattcaatatcgagaagctgcagttggtcgaagccgacaagaagaagatcaggcaagaatacgaacgcaaagagcgccaagttgaaattcgcaagaagattgagtactcaatgcagctgaatgcttctcggattaaagttcttcaagctcaagatgacgtgatcagttccatgaaagaagctgcatccaaggaacttttgactgtgagtcatcatcatgatgatcatgtgtacagaaaccttctgaaagatctcattgttcagtgtttgctaagactgaaa

SEQ ID NO: 16186 - DNA, 1951 bp, Glycine max
  Clone ID: PAT_MRT3847_114622C.1
ctaggcgtccgtagtattatttaggctagagaataattagtgaattaaatggcatattattaaaaactgttttcgttacgcttgagaaatacaacgagctgagagaggagacaagaaaagaaagagaaagagtttgcagagttgaattccgaaagaggaatggcgaagcacgaggagcttcctatcccgattaacaataacctagaacccgtctatggcggaggttccgcactcgaagaagctcagcttcgtttcgataatttgaagtccaaattcgtcgaaatcttcggtcatcatcctcaaatcttcgctcgctcacctggaagagtgaacttgattggggagcacattgattatgaaggttattcggtgctgcctatggcaattcggcaagacacgatcgtggcgattcggaaaaatgaggcggaaaaggttctcaagatagctaacgtgaatggtgaaaaatattcactttgtacttatcccgccgatcctctccaggaaatcgacttgaagaaccacaaatggggacattattttatatgtgggtacaaaggtttccatgactatgcaaagttgaaaggagtgaatgttggtgaacctgttggacttgaagttcttgttgatggaacagtgccgacaggttctggactatcaagctctgcagcgtttgtctgctcatccacaattgctattatggctgcttttgatgtgaacttcccaaagaaagaacttgcacaagttacatgtgattgtgaacgacatattgggactcaatctggtgggatggatcaggcaatctctgtcatggccaagactgggtttgcagaactgattgatttcaacccaattcgtgcaacagatgtgcaacttcctgctggtgggacttttgtgatagctcattctttggcagagtctcaaaaggctgttactgctgccacaaattataataatagggttgttgaatgccatttggcttctattgtgctcgctataaagctagggatggatccaaaagaggcaatatcaaaagtgagcacactgtctgatgttgaagggttatgcgtatcatttgctggtatttataactcatctgatcctgtacttgctgtaaaggaatatttgaaggaagaaccatatacagctgaagaaattgaagcagttacaggggaaaagctgacttcatttttgaacaataatgcagcttatttagaagtgttaaaagttgcaaagcaatacaagttgcatcagagagctgctcatgtgtattcagaagccaagagggttcatgctttcaaggatgtcgtatcttcgaatctaagtgacgaggacatgctaaagaagcttggtgaccttatgaacgagagtcatcatagctgcagcgttttatatgaatgcagctgtccggagttggaagaacttgtaaatatttgtcgtaacaatggtgctcttggggcaaggcttactggagctggatggggtggttgtgctgttgctttggtgaaagagagcatagttccacaatttatccttaatttgaaggaatgtttctaccagtctagaatagacaagggcgttattaagaagaacgatcttggcctttatgtatttgcttccaagccatcaagtggtgctgctatcttcaagttttagtgttctttaacccgcttcccttcttatggctgcgactttcttcccctgagatctagacacagattagatgcaatttctgatggagtaagattaaatggtaccatattttctttgttaaattattttagttgatacgatgaaagcaaataatgataatattgccgaatggctaagtcatcttctgtaatggaaaaataaacgtgttatcacgaaaacagcgtttaaactcttacgtagttgctatgattagataattgtaaaaatccttaatgttttaatatatattgattttggaacc

SEQ ID NO: 16187 - DNA, 1999 bp, Glycine max
  Clone ID: PAT_MRT3847_114623C.1
aattcggctcgagatcatattagcttttaactgctttgatatcaaatttcagttgtagcacacctgattttttttggtgatattcaggggtggtggggtggtgttggcttctcgtgatggaaagattgtgtgtgaaaatacacttgatgcacgtcttgatgtagttttccgtaaaaagcttccagaggtaaaaaagaactgagtatagcagttcttattctgtgatgttagatatttgttgctgaattgtttttactgttgactctcgtattgctctcactcaaataacttgtatgaaaaacttaaactctccatcaaatcttgtttcccttacaaaaggatatcgaatcaaaacctgaaagatacacgcgtataatcagataaataatagcatcataaattctacaacttgtacatgggatatcacagcaaaatatctgagtttagagttggttgcattgcatcaaatcaaacagaacctagataaaataaaagtcgcaccacgatcagcaccttagacagggctcgagtgcaagcacgatgaatggaatggaacatgcaatcataggttcaaaagacccacctgtatggcaaaagtgaaaggcagacaatatgtgcaacttgtcccagattggggcgcgagacaagagtgtttaacagagtcccattatgccttcacgttgacctttacacaacagagtatttgcccggttgagttccaccaggaagttgcaaagcctgatttgtgatgtcttccaaaacacgcttcaagtctgctttagctgacttaacggacttgttgaaaatgcctttaaaaaaagaggtgagctggtctgggctgtggtagtggggcagcgcagcaatacgtaacaagttctatcattgaggaagtttcctgtggatcgtctccgaaaatgaacgacgcagatgtctcaaagcaaatccagcagatggtgcggttcatccgccaggaagctgaggaaaaggccaacgagatctctgtctccgccgaagaggaattcaatatcgagaagctgcagttggtcgaagccgacaagaagaagatcaggcaagaatacgaacgcaaagagcgccaagtcgaaattcgcaagaagattgagtactcgatgcagctgaatgcttctcggatcaaagttcttcaagctcaagatgacgtgatcagttccatgaaagaagctgcatccaaggaactgttgcatgtgagtcatcatcatcatttgactttgactcatcatgatcatgtgtacagaaaccttctgaaagatctcattattcagtgtttgcttagactgaaagaaccttctgtcttattgagatgtcggaaagatgacctgcacttggtagagaatgtgctggattcagctgctcaggagtatgctgagaaagcaaatgttgatcccccagagatcattgttgacaaccaagtctatcttccacctggactcactcatcaaaattctcatgatctctactgctctggtggggtggtgttggcttctcgtgatggaaagattgtgtgtgaaaatacacttgatgcacgtcttgatgtagttttccgtaaaaagcttccagagatccgaaagcagctctttggacaaattgttgcttgaagattttgattgtattgtttggttaccgctggaatgttaatatcccaaagcaaaagctttgtcttcatgtccttgacctgaatagctatcaagccattgcttctgtgaacttataattattgtcttttaaataacattattttcggtagtccagttgtccggtgttcttgatttgatttacttctgattgttatgacctaagtttttccggcttatttcagctttgagcttcttggcaataaagtagcaagatgtaaacattactgttaatgttattaaaaaaaacattactgtcaatattgtgacagaaacacagtaaaagacctttgttgtgtaaagtcaaagcatagaagagtagataattagtg

SEQ ID NO: 16188 - DNA, 917 bp, Glycine max
  unsure (1)..(917): unsure at all n locations
  Clone ID: PAT_MRT3847_114624C.1
ccgccctttttttttttttttttttgatgacaaaaaccctgcctataccagttttttttaaaactactcgttgaacgtggtccccctaccacccctcagatacactataatttcacaatctctctactatttttaatgttttgactgnacacgacaacgggttactatatttctgtcacaatattgacagtaatgttcaatatatattacatctgctactttattgccaagaagctcaaagctgaaaacacttgtcgtcataacaatcataagtaaatcaaatctagaacgccggacaactggactaccgaaaatgacgtaatttaagggacaataattataagttcacagaagcaatggcttgatagctattcaggtccaagacatgaagacaagcttatgcttcgggatatagttccaggggtaaccaaacattacaatcaaaatcttcaagcaacaatttgtccaaagagctgctttcggatctctggaagctttttacggaaaactacatcaagacgtgcatcaagagtattttcacacacaatctttccatcacgagaagccaacaccaccccaccggagcagtagagatcgtgagaattgtgacgatgagatgcaccggaaactgcttctgcgatgcgattagtgaagttgatagtgaaagctgcctcatgataactgtagaataagtacatactagtgttatgattatgagtatccccgagctgtcaatgcatgttccaagttggtagaaaaaagaatttgaaggccccttttcattaatctgctttgtatgcgtaggtgatgtatcttttccttgaccagtaatgttagtttcgtgtacctttaggcctgcaatgtatatcgcaattctagatggagtgaaaattatgcacgcaaccttattttttttc

SEQ ID NO: 16189 - DNA, 111 bp, Glycine max
  Clone ID: PAT_MRT3847_114625C.1
cgtttcgagctcgagccattcacacctttaatggagttaacgaaattgttccggaccctataattgagtatcctctgtctatttgaaaacatccacacctactactaattg

SEQ ID NO: 16190 - DNA, 1341 bp, Glycine max
  Clone ID: PAT_MRT3847_114626C.1
attccggggtggtcactttctgatgtggacaagatgggggttcaggcaatgaggcatcaggttcaggcaccgaggcggaggcatcagcttctgcactagcctttttgtcatcgttttcattcgtgatggcattcagatcaatgttccggagggaatccgtgcttacaacaggaacaacgggagctgcaatattctcctcctttggtatctcctttgactcagaaccattatccattgctatacttgtgtttgtattttgcagcgacacgtatcttcatcaataatcgcagaagcagtttccggtgcatctcatcgtcttccaaaatgaacgacgcagatgtctcgaagcaaatacaagcagatggtatcgtttcatttatccaggaagctgaggagaaagccaacgagatctctgtatctgccgaagaggaattcaatatcgagaagctgcagttggttgaagccgtcaagaagaagatcaggcaagaatacgaacgcaaagagcgccaagtcgaaattcgcaagaagattgagtactcaatgcagctgaatgcttctcggattaaagttcttcaagctcaagatgacgtgatcagttccatgaaagaagctgcatccaaggaacttttgaatgtcagtcatcaccatgatgatcatgtgtatagaaaccttctgaaagatctcattgttcagtgtttgctaagactgaaagagccttctgtcttattgagatgtcggaaagatgacctgcacttggtagagcatgtgctggattcagctgcacaggagtatccacgggaagtaaatgttgatcccccagagatcattgttgacaaccaagtctatcttccacctggaccccatcatcacaactctcatgatctctactgctctggtggggtggtgttggcttctcgtgatggaaagattgtgtgtgaaaatactcttgatgcacgacttgatgtagtgttccgtaaaaagcttccagagatccgaaatcagctctttggacaagttgttgcttgaagattttgattgtattgtttggttacccctgtaatatttatattccgaagcataagcttgtctttggacctaaatagctatcttgccattgattctgtcaacttataatggtcttttagataacaccatatttcggtagttcagttgttcccatattgggtacgatgggggcatgcgttattcaacattttctttagcgatggttgttatttgcagctttgagcttcttggcaataaagtaccagatgtaatatattgaacattactctcaacattatgacggaaatataacgttcgatattgtcgtaagttcgt

SEQ ID NO: 16191 - DNA, 497 bp, Glycine max
  Clone ID: PAT_MRT3847_114627C.1
gataaatgacaaatatggaactcattcattccccttctatatcttacatctatagtctttttgccctggcgtatctgtttcacatttaagaaaagtctctagtctagggttatagattgggggaatactctgcaatccgaaattttcttgactgacatgacagaaatgagtattctaaaaaaattcatagaatgtgccgaactgtttgtcttacatgacatgttaaactgaatgaccggaaacacatctacaagacctgcgtactggaacctatagagaaacagtcctattaatcagaacgctcaacgaacatcgcatgaatacgatattgcacttctcgactaatataatttgagtctttattctaagcggttattctattcttggtaatcaagaacttgttgtgactaactcttcgattcgagaatttatatatcacttaagtgacacaatgaaaggtatgcctagtcttctattaactgaaccatgtatcggac

SEQ ID NO: 16192 - DNA, 525 bp, Glycine max
  Clone ID: PAT_MRT3847_114628C.1
tctatatggttaaaatgtctttcataattgctagtagtttctataatctgtgtggtttacttgtcaattgtgatatcatgatatctgtattgtctaaagctgaggcaaagatggtcttatgtttttgatatatggattcttatatatgagattactgtcttttggttaagtgattgaaagttaattgttagagattattgacgcagtattaactttgttgagcatgtaacaatgctctggaagttagtcattgtaaaatgtgaagatggcactattcaaagtttaaaattgttagaatggttataacatgagatttacagctggcttgttctttctctaagtagtcttaggaagtgcttttgtttgttgtctttgttaagaccttgaaaatgagatagtgtgttctatttgtaacgataacaccaacatatttgaagtttcttttcttgaatctgtaatgtctgatgagtacatcttaatttcagaaaaacatttatgtacttggtacatagactatgactcctg

SEQ ID NO: 16193 - DNA, 518 bp, Glycine max
  unsure (1)..(518): unsure at all n locations
  Clone ID: PAT_MRT3847_114629C.1
ctgtannttttgtaaattatattaaatatcatacacaccaataatcaagaccatcactgtctccagtttctttttctttagttttttaggggtacaaaatgactcatatttgaggcaacccaagcagcaatggaacttacatacccaacccaacattgctcaaagccagtcacaaccatcaaatttcccccctatttgaagcatgaagttaccctatcaacgtgtcacaaaatgaaacaaaaagatgctaatgcgtaaaggctaaaggatttgacattaaaatggacaagtgttaaagtgtgtagtgttgtgacatcaaatgattcctcaaatagaggcgtgtgaatcaagctgatcgtgggttaaaacttcccttgcaccacgtgaactcctatgttgaagtcgttggtgcagtgtctcagacatctggttgaaaaactcagtgtcccacctctgaatcaataagggatcttctgcataacatatgtatatggatgtaacagcactttccaccacaa

SEQ ID NO: 16194 - DNA, 326 bp, Glycine max
  Clone ID: PAT_MRT3847_11462C.1
ttcgtccgttaaaagggggacacatcaaggagaaaagaaaaacgccagcaaaagaccttgatcttctctattgataccattatatgatgcggtctttcagactgaaacttccatgtgagtctcatggacagtccctaacttatgtgtaatttgaaactcagctcctccttttgtaattggaaaggtggaggaatatgaggcactatcttcggaatctagtaaaatatattcttcgcgggaacccctacttgcaggtgctggctactggattatatgagacgaaacttctgctccttgagagactggtaatcacacaacagggcggc

SEQ ID NO: 16195 - DNA, 430 bp, Glycine max
  Clone ID: PAT_MRT3847_114630C.1
atgaatgaaaattgaccaacctacctacacgagtatgaatatcaaaggcactgccactgccatattaacagctcttactcccatacatcccatatgcaacacgatgaacatgccctcttacccaactctaagctacttgcctagtcctacatatatacatactcctgattgaaattggacaaaaaccaacatcaacatgccaagattaacaaacatagactcttaatctttccatgccaatgaacctgcagaggtcttggatcattgaaccagcccattgaaaggaaacgaccttacttattttgagaataatatattacagacagtgtttcttgcacatagactaggggaggagaagccagcggtcctgatcatggggcttgcttgcaccaaggcactgctttctgacctcaccctttgtgccagcgag

SEQ ID NO: 16196 - DNA, 368 bp, Glycine max
  Clone ID: PAT_MRT3847_114631C.1
ggggaacaagggcccataattttttaaagccccgaaagaaaaaaccacctgggggaggtttttacatgacttggtgacccacaggtgaaacaacataaaggggagctggggcccctatttgaacccattttatttcatttaaatagatgggggcaagctatattgttgagaggggaaggaactactgaatgttgtacaggggatttggaagcttaaagggcctgctttcacctttggggcccccgaggagatcgctccattggtctccaatgatcccaacaatgttggatccctgccttatcagtttctttctcgctgctgttttgtatgaaactgcttttggaggggaaggatcttggggacccttg

SEQ ID NO: 16197 - DNA, 401 bp, Glycine max
  Clone ID: PAT_MRT3847_114632C.1
ggaaaaacaaccccggggggggaaaaaaaaaaatttttttttttttccggggctttttatatttttcaaattcataaaaaacccccattatacaaggggatttttttaaaaacaaattttttccggaacaatttccatgaaaaaaaatttttatgggcctgggttttggaccccccacaaatttgaaacagttttgctgtttcaataaaaaaggggtgcaaaagggtaaaaaaagaccctaagggctcatgcccaacttattttgaaaaaacaaattggggattgccttttaacgggaaaatgatactacccagtttttcaggaaaaatttttttaaattcgctttttttaacggggtgggggccctctgcattccccatcttaagggcttcaaaaaggac

SEQ ID NO: 16198 - DNA, 198 bp, Glycine max
  Clone ID: PAT_MRT3847_114633C.1
aagctcgtaattcggctcgagattataaggaggggtaattaataaccaagataaaagatatagaacagggagctgtttaaatatatttatcgttataacccaccaataattagaacttgcttttatcttaaaaaaaaaaaaaagtccataaaaagatctgctagaaccgtaattgcaattcgatatatcgatacatag

SEQ ID NO: 16199 - DNA, 379 bp, Glycine max
  Clone ID: PAT_MRT3847_114634C.1
gaaaggggccaaccccttccattaaagccttaaaattcccgcccaaatggtttttttttttttgggaaaagggaaaaccccccttttcttttcttaccttaaaattggcaaggggttaataaatggttaatttgggaatccggtttttggaccaaacttttgggcctttatttcggcccccctttttttctgggcgggttgccttcctaccaggtgaatttggcctaacccttttcttggggggggggccaacttttttttttacttaaaaatttggccccccgggtttacttttctccaaaaaaggggggggccaaccttccgcccttggcttgaattgtttgttttttactccggttggtttttgaacccccgaaaa

SEQ ID NO: 16200 - DNA, 241 bp, Glycine max
  Clone ID: PAT_MRT3847_114635C.1
aagattcctaattgattaaacctaattctcatttctacatcgttcgattcttctcctcctaaacatgcagatacttcgcgaaaactttgaccggtaagaccatcacccttgaggtggagtcctccgacaccatcgataacgtgacagctaagattcaagacaaggacgggatcccacctgaccagcagacacttatctttccgggtacacagcttgcggctggtcgaacccttgccgacta

SEQ ID NO: 16201 - DNA, 781 bp, Glycine max
  unsure (1)..(781): unsure at all n locations
  Clone ID: PAT_MRT3847_114636C.1
ctgacgacagactgaagttgtttttctggggcaactaaggcatccacatctcgtgaagctgataggatactgctgtgaagaagaacacagggttttagtatatgaatatttaccaagaggaagcttggagaatcaattatttagaagattctcggcatcactttcatggtcaacgagaatgaaaattgctgttggagctgcgaagggtttagcatttcttcatgaagctgagaagccagtcatctatagagatttcaaagcttccaacatcttgttaggctctgattacaatgcaaagctatctgattttgggttggcaaaagacggtcccgaaggagatgatactcacgtttcaacccgagttatgggtacacacggctacgcagctccagaatatatcatgacaggtaaccttataactttatattttccatcaatccactttcatcaaataataataataataatgataactaaagatttaaaagtcattttttattataaaaaagtgtaatataaaatgttagtaatgcactaattttcaataaaattttataacgatgttttatacttactgaaccccctaaaaataataagaataanatctgttttcagtttgtatgaaacttagttttagtttttgaaattttaattntaatcaatttgatctttaaaatttttaaagttagatttttgtccctcttcattcacggtaaaaagattgtttgtgatgagagacaaaaatatatttttttaagttaaggatcaattatcaaaataa

SEQ ID NO: 16202 - DNA, 276 bp, Glycine max
  Clone ID: PAT_MRT3847_114637C.1
ggaatgataaggtatatgaacaatttttaacttatacttctacaagatgttctatgttttcatgtaaattttatacactcaaaaggaacgctaaaatattttaatcgtaacttatatgatttgttacgtataaaaagaaatatagattcatattcccatacatataaattatatattaacaaaaaaaatcttggattactttttgaaaaaaaagtagaaatccatttttttgtagtaaaaatactattccaattataataataagaaaaaataata

SEQ ID NO: 16203 - DNA, 607 bp, Glycine max
  Clone ID: PAT_MRT3847_114638C.1
ggtagaatgtgaatgtattggtaattcgcgtacatctctctccccaaaaaaacaggcccaactcaaaacaccaattggaagtcgataaacgtgcatacaacgaatgctaatcgccttcaacctccctcgatccttttcttccagcttgccgactcttcatgcttaggtgcttaggtgaaagccatgctctttttgatctcagcaatcgccagggcggggttcaggcccttggggcatgtcctcgagcagttgaaaatggtgtggcatcggtacaagctcatgctgttgttgagggcgtcctggcgctcggccttcctttcgtcacgcgaatcggcgatccagcggtacgactggaggagaacggcaggtccaaggtactcctcctggttccaccagtaagaggggcaggatgtcgagcagcaggcgcaaagaatgcattcgtagagaccgtcgagcttcttgcggtcctccttggtctggcggtactcacggccgtcaggcgaaggagtgtcgcgctggaggtagggcttgacagagcggtactgcttgtagaagagcgtcatgtcagggacaaggtccttgacgacgtacatgtggggaagcgggt

SEQ ID NO: 16204 - DNA, 462 bp, Glycine max
  Clone ID: PAT_MRT3847_114639C.1
cgcgggcccaatgcgctcatgctcaagacacttcagatctgctgcagtttctacagcgacatggacacgagacgagagattggcagaaaaggactacacactctactaaacaagttcgagactctgcagattcagttttcactctgtgctggtgggtgtgcatggtttaaattagcagaactagattgcatttgcggcactacctgatgatgatgtccaggatggaagctgattagaaagactgccaaatgattggcactgggatggaggctgtaaggatggatggacccgactgagctttccaggagagcgcgatttcactcggggttccattgtgatcaccaaaatgaggctcctatagcatctgcgtcacatctgtatcagaacccttttggtactgcatcggtgtctagatagcgatactactatccaattgacgttgcatcgtgagctctcatgatg

SEQ ID NO: 16205 - DNA, 273 bp, Glycine max
  Clone ID: PAT_MRT3847_11463C.1
ggcctcaacgatgagggagctgattttgactatatactagagggtgtgggcatgtgtgccaaagtttgggcttatggtaccaggagaaggctgagtgggagaggctgattcattatgtatgtgtaccgcgtcgaaaatatacactcagctggctcatagaagcgaaaatgctaccagcaagatgcctttatacaagtccacaaaccagaggtatttgcagctacaaccttttttttaatggagaggatgtggtgaactgaaaggaggattatt

SEQ ID NO: 16206 - DNA, 430 bp, Glycine max
  Clone ID: PAT_MRT3847_114640C.1
gtgatggctttatttagataccatttctcagtttgattagaaaataaaattttccaacgctactcctaaaacttaccatgcaaatgggtgatcaaaccacaagcaataatataaaacacaagaaaggataatacaaatataatgttattaaatagataggaagagaagttacatcaagagtagttggttgtcaagttcccgacaaaggggtttagcctctcattatcatggagactttataattgtaagaggaaaatatttaataaaggaggaaaagataagaaaggaaatggaaggaaggaatgactctcattacttgcttctccttcttctaatctttgccttctataaggaattatattctcttggaatttttgtgggtctttttcttcttctttcttcttcttttataggtgcagattaacgggct

SEQ ID NO: 16207 - DNA, 267 bp, Glycine max
  Clone ID: PAT_MRT3847_114641C.1
gccctcgttgctgcgtacgcatcagtcatatgtatgtcctgtcaacgatagatgctccggcagtgaccgtccatgaaacaccaaatgagctgatccgttgtggttccacaaattgtacgtttcgctgctaccaagaacaacatgaataataaggttcacttgcgcaaactcctgatcaacctgtggagaaattgggacataagacaacaaacccgtgaccattcgaggtggtcgagactgcaattactgtttagaaacataagaaaa

SEQ ID NO: 16208 - DNA, 1176 bp, Glycine max
  Clone ID: PAT_MRT3847_114642C.1
ggctcgagcatcaactaaacaaacactctctcattaggtattccctcctaaaaaacaccaaaccctctcaaaccttaatttacccaaaatgataaaacactctcttttagtcttacccatctcattaacacttgtaatttctctcttgcattcaaccactttagcagcgatagctccggccaccgcaccggcacaagctccccccactactccagcggcctccgccccaacaccaccccagccctccggcggcaccaccgacatagtgcaagtccttcaacaagcgaactcgttcaacatcttcctccgcctcatgaaaaccacccaactaataaaccaactgaactcccagctcctaaccataaagtccggcgggctcaccatccttgcccccgacgacggcgccttctcggagctgaagccggggttcctcaactccctctccgacggcaagaagctcgagctcgtgcagttccacgtgctccctgacttcgtctccgcctccaacttcgacaccctcaccaaccccgttcgcactctcgcgggtaacaagcccggtaaggtcgaactcaacgttattagttacgggggtagtgtgaacatttcaaccggtgcggttaatgccacaatgaatggggttatatacacggataagcatcttgcggtttatagggtgggtaaggtgcttcttccttctgagtttgttgctactaccaagaagccactcgctcccgcacccgctctaaagccggcgccggtgacctccgcgaatgatgtggcggaggcgcctaaacctgaaaaggagaagccgtcgcctaaaccggaacaatcctcggagtcctcgacgcaggttgttcctactgtgacctctggtggtgtaagaattggtgtaagtggaatgtgggtgtctcttgttcttggtcttgtctttgtgggagtgttcgcagcataaacttggatatatataggacgatcgtgtggctggatataccaatgaagaatatttgaactaactattatgctatatatattgatatgatagtccagtcttgtcttatatatatatatacatatgagtggattattagagcattaattgagatgtttgtatctctatcatgaatttatatatgattgaaataaacttgttatatattactcttttacatctaaaaa

SEQ ID NO: 16209 - DNA, 297 bp, Glycine max
  Clone ID: PAT_MRT3847_114643C.1
tcgattttattctttaatattcatcgaatttctaaaatggctcctacggtggatcgtgcttctcagcaaatgaatgagtacaaaagttcaaataaggaattggatgtgcttacgatgtacaacggtgctgccatccacaacaaaaatgcggttttgactgttggacccggcggtcccgagctaatgcaagatgtcgtttacttggactaaacgggccactttgaccgggagcgcattgcggagcgcgtcgcccatgccaaaggccgaggagcgcatggctatttataagtgaccaac

SEQ ID NO: 16210 - DNA, 234 bp, Glycine max
  unsure (1)..(234): unsure at all n locations
  Clone ID: PAT_MRT3847_114644C.1
ggtcggtgntgagntnttttgaggatgatgagagggggtgnggaggggtttgtgatgagtgtaggtaatgagaggggtgagtgtgggcgggtgacgtagctgatgagaatgatggtgtgaaagaggttgccaggagggcttgggattgacatatgttgtattattatgaaaatgtaggcatgggggagggagatgtgagggttattgggggatgggttgtggtgttggtgggat

SEQ ID NO: 16211 - DNA, 1377 bp, Glycine max
  unsure (1)..(1377): unsure at all n locations
  Clone ID: PAT_MRT3847_114645C.1
cgcgggtgtccanttccattcccttgctttttttaaaattatatataaatattttgaatgtgtaaaacaaagcaagggaatggaagtgcacaccctcattccttgatagaatatgtatatattcactcatacatgttatatagcgacattaccatagaacctgcatgcctatttagtgaaagactatatctacacattcaaaatatttatatataattttaaaaaaagcaagggaatggaagtgcacaccctcattccttgatagaatatgtatatattcactcatacatgttatatagcgacattaccatagaacatacatgcatagttactataaaaatataaacaagctgcctggctcagaaatccaactggaaaatagggagtgcaaagtccaaagttgtcaactcaaacgcaacccactgaaactgtattccaaagaggaccttctaatgctgagtttctctttcttgatttggacaagaagagggtaaacacaccatgagaaacttagataatgatccctattcatgccttcattatagcaaccccagtaacttggatgataagtaacatggtaccaagcagaagcttttgcatacacatcactactccctgaatctacatcaccactgctgttttcattgaaccaggccctggcctctttccttagggacctcacagccatattgattgcttctgcatccctccttttgttgaaagattttgacattttcataatattcccaccgaggatttcagcttcagttttgatcccatagtagtccatcagatttcccaacttgtagtcataattggttttgtgatagaaagcatcatcaacataatccatgaagccatcaacttccatttcatggtcgtaagagtctctcgcaaccaactttgtgaaggatgtaattgagccggcacttgttgatatttctttcacttccctaaagagctttcctatcacgttatgcgatttgtatgtgggtttgtcaggcttctccatgaagtcaggatattctttgacatgaagttcaggaggtataacagctggaacaccagttttaggaaagtcaactgctgttgaaaacaaccttgcaagcttaacacattgatcagacattgctttcaaatgttctttatctgcaaagacagtgtgtgcattggcaattattcccagactgtcattgactatgtaattggcaaaatactcctcaacctcctcgatcatcacatcatgatccaattccacagttgcaggagcagtatagtccattggatcaattgggcgagaaggaatcaattcatggtcccaacaaacaaagtagatatctccatccagatcacttcccgaacactcatttggatgag

SEQ ID NO: 16212 - DNA, 192 bp, Glycine max
  Clone ID: PAT_MRT3847_114646C.1
gaactatcactcaattatacaccattatacataataaatttattgatttttataataattatgttaagagtcatcctaataatgatttctaatgatttctatttgacaatttattgactttgatatcatgacacaatcatacgaagacaacagaaatgaggcaatgagctagagcaacaaccacacagggct

SEQ ID NO: 16213 - DNA, 333 bp, Glycine max
  Clone ID: PAT_MRT3847_114647C.1
caccaatctaattcatcacaatgcttaaactcctgattcacactcatacctgatactcttattattggctaccatttactcctttgatcattaatctattatttgtaaccaatttacaaatgataataacaaatattattcaaataattcaacaactactaaagattataaaattaattccactatttcaacctaacgatgaccttttctagtttaacaaacctcgacttactctctacctcattaatttcatgctcttttataaatcttttcaactttcctacttttcaattttataaaaccccccctttttacacttcaatttcatataaa

SEQ ID NO: 16214 - DNA, 414 bp, Glycine max
  Clone ID: PAT_MRT3847_114648C.1
ggttgtgttagcagtcatagtgtgtgccttcctatgcgctcttggtctcaacacaatgctgcaatgtgtgttccaatgtgccaatcgcgttctcacggagccccttcagtggattgcctcaaggaggctcaattctggcctcaagaagagagaaatggtggctttgccaacctcaacttacactcattcttgtgcctctccatcttcgccctccaataatatttgtgccatttgcttaacggaattctctgatggggataggataaggttcctgccaaactgcaatcaccgttttcacgttgattgcattgataagtggctgctttctcactcttcttgcccaacttgtaggaacttgctcaagcccactgattcagtacactccttgcatactgtagtatcatagtttgatta

SEQ ID NO: 16215 - DNA, 470 bp, Glycine max
  Clone ID: PAT_MRT3847_114649C.1
aaaaatttaataaagggctgagggtttctgctaacgtgaacaatgcaggtaggaccaagtggccaggatatgcttgcaaattagtttacagctatttttttctttaaagtgtcagagctcttgccattttttctctttaccttaataatatattgacagagttttcaatttttgccattttttaaatataacgaatgcaatttgcaattatatatcaggagttaaaaaaggtcatggccttttttaccacagaatcatttacaggagttttattttattttccacattttaaaaagtatttaattttagtattatttactatttagacttacgcatgcaaaaatttgcaatttttatatgtgaaaattaacaactaggacagtagaccgtacgttttcgcatgcaatgaataatagctcgttgattagaaaatgagatgggtattgacatttgagttctgtagagaatct

SEQ ID NO: 16216 - DNA, 259 bp, Glycine max
  Clone ID: PAT_MRT3847_11464C.1
cgggtcgacccacgcctccggagataactataaacagtgtgatgaaaatgaagggccttgttctcttccgtgtacaattttggtagcatggcaatgccatgcgtacgatatgttccctctccgagtgagcactggctatggcgcccgtactccggaggtgaaatgcgcaagttggaggcttgctgtgcaagcacacaccatctttggctctgagaccattcctgacgagggtgttgaagcaacataggaatacatgcat

SEQ ID NO: 16217 - DNA, 223 bp, Glycine max
  Clone ID: PAT_MRT3847_114650C.1
ctgactcgtgggctttgatgaagtcatatactgggttgttcttgccacatgaaatgatggaacagggtgtacatgaggacagattggtgcttctgtagggtgtctgtggtgtattaaggcctggtgttatcatagtccttgatgtacatggttttgatatcataatctatttaactattatactctaattcccagggtgaaccttcacatattgtcttttttt

SEQ ID NO: 16218 - DNA, 518 bp, Glycine max
  Clone ID: PAT_MRT3847_114651C.1
gcacgcctacgtaagcccggaattcggctcgagtggatgtgaaaaacagtggcaggggaattccattcatgaccttttatctctttcttcttctcctttctgccatctctgttttgtcccatgcttcctctattgcttttcagattaaaggaaatgtgtatccacttgggtattacacggtgaacctcgccattggcaatccccctaaggcttatgaacttgacattgacacaggtagtgatctcacttgggttcagtgtgatgcgccatgcaaaggttgcaccctacctcgcgatcgacaatataaaccacatggcaaccttgtgaaatgtgtggatcccttgtgtgctgcaatccaatcagcaccaaaccctccctgtgttaacccaaatgagcaatgtgactatgaggttgagtatgcagaccaaggatcttctctcggtgtcttagtttgagatattattccacttaaactcaccaacggaactttaacacattccatgctcgcctttcggtgt

SEQ ID NO: 16219 - DNA, 597 bp, Glycine max
  Clone ID: PAT_MRT3847_114652C.1
cttatgtgctgtcacttggaaggattctagagagaagaaatgtgccagagagtgacacaagccatctagctcgtcgattaaagaaaatacttgttgacctcaatgaatatgatcatgctaggagcatggctagaaccttccatctcaaggaggcattggagcttgcttggaattcatgtttcgttgtctcttggtttgtcgtggagtctggccctaggttaacccacagtgcaattttagatagctttttgacctttacacaagtcttcatccggagtatgcttatgatttcaaatcctgagaaggcgtcattctctctcacaacagagggatgaagacttaatggaacatttggacctaattgaggacctccattgctccttgtgcaccccaatggggaagttttaccaagaaccaaataatgagtgttccccatatcactttgggggttcagagggagtctcattttatcctaccggccccttttttcattactaatgcttatgctaaagtctctggaggacattgtaaaattttgcaaactcatctgattataaattgcatttgatattgggatatgaaaataactttgttttt

SEQ ID NO: 16220 - DNA, 224 bp, Glycine max
  Clone ID: PAT_MRT3847_114653C.1
acactttaatcttcaaaatcttcacaaaccaattctacacagacttaaccacatgaaaccgtagaactactctaaaccagatctactcctctatacatacactcaaccaacacattacttcaactacactccaatcgaatacccacttcttcctatcatacctcaacaattccaactcctaactatcctagcaccagaagaacatcttcaacttccacaatcac

SEQ ID NO: 16221 - DNA, 1304 bp, Glycine max
  Clone ID: PAT_MRT3847_114654C.1
attcgcgggcttgttcggtactttggatagtttaacgacaacggggcctgtccttccgatatccattcataattctccggaacaacacacttgtgtttcctttccattttacggaaaaaagagaaagataagcgaaacaaacaatctctgaatcgatgggctaaaagggaataaaaaagaaagagcttcaaatctggcaaatctcgtgggattgagggctcggtctgcgtcgaagcaagcttctccccatttgcacgacgacgaggaggagtgtaggccttggcgtcgaaggttaaccatgtctttgtcttgggcctccgccctcaggatcaccattctccttctcctcctcgccgcggtcatcgtcgcatgcttcactctcccaatcgaaaagatgatgaaggacttcttattatgggtcgatcacgatcttggtccctggggcccacttgttctggctgctgcttacattcctttgactgtcttggctgttccagcttcagtgcttactcttggtggtggttatctttttgggcttccagtgggatttgttgctgactctattggtgcaactgttggtgctgtagcatcatttcttcttggtagaacaattgggaaatcacttgtcgtttctaggttgaaggattatccacagtttagattagtaacaattgcaattcagagatctggctttaagatttcaatactccttcggcttgctccatttgtaccatttaacattttgaattacctcctatctgtgactcctgttccattaggggaatatacactggcttcttggttaggaatgatgccaataacactggcacttgtatatgttggaaccacgttcaaggatctatcagatgtgactcgtggttggggcgagttctcaaaaactcatttggtgagctttatctcatatgcaacatatatttatttctcttttggatgcagccttggatcatttctggcctggtgatatctgtggttctaatgatatgggttactaaagttgcgaagtctgctttagataaagccttggcagaatgtgaagatatggataacactgcattttcaccagagctaccgattgtcactgaaacttcagtagatttcaatcagcctctcataaataagacaaaccaggatgaaggcaatttaaattttactgtgtaaaggcttttttttttttttgaaacagtagctgctagtggtgcttatttatgatttgtacagttttggccttagaaatgtaatttgtgacataaatggttaatcatacaatcaagatgagattattg

SEQ ID NO: 16222 - DNA, 640 bp, Glycine max
  Clone ID: PAT_MRT3847_114655C.1
aaacatattcaataacgtcatcttgattgtattattaaccatttgtgtcacaaactacacctctaatgccaaaactgtacaaatcataaataagcagcactagcagctactgttttaaaaaagacaaaagaatagcctttaaaaggtgggggtagggaaagaatttacacactggaatttagattgtcttcatcctggtttgtcttatttatgagaggctgattgagatctactaaagtttcagtgacaattggtagctctggtgaagatgcagtgtcattcatatcttcacattctgccaaggcttcatctaaagcagacttggcaactttagtaacccatatcattagaaccacagatatcaccaggccagaaatgatccaaggcaaatgagtctttgagaactcactccagccacgagtcacatctgatagatccttgaacgtagttccaacatatacaagtgccagtgttattggcatcattcctaaccaagaagccagtgtgtactcccctaatggaacaggagtcacagataggaggtaatttaacatgttaaatggtacaaatggagcaagccgaaggagtattgaaatcttaaagccagatctctgaattgcaattgttactaatctaaact

SEQ ID NO: 16223 - DNA, 1056 bp, Glycine max
  Clone ID: PAT_MRT3847_114656C.1
caataataattttttgcgggctcagtctcaaactagcaattacaagcaagtgaattcttgattgattggaaatacaacatatgaacttcgaagaatgatttagattgtgccttattgtattatgaattaattgtactttggcttgagcatgacaatggtgccaatgcatctaaagcaaatggccaagtagaatcattacccaactaagaagaaaaatagaaatacataaaatacaattattccaggtacaatcctaagttgcaactttagttctgtaaaccattcaactgcatatttgtaaccataagttcctgactaaacgccaatgtttgaagttatcagtgcgctctggtttctttcaaccagcatttgtgaataacaataacattgagagaactgcattgacctacaaagtaacaaattggtaaggggatcaggttccctttagaatgccagtcaacagcttagctctcagtttttttagcattcgcttctgatagcaaaggttctagttctcctttccggtacagcttcagtgtatctgtacagccgccaatgtgtttgccaccaataaatacatttggcacagtgtgttgccctgtgatcctttccaataccttctgcaactgtggcccttgaggacccatttcgtctaattcgaagacgagagggtcgacgccgagttttttgaagaggattttgacctcggaagaataggtgcaccaggttttggaataaacgacgactgggttctcagctacggtcttcttgatggtgtcttcgaggcgagacccgaaagaggatgaggaagaggctcgaactaataccgaggtgggagagacattgatgcgggaaatggggaagagtttggtgatacaacaagaggatgaagaagaagataactttagagaaggtttcaagtttgagagaggaagagcaacaatgttacccaatgccaatgccataaaaatgaatggtttgttatatgtaagaagatatacacgaaacaattgcaaagggaaaacaagaataacaaaacaaattaaaactcgagcc

SEQ ID NO: 16224 - DNA, 474 bp, Glycine max
  Clone ID: PAT_MRT3847_114657C.1
gaaagctttcaagacctgagatgaatctgttttcatacatacaaacagaagatagctgtagagaaaaagccaggtcagaacctttcctaagtgtaagtgcatgagcctccgccatgtccaccgaagaaagagtcattttcttttctttatcgccgagcgtctttcgagtctcatgttgacttttctctttcatgtgatacttcgccttaagaactagggctgagcccatacaactattattgttttatactctgcgggagattggtattaaaccgaaagcctaacctggactactaatggcttcttctcttgttagaggaagcccaggttcaaagtcttctttatgttacacgtagcaactcttcttgttcaatcctttaatcggaacgacgagagagtgactaagccgaaaaggtagagcgggaactgggttcatcgatgacctcaaaaccagtagcaaccctagcttagcct

SEQ ID NO: 16225 - DNA, 169 bp, Glycine max
  Clone ID: PAT_MRT3847_114658C.1
ggttgggggggtttactgtggttatttatgcgacttgcggcctggtgaccccaaatggtcctgattccctgctgggggcggttttttccggtccttttgtgttgcgtgaacctttctaccgtatggtgggggggggggggggtgccttttctagggcggttccctggac

SEQ ID NO: 16226 - DNA, 201 bp, Glycine max
  Clone ID: PAT_MRT3847_114659C.1
caggagctaacggggacattctcgggatgcgtctatgaaacaggatgacagcaaaatcgaaccttctgaacatttagtggaactttgctttacaccttcgtgttcgcctaagagggcaacttggactgcttgagcactccccccggggcgtgacctcgggggatgtacacctcgatgagccccaatatgtccggcttgttg

SEQ ID NO: 16227 - DNA, 564 bp, Glycine max
  Clone ID: PAT_MRT3847_11465C.1
ggctcgagagagagtgtggggttcgtaaagttcagtaacaaaaaaaaggttgacaaagtgagtgcaaagccaaaaacaaaaaaagatgtgaaaaatggtaacactctaaacatccataacaccatcacatcaccaatgcctactctttctccctcactcattcttctttccttctccaaatcgcaataaataaaatctcgcggcaaaatctttttctcttttttctctcattcattgattttccgatgggattgtcgcgcaacgcggcgtcgcagccggagatcgatgacgccggcggcggcgacattggattcggtgcgatccgcggcggattccccttcaagcggaaccctagccaccaccggcaccgcggctccttcgatcggcaattgccgcgttcgaacaacaacagcaacagcaacaacaatatcaaccgatctcacctccacaagcgcaagggcttgttgctgtggctctttccgttccccaagtccaagtccggattctacgccttcatcatcgccgtcgtcttcctcttcgccctcgccttcctggtcatgcaga

SEQ ID NO: 16228 - DNA, 906 bp, Glycine max
  Clone ID: PAT_MRT3847_114660C.1
gctcgagatggcgtggtttcactttgcaagaatttgcaaaccagttattttccaatatatatgattatgggaaaggaaggcagatgccagctcattatgggtccaaaaagcacaattactttacagtagcatcaactattgctacacaaatttcccatgctgttggagccgcttattccttaaagatggataaaaaggatgcatgtgccgtcacttacttcggtgatggtggctcaagtgagggtgatttccacgctgccttaaattttgcagcagttttggaggccccagttatttttatatgccggaacaatggatgggctatcagcacacccatttcagatcagtttcgaagtgatggtgttgttgtgaaagggcaggcatatggagttcgtagcattcgtgtagatggcaatgatgccctggctatctatagtgctattcaagctgctcgtcaaatggcaattactgaagaaagaccaattctaatagaagctcttacatatagagttggacaccacaccacatcagatgactctaccaagtatcgtccagcgaatgagattgaatggtggagagtggcacgtgatcctgtggttagatttagaaagtggatagaaaagcatggctggtggaatgatatggctgagtcagagcttataaacaatttgagacagcagcttctacatacaattcaagaagcagagggtgtagaaaaacctccacttgcagatagttttagtgatgtttatgatgtcgctccttctaatctccgtgaacaggagcaatggctgaaggagattgtaagaaaacaaccacaagagtatccaacaaatatttctgtgtagacttcaatatgctaatacacattacattgcttctaataaaaaattctcttcaaacttg

SEQ ID NO: 16229 - DNA, 439 bp, Glycine max
  Clone ID: PAT_MRT3847_114661C.1
tctgaccctttttttctcttttggtaatgacttagtgaacttggattcatctatattgcgttatgctttaaaaatagtacttgaaaaactgacattgaagacgttcatgaacagtataaatatcgttatagaaatattacagtggacctcattatttacacaacacatgagggttgatagactagttgcagtacaaattagtgagatgatattccgtgcaagtgaacataaattaatagacttatacattacattgctctgattatttcaattgtctcttgtactacaattcattcaagtgccattttttggcatgtcatatgacaccaatatatggcattcaattacccttttttcattccttttaatccacacattgtcacaaaagtgttaaccttcttcagtaatatccacagctcttctgcatattgagccattc

SEQ ID NO: 16230 - DNA, 457 bp, Glycine max
  Clone ID: PAT_MRT3847_114662C.1
ggggatcttactctgtctgaatggaaaagaaaagcgtcaccgtgcagatccgtgattgagcaaaacgacgtcgtgctgctacgcatcgcatcgaagttgcaacaatggcgagttccgaatcgcaagagcatcatccatggatctcgaatgcagttcctttgttggtggttcttctaattgcacttcacgtcttcgctttggtgtattggatttatagattggccactgacaataagccacaacagcagcagcagctacaacaacagcaacagcaacatcaacagagaacaaaggctcactgaccgacaacaacaacaacaacaacaacaaacgttctcattcaatttcattttcttcaaacaattgttgtatgaaattgttaattgtgtgcagtaaaggatatgatttttttgtttttttggtataacagtgatgaatgaagttttgtttaattttt

SEQ ID NO: 16231 - DNA, 234 bp, Glycine max
  unsure (1)..(234): unsure at all n locations
  Clone ID: PAT_MRT3847_114663C.1
aaaaagggggaaataaactataaggggagccttttgcgcgtcccaattncatcaaaaaaaaaaaaaattgaaatagaattttggtggggggaatttgaaaaatgaaatcatggggggggggtgtgaatcttgaaagggggtgaataacccccatgtaaagattggcggggaacaaacgaccaaaggggccttttagtagagctcatggaacgctgggaccactaatgggccttt

SEQ ID NO: 16232 - DNA, 830 bp, Glycine max
  Clone ID: PAT_MRT3847_114664C.1
atttctttcaatttttgacattcaagatagataaattcttgacttaaaaaatgaaagaaagaaatctttacacattacttctgttagcagaaaattgaataagaaatttcaacttttctgataaataccaatgaattccaatcgatcagtaattccttacagggtcaataccatcatcagcctaaatgaagatcgtattttgaattttacggctctccagaaaacagtagggaaggaactaagttagctgcaacatcagttatcctagcgtggcatggtaatgagctcaaatgtcatggtgtttccattatatcattttcacaaaatttccatgatccatcgtcttgcctcttcataacatacttaactttgtaagtgagataatagtttgggttcttctgctgtgaaccgtcaacaagttcagatgcttcctctaagagagcttcaatttctgccatgtcatctccatttccatctgatagaatgtcagctcgaataatagataacttgagcaaaagaaatctccagtaacaagatctttcttttgcagcattggccaaacctttccactgagcaagcatagattcgtcaagaacttgagctagacaattaacttcatggctagggcccaaagcttcagcttttattgtttgccattgcctgaccatggtttctgcttcttccacaggcatcagccttctggaaacattaatagggttggatgatgaggtaagagtagtgtgtaaatcactatgatttccagtacctgactggtgcaacaagagtatcttaaacattgaaaggatcctcttcactttgttggccctcgt

SEQ ID NO: 16233 - DNA, 163 bp, Glycine max
  Clone ID: PAT_MRT3847_114665C.1
gggtcgtgagagaggaagaatagagtgcatgagtgcagaataagagattaaagggtgtagaagaagaagatggtagtgatggtgttcccacggaggacgacgtggtacagtttttttgcctcctaagaaggatgaggatggccgccaagtcctttgaccacaa

SEQ ID NO: 16234 - DNA, 1376 bp, Glycine max
  Clone ID: PAT_MRT3847_114666C.1
gggtccggagtcccgggtcgacccaagcggcaactccaccacagttgcagaacagcacaaacacaagacagtgccaaggaaaaatactcagattcagcgttagtgtgtgattgtgaggctgttgagtgttgagtagggaagaaaagtgaagacctcaaaacaacgagctaaatcaggctcttgaggacaaccaagagaagaagaagagtgaagaagatgactggaatgacgaagaatcaaccgtcacagtggtggtggcttgatagccacaccacttctaatcgatccccttggcttcaatccactctctctgagcttaatgagaagacaagggcaatgttaaagttaattgaagaggatgcagattcctttgccaaacgtgcagagatgtattacaagaagcgaccagagcttgtgagcatggttgaggatttctacaggacacatcgctccctagctgagcgctatgatcaagtcaaacctgatactactggaattggacacctcattactggggggtcaccttttgcttcagcaaagcatcagttggagaagttgatgactttttcagataatggatatgatacctattctgagcattgtgatgtgtacgagtctgaggaatctgaagttgatgatcctgaacaggaggaggatgaagaggggaccaagtttcttcataacagcataaaaaatgagcaagtttcgtttgtggcagcgagtgatgttgaagtgatgaagctgaggggtgaagttaagagactcaatgaagagaacaaggctcatagggatcaaatcaagcagaaggataccatttgtgatgaaatcatgatgctgagggaagaaattggaaggcttagagatgagaatgaggcacagaaggaacaactcaagcagaaggatgaagagaagattgaggtgataagacagctgagtttagcaatagatgtgctgaagcaggagaatgtgaagatgagaaacttcattgctaaggagtccaccaagaaatggaagaacccatttgagatcaacaaacttgtgggagcattttctgtgaagttgttcagtggtggtactccaaagaatcagcccggcgttgagctctctagatgtggttaaaaatttagcagattgagtcattatatacaaaaatatttacaaatatgtctatatttatgttaggaacttattacccaatagcctaggcttaaaatcttttatctattacattccaattgttacaaatttgcatttgtattccttataatttatgtgtccaattccacttttgaatgtccttacattagcgcgttgtattacaccctagtgttacaaatttgcatttgtattccttataatattggttgtccattccc

SEQ ID NO: 16235 - DNA, 354 bp, Glycine max
  Clone ID: PAT_MRT3847_114667C.1
gtttttctgaatggttgttttacggcaaacacttggaattctattacatgatcaagtccctggtccttgcgtggaatccatcagggaaagctgggagttgttaatgtggcaggtagccgtgacgatctatacaacgtgggaagttcaaccaagaggttgctctatgaaagactgtatataggactggttataaccagatggctacgtataggaagaagcggccaatttaactctccagggccttccagcatgtgcttcaatgagtgatccttgctacaatgcattgtacactccgtggcactcttcacccggtgaaattgccctttcaccatgatcaatggtccccctgctgca

SEQ ID NO: 16236 - DNA, 609 bp, Glycine max
  Clone ID: PAT_MRT3847_114668C.1
tactgctgcgagaagacgacagaaggggaccccaaaaagctcaatatccacaaggaaaaaaaatctatatataaaaaataaattaaaatgacaaggatgttcaataccaaccttgtgatgattttggccatcatcggaacctagtgttttctagtgccaacaatgttgttgtggggcagtgtccaggcatggagggcctcataacccaatgttcggagtatgttgagaagtctggccctgagatgagtccatcgccacagtgctgccacgagatcgagaacgcggacactccatgtctgtgtcagcacttcaacaaggcaatcctgcagtttattgacattcagaaggtcatttatgttgccaggtcgtgtggaaagccaataccctctggaaccacttgtggaggtgttacggtgtcatgatcaaatggaggaaaattactttaactttatgctggctcttaagaaccttagatgctttgactatatatagaataaataagttggtgtatcaaatttgatcttatgaccaatagaaaaatggttactggaaaaaaaaaaaaaaaaaaaaaaaaaaaaaaaaaaaaaaaaaaaaaaaaaaaaaaaaaaa

SEQ ID NO: 16237 - DNA, 220 bp, Glycine max
  unsure (1)..(220): unsure at all n locations
  Clone ID: PAT_MRT3847_114669C.1
tatagtctancctctctctctttcttatcacatatgccaaattcaatttttacccgcaataaactttcaatatgctaatgctactttagcgtcatgacttgcatctccttcttcttgcttttaaaaaccccccttctcaagcctctcccattatgggcattttgagatgtggctgtttcccccttttttttctccagaattttctattaacacattctcc

SEQ ID NO: 16238 - DNA, 122 bp, Glycine max
  unsure (1)..(122): unsure at all n locations
  Clone ID: PAT_MRT3847_11466C.1
caagaantgagananacacagacacagtgcggttngcgactctagtactatnaattaaacaaacacttctaccacacattcnacagaangncncncnctcccagggnntacgtgtccatgng

SEQ ID NO: 16239 - DNA, 504 bp, Glycine max
  Clone ID: PAT_MRT3847_114670C.1
cattcagctaggtgtttattagcatgagcacattcagaaaagcttttgtctcttaatttctacatgagttatatgtaaaatgttttttaacacattttattctgtgatttctgtccatgctttggcaatacaggaacacttatgtttctatatatttgcaaatcatttattgttgatgatccagttctgaaaaatgatgtatcgttagtctaagctgcaatcataatatgatatgccactaaacataaagtcagacgtactgattttattgcaacggctcaataatctagaagaaccatagaagacgactatacattggaatattgttaagtattgcctcaaatctataagcttctaaaaactctacttgatgttataattcaggcattgtcttcgacgaaggaaggtgaagatgctttgacgaggattgaacaggcattggattgtgcggataatcagcagctggcaaccaactcaaggttacctgtgattaggtcccaaggg

SEQ ID NO: 16240 - DNA, 590 bp, Glycine max
  unsure (1)..(590): unsure at all n locations
  Clone ID: PAT_MRT3847_114671C.1
ggctcgagacaacctttaacaacaccaccaacaatgggagcacgaaagagactctcttcttccgaacctccttcttcttctcctcccgcaacaaatgaaaacacaaacacaaacaactgccaaacccaccataacagaccctccaatcgcgcctcccaaatggggtcttcttctgaagctctctctctttttgctcccttacttgtacctcctctttcaccactaccccatcgagccggagctccgaagttcgatcctcatcaacgccggaatgagcctcgcggggctcttcgtcacggtcaagatgatccccgtcgcgtcccgctacgtccagaagcggaacctctttgggtatgacatcaacaagaagggcacccctcagggaaccgtcaaagtgcctgagtcattaggtatagttgttggtattgtcttcttggttgtggcaatcttgtttcagtattttaacttcacagcagattcgaattggcttgttgaatacaatgcagcgctagcgtgcatctgtnncatgacattgctaggatttgttgacgatgtccttgatgtcccatggagagtaaaaatactactcc

SEQ ID NO: 16241 - DNA, 193 bp, Glycine max
  Clone ID: PAT_MRT3847_114672C.1
taggttaacaccaatgacactgataccgttctgacccggatacccatctacgctccgccattgccttcttcttccagttccagggctgtgggggcatcggacggtcagtccttcccgatatgcgggaatttggcactttggagcactctcttgggtttcgtgttcagcatagtagtcgtcgttcgttaattct

SEQ ID NO: 16242 - DNA, 442 bp, Glycine max
  unsure (1)..(442): unsure at all n locations
  Clone ID: PAT_MRT3847_114673C.1
gtcacttgctgggaaaatcaccaccgaaattggggtgcatgcacccgctgcaatggggtccaacctctttgccacacaacttcaccgtgcncaaaaccttactgctagagtgcatggaaccacgccgcatcaaggggaagactggcatcacagcgcgacagncaaacactggacttaggccatagatggtaaggctccaacaggcgtggagagtatcgaatgcactgatgaacagaacaaaacagtcacctacaggctctggaggggagacattggtcataagtntgagaaatggaaggtcaccgctcaagccattggttaggaccaaggcgggcgctgcttgaaatgggcgggcgaatctgaaaggctcgccggggagggggatcctccagaggggtccatcgaatgccggcacaaatgccctaaagatatcgaagggcat

SEQ ID NO: 16243 - DNA, 235 bp, Glycine max
  Clone ID: PAT_MRT3847_114674C.1
tgtcaacatatttcccttacctacagctggacctttcaggcccattgtgcatggtcaatctttgtaatacaacctgaatgcgtgaggtggaaggggatcttttcttgaacaacttaaggcagcaaggattctcaataatcttgccccatccatacgtattgttgttgatcattgacctaagaaccgttgtttggaaagtctgcaagctattgtgcagaggctgaaaatatacaga

SEQ ID NO: 16244 - DNA, 270 bp, Glycine max
  Clone ID: PAT_MRT3847_114675C.1
cccgtagttaaatctgcgatccattagttaaagataaaaaaaaccctaagaagtttaaggcgggttcgaaaactcgctctgtccttggtcttttcctcacggtcaacattctcttctttgcccttgcctctgcctacgggacatgccctagccctaagccaaggcataatatgctcaagcctgtgaagccaagtccttcaggtggctcaggtggttcgggtggttcagcaggctctggtggttcaggtggctctggtggttcaggtggtt

SEQ ID NO: 16245 - DNA, 544 bp, Glycine max
  unsure (1)..(544): unsure at all n locations
  Clone ID: PAT_MRT3847_114676C.1
tcggctcgcgtctctacctcttgaaggacgacagcacttacaagctcttcaacctgctcaaccaggagttcgccttcgacgtcgatgtgtcgcagctgccgtgcggtctcaacggcgcgctctacttcgtgcagatggacgcggacggtggcaagtccaagtacccgaacaacaaggccggcgcggcctacggcacgggctactgtgatgcgcagtgcccgcacgacatcaagttcatcaacggcgaggccaacgtgaacaactggacgccatcgaagaccgacccgaactccggtaccggccagtacggctcgtgctgtcccgagatggacatctgggagtccaactcgatctcgaacgcgttcacgtcgcacccgtgcacggtatcgggccaracgcgctgcacgaktccgacgcagtgcggcgacnacgcctcgggcaaccgcttcaagggcgtctgcgacaaggacggctgcgactggaacccctaccgcntgggcaacaaaacgttntncggcccgggctcgtccttcacgctcgactc

SEQ ID NO: 16246 - DNA, 273 bp, Glycine max
  unsure (1)..(273): unsure at all n locations
  Clone ID: PAT_MRT3847_114677C.1
aaaaccttcccttctcttctcacccccacactcccatctcacacacccctcgcatnccaacaatgtctctcaccattccctccaacctctccaagcccgccgccctccgccccaaactaagcccaaagctaaggtccgctgccacanccaccatcgtctgctgcacnacaaacaaacaacnaacaaacaacaaacgtgtcttccggaccntgaaaggggttcntccggccngngntggcccntctcttcnatcttcntctccggcccntctcc

SEQ ID NO: 16247 - DNA, 522 bp, Glycine max
  Clone ID: PAT_MRT3847_114678C.1
aagaagagatgatttacatgtttattacggaacaccaatataccgctgaacagggcactttgaaactctatgatgaaggaaacaaaggtcagaatggatcgttacactaagacttaacctacccggggataacttgcgaccgaacaaagaatgggactacgcatatcgattgctacttcatcatggagagaagacagaactcgatctatctacatacatcattgatacacggaaacttatttgaattacaagcggacacggtctggggcacccataaagtctagcgaggagctgtggggctccatctccttgtggcataaggaaaggcccttctcagggcatagatgctagctctctctcgtccagttcaaaacgactgctctgacaaccataccagtggccccgaggaaaactatactccgcgccacctccgtcaagactaacttctgatgcacagactgggagatcacctacctgcgagctagcatatgcacaccatacgaggcactggtgccctatcct

SEQ ID NO: 16248 - DNA, 860 bp, Glycine max
  Clone ID: PAT_MRT3847_114679C.1
gtgacgaatgatgttacacaagacgctcccgttcatcggatttgctagcagtcacagtgtcacccttttatatttaatattttcaaactcgagtgggtaagctcggaattcggctcacgctagccgcttcaccaaagttgaaaattttcagaaaccaaaacctctccctccttttcttttttccttcttcgccactctctccattcctccgatgatttccgaaccggcgagttccctgagaaagagcaacttccaagaccggcgcctcagcatcatcgacgtttcctccgccgacgattcgcttctcgatggaaaccctctcagccaccaacgttcagagaaccaagagcaggccgatgtgttgtacacgccgaactcgaagaagttcgaagacgccgccaccaaactccaacaatgggaccacgagcctcactccaacgactcatccggaatcggaaaacctaagaaaaacagcaaatgcaatctgcgcaagagtttagcctgggacagtgcctttttcaccagcgccggggttttggatccggaggagttgactattataattgaaggtgttgagaaggatgagaagcctgaattaccgtctattcaagaggatgtgtacaagtcgtgtgagtccatttctacgttagcgagtgatagcttgacctttgaaagtgtggagatggagggtgatttatttgaggatgtaagagcttcaattcagaaatctagcaaagagtgcagccctgcagcgtcaaacatcaaagtgccatcttccccttcggttccattggttcaaactcatgactcttcaaaaaaggtgggcatgggttccttgcactaagatgaaggtcccacct

SEQ ID NO: 16249 - DNA, 495 bp, Glycine max
  unsure (1)..(495): unsure at all n locations
  Clone ID: PAT_MRT3847_11467C.1
acgcacgcaagcgaggaatncggaattcggctcgagcggctcgaggaaattccatgtactaaacgttctgatgttaaaaggtactagtacgatccttttaaactcacgaacatttttaaaattaactagctataaaatatttttttcacacgatagttttatataaaaaaaataaaataggaaaaggatgttatttgttgtcgagtaaatctattggagaaatgcaagagtcaatccatttcacttgacaaaatagcaggagcccgctgaagccctcactcaccccacgcgtcgctcgagccaccatgctacaaagtactgaccaaccaaacaagtaccggggcacaacggtaatttcatcccctcaaaactcaaaactcaaaactcttttttccttgtacatctcgcgcaacttgctgtcgttttgaacgaaaaagctttggtttttctaatccaactcagtttttttcacgcaacaacaggggagtttagatc

SEQ ID NO: 16250 - DNA, 274 bp, Glycine max
  Clone ID: PAT_MRT3847_114680C.1
aacctcaatgtgcggccctgaaattgctaaggccatggtagatgtaggcgaagaaggaggagctgatgccgtatgccatgggtgttcaagtaaaggtaatgatcaagttcgctttgaggacactttctttgctcgtaactggatgcacaacattgcagctccgaggagggagtggaatattacatggaggtaaaacactattgaatatgctaaaaaccatattatgcctgttactatgacaaagacatctatatatagcaggaataggaatatt

SEQ ID NO: 16251 - DNA, 435 bp, Glycine max
  Clone ID: PAT_MRT3847_114681C.1
acgagcacaaaccagaaaaagccaaccaaccatttcccaagagaatcacgcatgcaaaatgtcaccctaccccgaaggatcaggattcctaaacgagcttccatcagtcttgagtttgacaacatcttcacaaggatgccaggagaccaaagtaacaagtctttgaggctttgatggcacatcacttctatctgcagtcttaacatatcatgcataattgtaatttgattcacaacataccggctaaacaaaactccatcataatttttttagaattcctagctttccaattaaaaaaatataggatgttgcattactttgtcatacaagttacatgagttggtgctctttttatggtagagtaagttattatcattacataatttctcaataaatttcttatgtttagaattttgattttcctcatatataatt

SEQ ID NO: 16252 - DNA, 556 bp, Glycine max
  Clone ID: PAT_MRT3847_114682C.1
accggaggtcgcccataaaaaacaaaataaaagtctctaaaatctgagatttgattgcaaagtaaacctgatacatctgactgagattgacccaaattacctatagggaatatatttcttgctaagttgctatagttaaacaatgaatgaagtaaaatcagaaaactataagggagtagactatcactttaaggttcttatttcactagatttcaattaaatctacccatttatacgtattgtggcacaatttgatgccttactggtacatgggctgcttgtgtaattgccgagaactccatgtactgtttacaggtgaacttggaaaaatgattgttggaagtctcttactctcctcgagataaggaaaatcaacagtgtaatgtagtccacggctctcatgcctagaaagcgcactgctgaccaccagctttgcacaacaaaagaggtttctcatctcacagatctcaggcccgaccattgttggctttcatccatgctgaaacagagactcctcccatttagcttctaaactaccaattttttgctcagcagt

SEQ ID NO: 16253 - DNA, 596 bp, Glycine max
  Clone ID: PAT_MRT3847_114683C.1
tttaaaaaacggcagtggccaactggccatatctacattttgataacagcatgagcacacttattacagaaaaaagaaaaagtaaaaagacattctaattttatacatataaatattcaaaaggtagattctaacacattatacatgtaactttatcctatcattttctgcatagcgataattttagagttggctgatttacccgtcacaaaaattccgggagtggccaaaattaaagactgaaactgaaccgctttgttgcgcagatgcaactaattaagggcgcgtttgtttatccgtttgagcagagcattggaagcaactgaaaaacaaacacacattaagcattaccaagttttctaccggtgaactcctccctcactcggcgaatcaaagtttcctccaaaagaggtgagtaaagcagagagaccacccctgcttgttgccccgccaccgacgctcagaccaagaagatcacgggtcatgggctggcccacaaatggagtaatagggcccatcatcacatctggcacactcccactcccacatggaagcccaagcccaaggttatccaccactggatgattctcttgctt

SEQ ID NO: 16254 - DNA, 485 bp, Glycine max
  Clone ID: PAT_MRT3847_114684C.1
ttccatgcgtccgcgttagccaagtgcttaatcgactcacttacactgccacactttcgcatttgcgacgatgcaattcgcctattggacgtgaagggaaattggcaaagcctcgccaattgcacaacactcagtggggaatgatttgcccagcggagacacctgaaggccaagctgtgggcctggtcaaaaacctcgctttaatggcttacatatcagtcggttcactgcctgaaccgatcctcgaattcttagaagaatggtccatggaaaacttggaggaagtggcgccaatgtccattgcggacagcacgaaaatattcgtcaatggcgcttgggtgggcattcatcgcaatcccgaccaactgatgacaacattgctgaaattgcgtcgtcaaatggacatcatcgttttcgaagtgttcatggtccgtgacattagagatcgagaaattcgcaatagtactgacgccgggcgcgtgtgt

SEQ ID NO: 16255 - DNA, 329 bp, Glycine max
  Clone ID: PAT_MRT3847_114685C.1
cccttctccaccaattaagagggaaagaaatcaatccttgtctctgaaaagaaacgatatagtgtgggagaaaagggtatccaaaaagacgcatgctaagcctgaagcacgagtgatcaacctatctaagtgaagtgaagatactgcccaagatgattaagaaaaaaatggggctacgcgcgaaggagaaaccggaggatgaggcaccagtcagatattcttcaacgtgctgtgaagcttcaagggttgatgatcttggtggttggaaagatgcactggcccaacgagatatgtctgtggcacctccggtcaaccaagaggttgattgt

SEQ ID NO: 16256 - DNA, 300 bp, Glycine max
  unsure (1)..(300): unsure at all n locations
  Clone ID: PAT_MRT3847_114686C.1
cgcangcacgcgtacgtaagctcggaattcggctcgagctccagacccgcacgccgcgcgcacagagctctcagcgccgctcccagccacagcctcccgcgcctcgctcagctccaacatggcaaaaatctccagccctacagagactgagnggtgcatcgagtccctgattgctgtcttccagaagtatgctggaaaggatggttataactacactctctccaagacagagttcctaagcttcatgaatacagaactagctgccttgnaaagaaccagaaggaccctgggtccttgacc

SEQ ID NO: 16257 - DNA, 521 bp, Glycine max
  Clone ID: PAT_MRT3847_114687C.1
ggctcgagcacatacaccaaaaccaccaaaggttgagcctactcattcaccaaaaccaccgaagaaaccaccatgcccaccaaaggttaagcctccacatgcaccaaaaccaccaaaggttgagcctcctcatccaccaaaaccaccgaagaaaccaccaagcccaccaaaggttgtgcctcctcttgcaccaaaaccaccaaaggttaagcctccttattcaccacatacaccaaagaaaccaccaagcccaccaaagggtaagcctccaccaaaaccaccagttaagccaccatgcccaccaaaggttgagcctactcattcaccaaaaccaccaatccctaagatgccaccacttgctccagttgcaatctacaagaagccacttacaccttcttgctacactccctaagttgccaccacttgatgcagttgcaatctacaagaagccacttccacctgttcctgcactccctaagtttccaccacttcatccagttccaattacaagaaccactttc

SEQ ID NO: 16258 - DNA, 400 bp, Glycine max
  Clone ID: PAT_MRT3847_114688C.1
ggaattcggctcgagggtaaataactatgaagcctacctttctattatccctttccttcctgcctttttttgcttttctggctctttgggaagatgctgtactagtcgtggtcatgcgtggcaacctcattttccctggtgggacatattacattatgccgttaacatggggcgctgtgggtggcggactgaaactacgccggacaggaaactcatactgtgcagctactgtttttcaagattactgaaaaatctttcgtggcacaccacccaaagacagcatacctgtgataagccctggaatcatctttacaggtactggacttgaaatcctgttcgcagaggaagcttattgtgctgaatccttcaaatgggtggcgtttgtggacattgaaattca

SEQ ID NO: 16259 - DNA, 355 bp, Glycine max
  Clone ID: PAT_MRT3847_114689C.1
aataaataattacagatatttattttgaaagatcaaatatacagaaaaaagaagaaaaagaaatctcacctaacatgtttttgatccaatatttttgatggccccttctactctaatctattttagacacctgaaaccagcatccgtactggtaaaattataagtacggatactattctaaatagttgcatacgaacaatcttttcattccccaaaatactaaaaaaaatatccaataattgagttaaattaaatggagtaactccacaaccgaacttcagcatcgtcgaattccacgtcagcgcttccatattcatcactcccgaagcaatgcgtcggcgacatgagcaccatg

SEQ ID NO: 16260 - DNA, 378 bp, Glycine max
  Clone ID: PAT_MRT3847_11468C.1
aggaggatgtgaatgttatgggtggagcacatgtactgcaaaattctggaacccttaactctaacctcactcctcccaatgcctttagaagagacaactgggtcaacatgcactctatgccagactctagaaaatcagctacagatattaacatatctttgcctgatagttaggttggcgatcgaggggcgcactctctatcctcaagaactcttgctgacaacattcatgactcagctgttttattaatgtttagtgttctctctctttctctcactctcattaaaaggtatcatcacatttcatttattttcaatgagtaattcatgtgaattttgtccaaggcactcaagatagttggggtagagacatacgaca

SEQ ID NO: 16261 - DNA, 106 bp, Glycine max
  Clone ID: PAT_MRT3847_114690C.1
ctcttctccctgaagaccttaaccaagtcctctgttcgtgttcctcgtttcacatggcttcccaaacccaaaagagacgtgaggatctactaataggctcaggagg

SEQ ID NO: 16262 - DNA, 2641 bp, Glycine max
  Clone ID: PAT_MRT3847_114691C.1
ttgtttttttacttatatgaatgttcttttttaatttaatattttcctactcaagaaaatactataacatccttgcaatgtaaagacgcccattaacttaattagacatcattatgataaaatactttaaaaagtacttaattactacaattaccaaatatatttggctctttttaatcagagactttcagagacattggttaagaaattaaaagaaaaatgattttttataaaaaactggaaatcacaagaaaacataaaaaaaatcacgaacagaattttgcacattcctgttaaaaaatttctccttttaatttcttaaccaacacccgagaacactgattagcatttgctaatatattttagtttaaaattcatttgacctatccatatgaaattatgactactaaaaacaaacacattttattaaacgaaacaaaagaaaaacgctaaaatcagagactccactccagaccaagatcacataagcgaagtaacttgaaactcaaaaaacaccacaactcacactacctgactaaagcaaaagggaataaacaaacaaaaacaaaaatcagcaaatgactatcattggtttaacagctcttggaagaatctccaagtgttggggtcgatccattcccttctaccagcccttctgcattcattcttccctctgctgcatttgcagtagcagcttcattcatcaaggttgcatcaagagactttggaaatgtaactgtcccaaatgtgaaatcactgggcttgctgacctgttttggtaactgctgttccttggactttttctcctgagtcgccttttcacgagcctcatagaacccaaaatcatccaagatgcatgtttggcttgaatgctccttgaaaattttggcaatttgaacacccttctcaaacttaacctcctgagtatccctgctatttgttacaggtttgttttcattgttttcaagcgttatgtgcctcaacacgctatttggaatatcctttatgacgtgccacttcacagaaaaacaaccagtccacctgtcctgctgccaataatctacagttttaccaaaatcaacaggacccaacatctctgctaaaccaacaaactgcccactagtgttgaccgaaaataacaaaaatatgggacagccaccgggcttctccttggcttcctgatatgctgcatccagctttttattgccgttaggggtgcttgcccatgcgctatattttatgcttttatgaatatcatcctcactataggatttgatgacaaaaaactttgcatcagaataattctcagcaaaatctttcccattgtactgttccttgtcaggaactggaggaacttctttgttatcactcttcactggaaggttctgtcctttgagtaataatgtgacaggtccaagacttttgatatttttattatcagaactcttggcagctctgggtcccttatttagctcgctgaaaccatccatgcttttttttaaaccgcagccataccctgtgccattaaatttgctatcgaaagaacccattctagatccatacccagcagatccaaaacgagaatcaggcctaaatgtgtttccatattggctgtacatcctgttgcttggatacatcccattcatgaatccagaaaccaggtcaagtccagatggatgtctggaaccactcatgctcacgtattgtggaagtggctgaggaagtctttgattcctttgagatgtaaaatctttcacaggcactactgatgaagataagccaaccttggctccatgtttggactgtctatcagatactaaggacacatctgaagggactggcagctgtgtaccatgggtgcttcttggaccctgatagcctgacaaagaagcataagctggcaagctagtcccttgataagaatcatttgtattcaaagatgtgtgctgggaactagttaaaaatggattaaacccatttttattagtaaaatcactattggccatgttaacagtgtgtcctttattcataacatttgatgaagcaacacgatcagcatcaacagcagttgatatttctccttgtggaagactgattttgttgggagtaaatgacacatcagcagaagctggagatttgtaataagaacatggatactggtactgttgcagcccataatgctgaccatcttgttgaatcattggagaagacgaattgggcggtgcatatgttccatatggtgtataaccataaccttgatggtacatgtaagagcagctatccccataaacaccttgagccatccctccatcaaggttcatatatctggaataagcattccaatcaccttgcccatcataacctccataataatacgcagatgggtatccatttggaacaaagcatgaatttggattgaatggcttggccctccctttagctgccccattggaaaaagcaggtccattcttcttcgcaggctcagcaactccaatggctttggactcagagtccagagtcaaattctgcaataaatctgcagttttgtcagaagaaggagcaacagctgccatgatcgaaatcagagagagaaagggtcgccgccaactccgtgttctttgggtttgagcggacgcgtggg

SEQ ID NO: 16263 - DNA, 327 bp, Glycine max
  Clone ID: PAT_MRT3847_114692C.1
ccctccaaagctttttttgttctggcaaaggaaggcctttttttggggtggggggtcattatttggggaagggcacattaacattggggaagaccctttggcggggggaaaaatgtttgggtagggcctttaccattggccaacaaaaagggcatttttactcccaaaggggcgggttcctcccccagggagggggtgacccaaactcggggggcatgagcccagaccctgaatgcaggcccccctccagaagggactccaaccctgcaccttggaccaggatcaagaacgttaaagctcttacgaccaagtttggggttgaaaggg

SEQ ID NO: 16264 - DNA, 348 bp, Glycine max
  Clone ID: PAT_MRT3847_114693C.1
acggctgcgagaagacgacagaaggggattgcacctaatatagaaattaataatgcatacacatcccttttcttctttcccacaacgacataccaaagtaaaagcttccaatatttgcaggaaccaatttgtactcttcagcatggcctcatttgcatgcaattcaacgtcacatggcttttgttaacaatggaaacacaaacaggagagattcagagcacaagttcattgggaattcctagaatctcttcagttgctagagactcagatctcattgataatctaccatacacgagcctgaaggacattatatgtcacacaccatcgaggtgttatttaaccttgtat

SEQ ID NO: 16265 - DNA, 402 bp, Glycine max
  Clone ID: PAT_MRT3847_114694C.1
ctttctccagctttctttcatcgcccgcttacctgacgttctgaagaacctgttggagtccctccagtcggtgattgattatgcaatccaatctggtgggttcgagttttatttccaaggaacttactccgtgaaatgcatccaggaccggttcttggtgaaggattttgagaaatttaattcacccttccggttaggcttggaggccgggtctaagccggaacttctttagggcatgagctgtctattgaaaagcaatcccgacgcgcttttgatttgcaacggctttaaggacgcgtagtacattcttcttgccctggctgccaacatacttagcccttaaaaccgtgattgttgaggagcaagatgaggagggtgctttgatccgttgaattgagcaat

SEQ ID NO: 16266 - DNA, 233 bp, Glycine max
  Clone ID: PAT_MRT3847_114695C.1
aattcggccgaggcctcgtgccgaattcggcacgaggtggagtgatatgtgtgataagtaatgtgatgaaggaaaacacagataaaaaaatgtgctggaagagaaagtgagtgtagatttataactatctaagcatctacgtatttggcatttcttttgtttttttatttttatttctgaagggataaataaatactcagtaaaatatgtatcgaaaaaaaaaaaaaaaaaaa

SEQ ID NO: 16267 - DNA, 256 bp, Glycine max
  Clone ID: PAT_MRT3847_114696C.1
ataccgagcgagcaaaaaagtaaaaaggataacttgagtagctagatagatgagtagtgacgcgataggtaacaatggcgtgggtaggcctcgagtggagctggaactcctcagtttcatttctgtacggtggacttgcacccatttttggggtcattgtggtagcgttgcttttggtagcacgtcaaggctgtcgtccaagatggcctgaaacaacaacaacaacaacaatagagtcactgcgtgctgatgacgc

SEQ ID NO: 16268 - DNA, 378 bp, Glycine max
  Clone ID: PAT_MRT3847_114697C.1
gataggaaagaaaaccaatggaggcaaattttaacggagcaattccagctgagagtggtcaccagattgcatactggcatactatgaagactgtccgatgcagccaataattttacaacttggttatacatggagtgttttttgatttattgctctaagagaggctggagactgagcctcttatattatacggatgcattacgattatgtcataagatcttaagggttaggaaaatggaacacgagggaaggattttacctttactgctcgctgcattgatgatcacgtatactccatttgggattgacaaagctattagaaggaatcgtgattcacttgaggtgaatgtaagactattgtaggcacctggacccatt

SEQ ID NO: 16269 - DNA, 232 bp, Glycine max
  Clone ID: PAT_MRT3847_114698C.1
ggtgcacgccaccaccaccgcggaaggaggggcgggaggttgaacccggcgaccgaaaccgccggcgcagagtggtgatcaaggaaatgggtcagaggctaagctgcgtgcaacagcagcacgaggagcatggtgggctcttcccagcacatgcaagtggagaaatggaggaagtcgaggacatggaggaggaagaccccacagcgttggaacacaccactggcagtgaccg

SEQ ID NO: 16270 - DNA, 646 bp, Glycine max
  Clone ID: PAT_MRT3847_114699C.1
attgaaatggacttgtattttcacttgagatttgttaggtaattggatgacatacaaccttacgcatttcaactaggacggataaaaagggtattagacgagggtggactccctaacaaaataaagagcaacattgttaaccttgacacaatcacagatatccccaaatactaaacgaagagaaggatagaaaactcttttaaatcaaaacaaaattaatttcgagttcaatggatcagctgaaagtaacttcttggattgtgcgtaatagttgattcactgcagccgcaatttcatccaccgtgttcagcagacacccgtcctctaccttgacgctaactgagtaaaggaccatatcatcaagagtggaaacattaaggtggagaatgctgagcttgagactttgaagcccaacaacgatcttcataatctgcccaggttgtttctttgatagtacctttagattggcatggttatccaccatggtcacttcaatgtctgctacggcccactgtttctgctcctggttgttctgtgccatcgtcgtaccacgtgtcgtgtattgaggaaacgcgaagaactcagcaaagggtgttgttgttgttgttgtcgacgtcccatttaacccaacaacattctctttccc

SEQ ID NO: 16271 - DNA, 381 bp, Glycine max
  Clone ID: PAT_MRT3847_11469C.1
tcccgggctgactagtctactggccgccggccgcccttttttttttttttttcaccttttttttttttttttattttctattttttcattgcttgcaattaggatcaaataaaactttgattaatccctgaataaaaaatcttgtcaacatataaaagtctttattttgaaaccaaatatgggacttatgtcccctatgaagctatataaaccgtgggtcgaaaaccaatttacctcaatgccactgagaatttttttgcaattttccctgcggaacggaataaggaactggcctcaacagtggcacagaacctggaccatcacctttcagcaagctaaggaaactaaaaaaatggtagcgctaagtggaaccccatttgc

SEQ ID NO: 16272 - DNA, 267 bp, Glycine max
  Clone ID: PAT_MRT3847_1146C.1
atataagaattatttcaaaacggtacaacgagttatgtctaaaaatcagagagcaacatgccacacgctaataatgcattggaacttgggtggaggatgccaattacctcctaaaacctggaatggaagggccttgttttttactggtttgaaagacgcactagggaagaaagtggataggggaaatcttgatttcaatttaacggcgcgaaggtatcctatgctattaaagcgcattgataaaatcttgattctgcgtgacacgaa

SEQ ID NO: 16273 - DNA, 243 bp, Glycine max
  Clone ID: PAT_MRT3847_114700C.1
tcgaagacgacagaaagggacacccacacccaaacaaacccacttagatgggttcctttgggggcctcctaatgctggttcttgcggcccttatactcatgcctcaagggcttggttcttactacaaaccgatttagaagccaccactgtgcaagccctcagtgtgcaagccaccactgtgcaaaccaccgggttatatgccaaaaccaccgggtttcaagccgaaaccaccggttttcaagc

SEQ ID NO: 16274 - DNA, 421 bp, Glycine max
  Clone ID: PAT_MRT3847_114701C.1
ggccaataacactattattattattttttaccacaaaaagaaaaaagaaaaaaaggggggaatatagctaaatgcctaaatattctctggccaaaaaacagagggaaacagaacaggggccgggggaggaaacagaaacctcctttttcacctggggtcattaaaacacttattccaaaaacctttaccctttactggaccctttaattacccaccggaaatgggtgggccgggaatccccaccgggaatggggaaatttgccggtttttttccggaaaaaaaaattttatttttggtttgccaggaaaccaaaaaaaaaatttttttgacttttgctggagcttaaaaaccgggctttaaactgggacacccttttgtgcaaacctttaatcgggggtcattttcatgttttccatgccc

SEQ ID NO: 16275 - DNA, 376 bp, Glycine max
  Clone ID: PAT_MRT3847_114702C.1
gtcactcatttttcattctttgaattcagatggctccacagtggtatcaacggcttataacttaactcctgacagaacacacgagcaaaagctttctctcaacaactttaaggaaggactttttattggaggcatatctataggatcatgcttgggccttgtcatgagtggacgtgaaatccacctgcacaccattctcaatacctgccgaaaattttgttgtaaactcgaccagattagggaggctctgaaatgcaacaaagtagtcttccttgctgaatgtcatcaacatggcatgagtgaactcttgactcaagcacatctaggctctcaatgtcgctgtcccattcaaaggactggaccacactaatctgtg

SEQ ID NO: 16276 - DNA, 177 bp, Glycine max
  unsure (1)..(177): unsure at all n locations
  Clone ID: PAT_MRT3847_114703C.1
cccacgcgnccgcaaagggggaggngcannncnctctgctnngcaancaaacnncagcgagggaggacgacnncnnnnataacgacacaacacaaannnncacgnnacnngaggggacnncncacgaccaannangngganccaccacaaccaggancaaacnngcanagcancccc

SEQ ID NO: 16277 - DNA, 542 bp, Glycine max
  Clone ID: PAT_MRT3847_114704C.1
gggtacaaaaatgtttacggaaaaacaggctcttccggctctaatgtcaggacaaaactggcaatctcagcgagtatttacaatgggattacaaagtacctaccaatgggtatttctggattcaatcccaattctatacagttgtcacgatcagaacacaaggtcttccaagtgaccccctcacccctataggcgaaataacaaggaatttatggccagaattcttttgagaagtttcaactggcaagcttattattgactcttggatgaataaaattgatgtgtccctatcatttttatcttatccaacaaccaccaataatctagctgttacttttttggagaatgtagcattactctatgaagtaatttaagttagaatcttcaatgcagaaagctttctatcatccagatattgtgaagtcctgaagggtgacctagccattttatctttcctacgtagcagattatatataaaaaccaaaacgggggttctcctataaatgaggggctttttccctttcaaatggatgagatgctga

SEQ ID NO: 16278 - DNA, 411 bp, Glycine max
  Clone ID: PAT_MRT3847_114705C.1
gcgacctggcttgtggttgatatgaccaaacgaacacactcactgctaagagagtatatgacacatgctatacatagctccctgtaacagctatctcgacggcatcatccaggaagaatggaccgtcctacttcagaggctggagcatgtgagctctccattccactctcgcggggaggacccatatacgttcctaacatggtcggcccctccactaaggatcctcattttcagacttgtcttggttctgaacttcaagatcgagaggctgaactgtctgaagatactttgcagcccgcattacttaccgatgaccttcatgctttcacagaggatgacttagaggatatggatctctacgtggtacttaagggttgggtgaacgaagcacattatgctccgcttgtggac

SEQ ID NO: 16279 - DNA, 324 bp, Glycine max
  Clone ID: PAT_MRT3847_114706C.1
gtacaacgctcgctgcaaccattaacatttccattaccttgtgggtactaaactctatggtgaacttttttcatgacgatcttcttgccgaactcattccataaacatgcccctgtaactccctattctaccatgcattatttatttcatgtcttatttgaccaatgcttatacctaattctcaatgaaactacaaagcaatctactggtcattccattgatgttcacttggacccacaattggacccctatttcacaaagtatttcccaaacaatcatcgattccactaatgaacctactaattctattggcagcaactttaa

SEQ ID NO: 16280 - DNA, 1274 bp, Glycine max
  Clone ID: PAT_MRT3847_114707C.1
ggaagcaccagaagaactctcttttgggggctccaaagatcacaccaacattgccaaaggaaaaagaaccaaaagggtaaggccacaatctcctattcccttctccatcaccgccaattcttccaccggaggagaaaaagaagaagattgctacaatgttgatgatgacaacatcataaaaaatgaagatattaacaacaacaacatcaataacatcaacagcactcccaccacttctgcagaattacaagacatcacagatgaagaggaggacatggcgaattgcctcatccttttagcacaaggacaatcccgggaatccccgaaacacgccgaggaagacgccggcatgagctacgccaagcacaacagtaggaaattcttggaagctgctaccttggggtctagcagggcagggtactatgtctatgaatgcaagacatgtaacagaaccttcccttcatttcaagcacttggaggccacagggcaagtcacaagaagcctaaggcattgatggctattggccaaaagaaaaaacagcaacatcttttgtcatcagatgaggaagagtttcaattgaagaccaataagtcaccattttccattcaattgaatacaaatgggaatttgtacagcagcagcagcaacaacaacaacaagtccaaggtgcatgagtgttccatctgtggtgctgaattcacatcaggacaggcattgggaggccacatgagacgccaccgcgctccggtcggaaccacccccaccgccaccatactctccttcaccccgttggctttggaaccagaagaagatcaccccagaaagaaaaggaatgtgttgaatttggatttggatctcaaccttcctgcccctgaagatgatcatagagaatccaagtttgcctttgcatccaagcaacaacaacaacaacatggacagaaacaaccacaacaacatcatcatccagaacaaaaacaacaacagccacaacagcaacaaacaagtcttgtcttccccgtaccagctttggttgattgtcattactaacaaggttttagattggcatttctcaagatgatcaccaaacgaaactggggttaatgtgcaagttagccatacatttgtcgtatgatctgattttttttttcttttttgatctatacatttatcaaaaatttacattacatgatgattcttttgatcctttgtaaacttgatcgagccatggtgattattaagggtgagctcagtttgtttattggagaaaagtttt

SEQ ID NO: 16281 - DNA, 353 bp, Glycine max
  unsure (1)..(353): unsure at all n locations
  Clone ID: PAT_MRT3847_114708C.1
cccacgcgtccgaatgagctgtaaatttatagcatggctgcacaagctcttgtatcaggagcatctcttaccttctcagccgaggctacaagacaaattcttggaccaagatcactccaatctccattttgcttctcaagaaaagtctcctttcttgttaaggcagctgctactccccctgtcaagcaaggatcatacagacctttgtggtttgcatcaaagcaaagtctttcctacttttatagcagccttcctgttgactatggattagaccctctgggactttctgacccttaangnacatgaaccatcaatcatccttaatgtctagnntnnngtgagataaccaatgt

SEQ ID NO: 16282 - DNA, 468 bp, Glycine max
  unsure (1)..(468): unsure at all n locations
  Clone ID: PAT_MRT3847_114709C.1
ggctcgagcagggaagaagcatcggaaatgggtggttacttcatcttgaatggtcttgagagagttatccgactgttaattttgccaaaacggaatcatccaatgagtatggtgcggaattcatttaatgaccgacgggaaggatatacagataaagcaattgtaataaggtgtgtaagagctgaccaatcctcattatcagtaagattgtattaccttcgtaatgggagcgcaagacttggtttctggttaagaggaagggagtacttgcttcctgtgggcattattttgaaggccctcattgacacaactgaccgtgaaatttatgtaaatttgacaagctgctataatgagaagtatgaaaaggggaaaaggngcttgtgggacccaacttgttggtgaaagggcaaaaataatcttagatgaacttcgagatctgtctcttttactcgtcttaatgtctagaat

SEQ ID NO: 16283 - DNA, 509 bp, Glycine max
  Clone ID: PAT_MRT3847_11470C.1
tgaagcgacactttttgaggctttatatctcaatgatgagctgcagcaggtagtttctaaatatgaggagttagaagctgctcaaagttatggggcacaacaacctcaaaatgctgacactgacaagcatgatgccgaagctgttcaaaatcccaatgaagtacccaaaagtgatgaatctgaagctgctcagaatctggatcgaaagcttcctcaaaagtctaacactcttaaagtcaatgcaactgggggcgagggggatggtcttgctgaaactaaaatagtggatgatggcacgaaggagaagaatgctgaatctagtttcaagcgagataccgaatgaggaaagcatagttggattatatgtgtgctctagcatcttattttgtctttgttcgtattttgtaataagctattgtccttctatgtgggtttttttacattgcccaaatatgtaattggcaggagtttcatcccgatgattatgatatcatatgctagtttcacat

SEQ ID NO: 16284 - DNA, 305 bp, Glycine max
  Clone ID: PAT_MRT3847_114710C.1
gaaatggagagaaacgagtaactgagataaagggaataataataggagactcaaaccggatgaaagcaaagtgcgagcacgcgagagtccgaataaaagaaaagggtatcgtgaaaggcagattgagacgagtatttaggcaatggtacattgttgcgaaatccttgagtatcgagaaatgcagtgcaagcgatcgagtcgctatgtatactgcggtaccggattacaaaaagtcattctacacgtggtcagagcgagacgttagagcgcagggagaagcaatgttgagtaatagaaggagataa

SEQ ID NO: 16285 - DNA, 482 bp, Glycine max
  Clone ID: PAT_MRT3847_114711C.1
ctttcgttttattgggattgcaactacatgtgggtgggctgataatgaacaacataggccaattcccctgggtatggagcttttggtggaccacaatgaacaacccagcgtgccgtcagatgcttcaacgaaccctaaggatagccgtgagaccataacccacactgtgtttgagacctttaatgcccctgatctgattgtcgctcttcaggactgatattttactgcatgccagtggtgcggacactcgtattgtgaaggattacggagagggtgttagccacacggtacctattatatcagggctaggccctcccacatgcaataactagggatcgattggctggtcgggacctcacagtctcagctgtgtagaagttgactgttccgggctattctgcagatggtccacggatggaaaatggctgctgacagattctgtggatcgaattacacgacattttttgtcctcggattccatt

SEQ ID NO: 16286 - DNA, 589 bp, Glycine max
  unsure (1)..(589): unsure at all n locations
  Clone ID: PAT_MRT3847_114712C.1
ggctcgagtgaagacctcatcgtccaaaacctccgagtcctcgactcagttcgactcgccccactcgcctctccgatccttcccgctcttcgacaacgccgaccccttccactcgccgcaaaatgacaactcccgcgccatcgtcatcgtcgagacaacttcgactcaattcgcccaggccgcgccccccgcgccggagtccgagcaccggaacccgccttcggaggccgtggtcacccgccccgtttggccggagacgaagtcgtcggccaccgttggtcggacgcgaccgaagccggtggcgccgcccagttcggtggtgccgaagagagaaatgatggcgaaaaaagttgcattagggtttcgggtaagcgaagtagtgctgtgtctgatttcgttgtcggctatggccgcggacaaaactcgtggttggagcggtgattcttgtgatcgctacaaggaatacaggtattgttcgactgcgaatgtaatcgcatttgtatacgctgcgtatcaagcgtgtgatctggcgtatcanggagtaacgggcagacgcatgatcaatcagcacctgcggtaccacttttga

SEQ ID NO: 16287 - DNA, 706 bp, Glycine max
  Clone ID: PAT_MRT3847_114713C.1
gaattgtaatctgatttgcctttcattcacaaagtaggagatacatatagctagtcagtcataggatactaaaagtctaactcctattatttgttggtgataattatttcaattaaatgtcttaattatcatttaagtcactcaacagacataaaaatataccaacaaccaatattattctaaacatcttattacaaactttatatagtaaaataacataaaacaagacatcattcctcaagttgttttatgttgttcaatgaaagttgtcatcatttgattcaaggcttcctttgctttcttagcgggtgtctttgtcattgattcaccaagtccttgtattgcttcaatctccttgttccttatttgattctcatcatttgttttagagtgaggtgaaactagcaccatggtgttttcaattgggtgaatataaaatggattggaactttggaaggattgatcttaagcaccgtccactgttgcacatagttgattgatgagtgctcattgtgagaaaatcagagattcatgcagcaggaccctctcccatacaaatgaaagatgctaaatgaaaagtttgagtattttctttgttaagctaactgcgaaatcagaaagatagttattatatgttgattcatatataagttatacgaccaagaccaactgtacgtggtaagttgaactaactgttagtaaatac

SEQ ID NO: 16288 - DNA, 909 bp, Glycine max
  Clone ID: PAT_MRT3847_114714C.1
gtgcagttgacgtcggcgagttcctaaaagaagaaaaaatatggagaaaaataaaattcgtgctctaccctctgcatactgaagcaagtgctgagtggtgatgactgttgagagttgacagcggcgagcaataacaagaagaatgatgactaatccgatcaaaatgcaaacttgtgaaaatgtgtggtgtttctgtttgtgggtctctcggaatgtgcatgtactcgacggaaagcgtggtggcgagtctcgaaaatggcgtgtttaagaatggggacccattgagttcagtgagtcccattctaaatcaatgggtggaagaaggcagagaagtcaccaaacttcagctcgaagatctcgcttaccgcctcactcaatctcgtcgcttcacacatgcccttcaggtaatttcacatttgccctttttcatggactaatttccactattaaatgtgtatttggtgtccatgtagtgattttcatcattcatggattaatggaatgtttatttaggttgtgtttggattgaggtaaagtggtggaatggatggagtgaattggaatagaatgatgccatgccaggttttgatgttttgttttgaggaaacttttttactgtataaaattttgctacaattacacagcctcaaaattttacgtacagttttttcatgaggaactaaaacttacgtgagaacaccataagccaaatgaatatagttcctttgtttttcccgtttcgtcatacaatgaaattacaccactatgagttgtctccgggaaacattgctaaacagatcaacctgatatcaaaagtccgtggccttgaacaggcagagaaatattttagaggcatccctgatgctaaaattgagttcaagatctatgctgctcttttgagatgctatg

SEQ ID NO: 16289 - DNA, 1902 bp, Glycine max
  Clone ID: PAT_MRT3847_114715C.1
gactgtgagtgagattataaatttccggttcacaacctttctgttttcaatttctgcaaaaacccctcaacagtttctcctcactcgttgcttatcggcacttctccttcttcggaattcaccccttatcgaaataatttgttcttgtttccttccaaaaaaaaccctagctagcttccatggcgtccaagaagaagcactcagagggcatcgccttgttgtccatgtacaacgacgaggaagacgacgaaatggaggacgcagaagacgaagacgacgaagaagaaggtgatgcagggatgcggatggaagaagatgccgccggagatgcgagatttgcagcggaggaagattccgccaatagaacagccatcgttgattccggcaacgagggcggcgctgatgtggggttcattccggcggagaagagtagggttgggacttcgacaccgcagacgaacaatttgatctctccaccgctggagcaaccgaggattggtcggaaaggggcgcttacgatagtggattatgggcatgatgaagtggcaatgtcacctgagcctgaggagggagagatatatggtagcgttcgagtcatgattggggaccagcttcatgtgaccaacggtgattttcaagacagatcacctttgggaacagtccaagttttgacacctagcaatcaagctaacactccccagttctctgagccattgaaatctgataccatgaacaatgatgctgcgatcagatcagaggatgcagaacttggagaagcctgcgagaagacgacagaaggggtagatccattggataaatttctccctcccccaccaaaagctaaatgctcagaggagctacaaagaaaaataaataaattcctggagtataagaaggctggaaaaagctttaatgcagaagttcgcaacaggaaggactatcgtaaccctgacttcttactgcatgcagtgaggtaccaggatattgatcaaatagggtcttgcttcagtaaagatgtatttgaccctcatggatatgatcaaagtgacttctatgatgaactagaagctgatatgaggcgcgaaagtgagaggaaagagcaagagaagaagaaagcacagaaggttgaatttatttcagggggtgcacaaccaggaattgtagctagtgctcctaggattagcatgcctattgcaggtgtttctgctgtgactgcaggtggtttgcctttggtgcctgctacttctgattctattaatcgggatggtagacagaataaaaaatcaaaatgggataaggtggatggtgataaaaaaaatcctctgccctctgcagggcaggattctgtatctactattggggctcatgcagcaattttatctgctgctaatgccggtggtggatacatgcaatttgcgcaacaaaaaaagcgggaggctgaggagaaaagatctagtgaaaggagggtagagagaaggtcgtgagccattcactgtgggcctgtagtatcgagcattgcatataagctgtggcatagatttttctgaaacattaatgatcgttgacactgtatattctcaaacttggaaaaaaattcctggtccaaccgcgcctttagctggtataattcttccaattcagtatttgtgacccatgatctcgttgactgattggttgggggttcgttgttaatgcctaaattttatttggctagtgcttgcatattttattatgcaatcgacttcccctagtggataagattttgttattgtagtgcttgcgtattttattagtctactatcttcatttccaattcaagcttatggtagctgtatggatccttcatccttgtgggaagattttcagtatttgatccacatatcttatggcataagacttatg

SEQ ID NO: 16290 - DNA, 293 bp, Glycine max
  Clone ID: PAT_MRT3847_114716C.1
tttttgattccaagtgcgtgtttgtttctgcattttggtacattagaattcgtacaaacatgaaaacaaacacattaattaacctagctaccccagttcctaaacattcatgatcaatagagaaattgctatgataccaaaagaaatctaagaatttcgtacatatatatattttttgcgccagtaattgaatgagtttgaacatgttaaaaaaagagagagagagggagagagagagaatctctcaataacaataccaagatccttgaatttaatgatgggaccatagaatt

SEQ ID NO: 16291 - DNA, 341 bp, Glycine max
  Clone ID: PAT_MRT3847_114717C.1
ctcccatcatcagaacctccaacattaactctccttatgctgatcacgaacttattgggctcgttaacttcggatcttgctctgccaactcccccgttattgccacttacctcttcaagtacctccctaccttgcccgctcaaactgctgccccccctgccggaagtcccgctaacccgagatctttcgatggtaactttgcctgtggagatggcgttgttcaagatggtggatatgagaaatgcgatcctcccacaaccgttatcgctgacagagaaaaccctaacctctgctgcaacccttgtacttgccaatatgaggtcgccggaactgcttgcact

SEQ ID NO: 16292 - DNA, 181 bp, Glycine max
  Clone ID: PAT_MRT3847_114718C.1
ctcgagccaatcaagccttttgtaaaattctctcaactaattcgctagcggcttgtattaaacaaagcaagcaagcatatccatttcaacatggccctcaaaactggttcagttgaaatgttcttcttcccctttgtaggatgaggacatcatatttcaatgattgacacagcaagagtgt

SEQ ID NO: 16293 - DNA, 214 bp, Glycine max
  Clone ID: PAT_MRT3847_114719C.1
ctccacatgctactgccagatcttctgaacatgcgggatcctatgcatgatctggaattcgtgatttctttcgctcgttcgtgtggccaattcaataaaggaacatgcgtaagaaaattcagcatgaccctgttgatgggtatgctcggcctatctagaaaatatccacacctcttttaattgtcgtaatgatgtgtgaagggtgtgttatttt

SEQ ID NO: 16294 - DNA, 389 bp, Glycine max
  Clone ID: PAT_MRT3847_11471C.1
aaggcatcaaatcatctgagaatcacgattatatatacaaggatatttccatggacttcaacattgaagtttctcctaaggaatttttcgcagcaaagctaatatgagccattgctgtagtttcttggcaaaacctgcagtctatggtaccgaaaccatcacaactagtcaagcttgcaagcaatcatagaaggattgcttttattcattagaaaaacaacagtgacacctcgcaactcttcaatccgaaagaacagcacaagtgaacccattttgcacaagctggttaactgcatccctgaacttgtaatagtcatcaacctttgtatacacttgatgagaaatcctggcatattcaagaaccaccccaactttccctttttttgggg

SEQ ID NO: 16295 - DNA, 587 bp, Glycine max
  Clone ID: PAT_MRT3847_114720C.1
ccacgcgtccggttcctccccaatgtgtgtgaccctgaaacatgagagaagagaaaaggcatgagcaattcgtatccaagacagcaaaacagagaagaacagagccaacaaaacaaaacaactctcactggaactgtttcttctttcctctccaaagatcctcaattccgttactaatctctccgtcggggatcgccatagtgtgctggaaatttttctcaggctgttccggtggaagattcggtgtcttcgagtttttggttctgggttcggttgccatggacaaattgcttttcaaagcttgtatgggaactcaaactatgtagaaatatttaaagaagcaggaaatttttagattgaaatgttgatattgttatatctcaacaacgtattgagaaagtagacaagaacattgagaaggcaggtgactgaaatggagtgcaataaggatgaggctacccgagctaaagaaattgctgagaggaagtttgctgcaaaggatacattgggtgcaaagaaatatgctttgaaggcccttaaattatttcccgatcttgagggtatctctcaaatggtagcaacacttg

SEQ ID NO: 16296 - DNA, 431 bp, Glycine max
  Clone ID: PAT_MRT3847_114721C.1
cccgcgtccggtgagagcaagagacgatctatgcataagcgttcccagcttcttcaagtgccccatctctctcgacgtcatgaaatcccctgtcagcctctgcaccggagtcacctacgaccgctccagcatccaacgctggctcgacgccggcaacaacacctgccccgccaccatgcaactcctccataccaaagacttcatccccaaccgtactctccaaagcctcatccagatctggtccgattcgcttcttcgccacccaaccccttccgaaccgctcccttcccctgaccaagtcctccgaaccgtcttcgacttcaaatccgactcggactccctccggttcgggtcgctctcgaaactcctcctcttcgccaaagattctctccaaaacaaactttttcttgcaaaattagaagggcttcgtg

SEQ ID NO: 16297 - DNA, 199 bp, Glycine max
  unsure (1)..(199): unsure at all n locations
  Clone ID: PAT_MRT3847_114722C.1
gggggagcaaattcatttggcattgatacacatgggcccagacaangcacaggggggggaaacaaacatactttttgttcaacctacaataagcttttgctcaccggggtgacattttccaggggcttaaattttttataaaaaaaaagaaaaaaaaattaccattgcccatttccaaaaaaaatctttcctttttaat

SEQ ID NO: 16298 - DNA, 286 bp, Glycine max
  Clone ID: PAT_MRT3847_114723C.1
atagagagatataaaactagcaaaagttcatatcacattttactttaagtaaactaaagatatgtatatacagaccatagcatttattccaaatcccggtagggcataaacttaacagagagaaaagacatggaggcgaatattaatccatttaataggtgccttactagatatacattcgcccgagcattaatctatctgcaacaatgaacatattgggaggtcctgttgagacatgagatctctacaggctcagaggcatgtaagtatattttagccggggcac

SEQ ID NO: 16299 - DNA, 241 bp, Glycine max
  Clone ID: PAT_MRT3847_114724C.1
gcaaattaaaatagcatgggaatatgggacaaagccatattttgctgctggattgtaacataacctacagatccttgagaactatcatattatttcacacgtttgctatcctcaatacaaaaaacagtcctcttcaaaaacaaacaggaatgaaaattgaccaccgcccatcaaaaacctaattatgaaagatacggctacatgagatcggtggaaacttaaatatattgcttaaacaaaa

SEQ ID NO: 16300 - DNA, 272 bp, Glycine max
  Clone ID: PAT_MRT3847_114725C.1
actcgagccgattcggctcgagtttgttcataagctcaaataagtcacagtttcatgacatctgattgtgtctcgatttgacttaattggaaaagtgatgtttccacttagaatcaaactccagaagagtcaatctgacttttgaagggcataagatgagaaaaagctgtacttaattggggtcaaaatgtaatatatattatttattggttttggttttttggattgagaaacatatattaattataaaaccatgctctatatatgtcatt

SEQ ID NO: 16301 - DNA, 1361 bp, Glycine max
  Clone ID: PAT_MRT3847_114726C.1
ccacgcgtagggtttcttcctcaattcttcagtgtttgcggagagaaagagagagcaatgagagagatacagttacccttaagccaaacacagaaggttcgtcttcagaaggctctggaacagttagagtctctgtcaacgaaggtgaattccgatgcttcggtaatcatcgccgattccatccacgtcaaccacgaagatggcgtcctcaagggacacggaaccgccgacctcaacggcgaagtcgtcgccaccctctgcggcgtcgtcgagcgcgtcaacaaacttgtctacgttcgcgcgttacgctccaggtataaacctgaggttggtgacattgttatagggcgtgttgttgaggttgctcagaagcgttggagattggagataaattacaatcaggatgcagttttgctgctctcttctatgaacatgcctgatggtgttcagaggcggaggacagctgtggatgagctaaacatgcgctgcattttcgaggagaatgatgttgtttgtgctgaagttcgtggtttccagcatgatggcttacaccttcaagcaaggagtcggaaatatggaaagcttaatagaggtcaactgcttactgtcccaccttatttagtgaagagacaaaaacaacatttccatcatcttgaggagtttggtattgatttgatacttggctgtaatggattcatatgggttggggaacatgttgaagccaaagatgacatgatagaagatcaagtgagccaatctgattcacaagttttattccctaataaaaattgtgtcagtcttgaagaacaagagaaaaattatacaatattggagacaagaaaatacatatccagagctgctaatgctgttagagtattgtcaaccttaggcttcaatattacattggaaatcatcaagggaattattgatctaagcctatctatgaatcttgatatacacgatatgcttggttctgagttttgtgttctggttgccgaaaaagaggctgaaaggagaagctcaatgaaaaaaaggcggtagaaatggagggggctttttgactcaacaactataatttggttttcaattttactaaattagtgtgactcgtaaagataaaattcccaagatagtgtaagtcatatttcagactagcaaagtataaaagggacttgatatggatgaagtacggaatgaatgtttaaagacgttggatttttttgttatgacctttcttttcttttctaaatatttctagatatttgtttgagatagatagctatttttaaatagaaaaaggaaaaatggtagttgttgtctagtatataaatcgaacaagtatgatttggaaaacgggactt

SEQ ID NO: 16302 - DNA, 447 bp, Glycine max
  Clone ID: PAT_MRT3847_114727C.1
ataatcatctctgtcagactccgctcctgatttactggcatctgcattgtctcgctcttcaggcatgggggtctttgattgctcttaagggacaaccttcccagatttcttcacctctggcgacactggggcatctgcattggcagactgcttgccagagctctgcgcgacatcttgcgcttgaactgccacaacactcccttcatcctttttgacagacggagtttctgctttattggaaaccgcagtctcttcttgcttctaagagacaggggatactatcttttacttaggaactaccttcccaggattcttcacctcagccactacagcatttgcatccgcagcctgcttgccagagctcagggcaccatcctgcccttgaatctccacatcctccctaggtccacatacaagagatttagaagctccacccaccaccttctt

SEQ ID NO: 16303 - DNA, 645 bp, Glycine max
  Clone ID: PAT_MRT3847_114728C.1
tcgcgatttctcagaactcctacctttcgcgatgaagtcgaattatttctcacatctttccatacacgctccagtcttccattctgtactgttaatacatctgagagcacaagatgacgagcaagaatagagccgagattccgaagaatgtggaagatctctcagattacctccttgttctcctagacaacaattgctatgaaggagacccgatcaccattctgctcctctcagtgcgtagggttaccctatctgctatactttcggaggtaacccccatgccagagaagatttgatagagcatcacttttctattgataccttccttgtgaatctgcgtccctgaaagaccgaaaccatgcacggaggcttaactatctactgaactcctctctttaagaagcgagcatacagcatcgtcttgtattctccactgtgagcttgtagcttctgactgaatgccacattgcatgacgaatcatctcctaggcgtgtgttcatcgacgcatgtgcccctgcgatttgtcctagatactatactagcatctttgagactatatgaactgtgtgctgtatatactctcatcgctatcgtaactacggatatgggaagttccgtattttacattattcagcaagttattc

SEQ ID NO: 16304 - DNA, 356 bp, Glycine max
  Clone ID: PAT_MRT3847_114729C.1
gcgttctacggcttctataagacttctttaagggactctgcatctgactcctatagaagcctctgagaattccatatccccgttttccttcactcttaaacccctattcatttccaccatcacaagaagcatggctgcaatatcaattccttctcacatgaaagcttgtacatactctgtgtatgtaaaatccaaagaagttctcaagtttaatctataattggctttgccttaagtgaatgaataccatgtccttatcaaagtctcttctgtttcccttaaccccattgatcataatacaatggaaagctattttaagaacatctacttctctttacctactgctcctgattatt

SEQ ID NO: 16305 - DNA, 256 bp, Glycine max
  unsure (1)..(256): unsure at all n locations
  Clone ID: PAT_MRT3847_11472C.1
tttatttcgttcctctattcgctacgtcgtcgttaaggntcgtcntcggatnngtggnacttgactgcnagcgnggtgaaattccgacgctccgagtggcnccggattgcgatagnggtgncgaatatgaangttnntcgttnaagactctcaaagggcaatcanttcggaaatcgangtganggacgcaaagacacggtttcngnaanttgaggaaaattntcgnaantgttcaggntgaagatgnctatgctgt

SEQ ID NO: 16306 - DNA, 235 bp, Glycine max
  Clone ID: PAT_MRT3847_114730C.1
cggggtgacgacactactcagacaacatatggaagagaaactaaagacccctaactctcttccttcttaaccctcttcttctgcatctccgccacctttcattgccccacataacccccaaactccaaaccctcctcatccgcacttttttttaaccgggtggtactatcccgccccgactcaaccatatcaaaatccgacccgaaaccctaccccttccaccttccgagacaac

SEQ ID NO: 16307 - DNA, 488 bp, Glycine max
  Clone ID: PAT_MRT3847_114731C.1
attttcatcttttggtaccgttttttctattgccactcaaaaacctccaaagaagtgttagcaatatgatcacatttgcagcccatcaattcaaataccaggggtacgactctttacttcatcgtaattcaaacctcaatgaccacgctctcctctttgatgtagaaggtgcattgttgaaatcttcttttttgttcccatacttcatgctcgttgcgtttgaagcaggagggctcttaagagccatagttctgcttttggggtacccttttgtttgtttagttggtgatgaaatggggttgaagattatggttatggtatgcttctttgggattaaagcagagaggtttagagtgggaaggaccgctttgccgaagtatttgttggaggatgttgggtaacaaatgtatgaagagctgaaaagaggtggcaaaaaagatgggatgagcaagttgctcacagtgatggtggaaaagttcttgacagag

SEQ ID NO: 16308 - DNA, 218 bp, Glycine max
  unsure (1)..(218): unsure at all n locations
  Clone ID: PAT_MRT3847_114732C.1
tnnnnnnnnnnaaacagaacatcggttatgattgaattcattcttaagaatagaagttgaaacatcattttgaatattgcttatacatatttactcaataggtcaatttctccccttaaagaatgtaattcatttgtttaattgaacgaacaattgttatcaacaacactaccataatcaggtattcataggttgttgcctgtagaggtttgttcact

SEQ ID NO: 16309 - DNA, 516 bp, Glycine max
  Clone ID: PAT_MRT3847_114733C.1
gtacgtaagctcggaattcggctcgagccacaactccttttcccaatttctctctcctctctctctctctctctctctgagttctcctttctctctcttgagttaccatttctcattcattcataatgcactaatcataacaacaccgttcagctcaacaacaaaaaataaaataaatcataacaccgttcgttcatcaatggcggttccgctgcattcctagattgctctctttttcaccaattttcattcgttgcgtgtgtttgttcgctgagtgcgttagttattacagcaatggagttcgagcaccccaccgcgacgcctctcaactccgccatgacctacgacgaagcctccatggagcgcagcaagagcttcgtcaacgccttgcaggaacttaagaacctgaggcctcaactttattctgctgcagaatactgtgaaaaatcttatctccatagtgaacagaaacaaatggtacttgacaacctgaaagactatgctgtaagagccctt

SEQ ID NO: 16310 - DNA, 127 bp, Glycine max
  Clone ID: PAT_MRT3847_114735C.1
atggtgctgagtgtttggagtggtgtacgtgatataagtagaagcaagctcagccatatgatattgacaccaaatgatgacaatgacaaccacaatgcttatggaatgtggaagaagcctctgcatg

SEQ ID NO: 16311 - DNA, 309 bp, Glycine max
  Clone ID: PAT_MRT3847_114736C.1
gtgtataggaaaaaatgcccctcgtttccctcgggagattttttgcatttccatttttggaataaaaaacagggagtcttttgtttgggacccacaatcacaccctcctacatcactccaactaattactttgcctactttttcaacaaaaattgaatccaaagatttgaccctgatgcttttatgggggataaaattaattctacacccccagcctttagtcagcctaattatatttctcctaactagttagggaacctcctaaattgggtccctgggttggaacttgcaaatcccaggggcctttta

SEQ ID NO: 16312 - DNA, 361 bp, Glycine max
  Clone ID: PAT_MRT3847_114737C.1
aaccggcccgaaattcccgttcggaccacacccgtccggagttttaaactatgtaaataaactttttttgtagcctgccaagtccatctgaaggggcggggttaacttgtaatagggttgccaaaatcccaaacattactttaacaatgggaaataaactttttgtcttaacaccagaccagttttttttaagaactggagaaggttttccagaagcttgcctaagtggtttaattgcttttgatgttcctcctccaaggggcccatgggggttttttgtcaaggttttaataagggcttttaaaaccgcttttgcctatggaaatttctaagtggggttggtgtaattatttataatttt

SEQ ID NO: 16313 - DNA, 345 bp, Glycine max
  Clone ID: PAT_MRT3847_114738C.1
gaagaaaattgaacccaactcatgagcgaaaatttgatatacatactcccaaattcggtttggtctatacgcaacccatttctcggaagaagaaattttctctcttcgtgtgccggaaacatattgtagagtgctcgcaaaggatcccctccaattatgaatggccaactctgtcctcctattgcctcatagattgaccacttattactgaccctcccccttgcctattaaaaagatgtttaatgaatgtggcgccatgttggaattgaagcgctacccatcgagcgggtgaggctctatgatggaacgccttccatggaaagatgaatttcctcatggaacaaa

SEQ ID NO: 16314 - DNA, 1300 bp, Glycine max
  Clone ID: PAT_MRT3847_114739C.1
cggcgcgtccggctcccctcgagcacaagcggctcaagactctctctctctctctgttgaataaccctccacaaccaccttattcaatctttaaatagcttattgattaatgtcttatagtcttctatgaataagatcttcagattttgttacagtttttcaaattattctgtggcaaggagagaagaaaagatcatagaaagtggtgattcttcgaatattgaagagagaaatatggggttgagattgaaggagacattctacttgtcccatggagcaccaactcttgccgtagatgattcaatccctgcgtggaacttcttcaattcgtggaaggagcagtttccgacgagaccctcttccattcttattatctccgcccactgggacacccatgttcccaccgtcaacgtcgttcaccagaatgataccatctacgacttctatggcttccccaaatccatgtacaagctgaagtatccagcaccaggggctccacacttagcaaagagggtgaaggagctactcttaggatcagggtttagccatgtggatgaagataagaaacgtgggcttgaccatggtgcatgggtgccactcttgttgatgtacccagaggcagacatcccagtgtgtcaactctctatttcatcaaacaaaggtggtacctatcactacaacatgggaaaggctttggctcctcttaaggatgagggtgttcttatcgttgggtctgggagtgccacccacaacctcagagcaattgcacctcgtggtacccctcctgctccatgggcttccgcatttatgtcctggctaaaaacctctcttcttgatggaagatacgaggaagtaaatgaatacgaagagaaggccccatatgcaaaaatggctcatccctggccagatcacttcttcccattgcatgtggccatgggagctgctggtgaaaattcaaaggccaaagttgtacatgatagttgggatggtggttctatgtcttatgcttctttcggttttacaacagctgacagttgatcccacatactcatacgttctctatactgttcaatgttgtcttaatatgtataataattaaaatcacaaatactttgttatgtatcaatactgtgtgtttgtttatctattcgtcgctaaaggcctatggcttggttcatatatggcaggctcaaatctcaatccctctcttttcacctcttcctgcttatttagctttcaaaattaatacttggtttgttccattataatttttgtataagaaaaaaattattccaaaaaa

SEQ ID NO: 16315 - DNA, 567 bp, Glycine max
  Clone ID: PAT_MRT3847_11473C.1
gttgtttttttttttttttttttttttttttttttttttttttttttggggagaaacaaaggggtaaaagccctgtctttcccaacacttgatgggcaacaatacaattataaaccaaataccctaatgggggattttaccaaaaaattttttattgctgattcttttcttttttttcaaaaacaacaaaaaaaaattctggcccaaaaaacagccaagggctttgtatatccattttacttttgcttggggttgaaacacctaagggaccgtcccttaaggtttaaatcaaaagctttggggatcccttaaaatggaactgggagagggaaaaatttggccacttctaactccccactcatggacttctccacaacagatggaaaaacggtccacggctttagggggcccaaaaaggggcccttaaaaaccctgttctttaagaaattaaaacgcacacctttgaatgcgggaacctttacaggcaccccaaacagtgcaggaaaaccccaacctttggggaaccattacaatgctgaaaccctgggttgggtgcgggccgtaaat

SEQ ID NO: 16316 - DNA, 628 bp, Glycine max
  Clone ID: PAT_MRT3847_114740C.1
cagtacggctgcgagaagacgacagaaggggacatgtagtaattgtcagttggcagttttttcttagaatgaaaatgtcgtctaaggtcactagtgccaccctttgcctagcagtcttattcctcttcttaaccttcacatatgcaggcagacttggccctgcatcttcctctatcacttcaatcaaaactcaacatggggttttggaagaggagaagttggacgtggaggaaacttgtgatggtattggtgaagaagaatgcttgatgagaagaacacttgtggctcacacggattatatctacacgcagaagcacaaaccatgagatattcatatatagctggttctcatatcaaattcaggctatatgcctcactcgtttacatttgtaatttatgtctaagcaatagttttcatacatatgccacttaagaaattctaagagatagttcagtcacttatttttcatttcttgctgttgccgataggagttttaataatctgtattaaaagatgtatccctttttgtttaatattgtaaagcaatgtacatgtataccgattttggtagatataaattcggatattgcccttatttttgtttgggggatttattaaagaaagaaa

SEQ ID NO: 16317 - DNA, 990 bp, Glycine max
  Clone ID: PAT_MRT3847_114741C.1
ctgcaggaatcggcacgaggccgattagggttttcgggcagcgaaccatggcttcaacgttccgcaatctctcaccgtcctatcctccttaaacgaattgaaattcctgtgttctggtcgtaagagcgaaaccgcgaatgcaatgaattcacaaatcctcacaccgattagggttttcgggcagcgaacggttgcttcaacgttccgcaatcttccaccacgcaatcctccttctgaaggaaacgagagaaaagctgcttcacgcaagagcgaaaccgcgcatcactcgctttcgcacttcctcaccctcaagccgcaaaaatctcctcaaacagttccggggaaatcgacgccttttctgtcaccactgggtttaaaaggtgaggagggtggagctgtgaaagaagttgaaaaagagaaaaacggtggcagtgatgataaggtgatttttaaaagctttaagcacactgaagaggacaaaagagactttgttgatcaaattgaggttggtgaattggaaaattcagttgcggaggatattcaggagtcaaataaaaggaaaactcctttcgaaggtgcaaatgagagccaaactgcacgaaacaatgtggtagttcttggaggagcatcaaagttgaagccaaaaaaaggacaaattggaaatgacactagcaacaaaaggccaagacctcattataatcactatgcaaatggccgtggctggtgggattacgacatggaaggtgttgataatgaggaattgggcttcagtgatgaagtatgggagggggtgggatccaccacacttggtggaatagtagattggcattgatttagacattttgtggtagtgaggaattttgtactgtctcccttggcttatcattgacatcaatgcaatgcattcctaaactcattactccatgtagacaagaaagtcacttagtgtatagatatttgaattgcatttcagtttaattagtttacttc

SEQ ID NO: 16318 - DNA, 756 bp, Glycine max
  unsure (1)..(756): unsure at all n locations
  Clone ID: PAT_MRT3847_114742C.1
tcagcttcaatggaancaatatcgaacatagtcctgccaatggagatgcaatatctacagaacgtcgtgaggcagtgaagaaattctttaagaatcatttagatgtagtgccaaaagaggaganccataacttcctaacttttgtgattcctcatgacagagaggcgctcatgacgaatttcttttcagagctccaagatagagaagaagaatttggcatatctgatatccagcttggtctaacaacgctcgaagaagttttcttgaatattgctagacaagcagagctagaaagtgctgcagctgaagggagactagtgaccctgaccttaacatctggggaatctgtgcagattcctataggagctaggtttgtgggaattccaggaacagagtctgctgaaaaccctactgggtttatggtagaagtatactgggaacaagatgatactggtgccttatgcattgctggccactcacagaaggttcctattcctaatggcgttcaactatcttcttctccatctgtaagacaccgtagatatttaggccggtcaggaacagttcatggggttgtgattgatccaagtcaagttagttcagtagcttttcagtgatgtgtcatgcaaaatgtacagggagatgcatcatgcttatttatttttttcaacaggtaattatacatgagttacttatactcgataattgtagacacctctctcaaagcatatttaataaccgacaatgtttcaacat

SEQ ID NO: 16319 - DNA, 604 bp, Glycine max
  unsure (1)..(604): unsure at all n locations
  Clone ID: PAT_MRT3847_114743C.1
tgcctacctgcaaatcagatagtattccaccnaaatatcctcccatcttatgccatgactacatgactcagcgctacaaggacactcatgctgatttgaatatttataagaaacagcaagcttgagtagtcaacctttggaactgaacagcctggagatttttcacaaggacactcacctaagctgatttggatatttacaataagcaacaagcttaagaagttagtcttttggagctgagaagctggggaattttggactgcattatgtgttagggttaacagcatcatactactacattagcaatgttatgtagaatttgtttgaatgtcaaattagtttttgttttggggaagggggatttagctgtatggtttggtactttaatgttaaacctaaaagaaaaaaacatgtatgaaattaacagatgtatgtttttattcaaccctaaagttgggaaatgggaatgataggaagatgaaaaatgaacattagtattttgctttcatctcttgtttctagccaatatgacttacgagaataaaagttttatgttttatgtaaaaaaaaaaagacgtttgtatttctccaaacgtttcatagt

SEQ ID NO: 16320 - DNA, 3402 bp, Glycine max
  Clone ID: PAT_MRT3847_114744C.1
aagtgctttcagatgcagttgcaacttctgaagacaaaggcattagctggagtaaacggggagaatgtgctcttaatgattcagactgtgtgataactattgatgacatttataaatggcttgcggctactttctttctctggtttgttctggccatttactttgacaatataatcccaaatgcatcaggtgtgaggaaatcaatattgtactttctaaatcccagttattggatgggaaaaggaggtcaaaaagtgaaagagggtggggtttgtagctgtataggttcagccccacgtcaagaacaaagtacaccagatgatgaggatgtccttgaagaagaaaacaaagtgaaacagcaactaacagaaggtcttcttgatgcaaatgttgctgttcagatacgtggccttgcaaagacatatcctggcacacgtagcattggttgctgctttaaatgtaaaagaacttcaccttacaatgcttttaagggtttgtgggtgaactttgcaaaggatcagttattttgtcttctaggacccaatggagctggaaaaactacagctattaattgcttgacaggggtaactccagtaactgatggagatgcgttgatttatgggcattcaatcagaagttctactggcatgtcaaacattcgaaagcttataggagtctgtccacagtttgatatcctatgggatgcactgtctggtcaggaacacctccaactctttgctactattaaaggcctgtccccagcttccataaaatcaattacccagacttcattagcagaggtgagactcacggatgcagccaaagtgagagctggaagttacagcggaggaatgaaacgccgtctcagttttgcaattgcccttattggtgaccctaagttagtcattctggatgagccgactactggtatggatccaataacaagaaggcatgtgtgggacataattgaaaatgcaaagagagggcgtgccattgttcttacaacgcactctatggaagaagctgacattctaagtgaccgtataggaatcatggcaaaaggaagtcttcgctgcattggcacctcaatcagattgaagtcccgctttggtactggttttattgctaatatcagcttcaatggaaacaatatcgaacatagtcctgccaatggagatgcaatatctacagaacgtcgtgaggcagtgaagaaattctttaagaatcatttagatgtagtgccaaaagaggagaaccataacttcctaacttttgtgattcctcatgacagagaggcgctcatgacgaatttcttttcagagctccaagatagagaagaagaatttggcatatctgatatccagcttggtctaacaacgctcgaagaagttttcttgaatattgctagacaagcagagctagaaagtgctgcagtgagctttacgtccctcgtccgtgcaaagcgcaaattaaagcgcaaaaaccattctccttcggtgctcttgaaaacatgggaaaacagagcacagaattctctgccctcaactgcatcgacctctccaaccctgacatcaaccaatccgtcaatttactcaaacaggcatgtttggattccggttttttctacgttgtcaatcatggaataagccaggaattcatggaagaggtttttgcacagagcaagaaattcttctctcttcctcacaaggagaagatgaagattctcaggaatgaaaaacacaggggatacacccctgttcttgatgagttgcttgatcctgaaaaccaagtgcatgggagactacaaagaggggtattatattggagttgaaaaaggtgaagatgacccagaatcgaataaacctttttatggaccgaataactggcccgcaccaggtgttcttccagggtggagggagaccatggaaaagttccatagagagacattagaagtagggaaagcagttgcaaagataatagcccttgcacttgatttggatgctaatttttttgatcagccagaaatgcttggagagcccattgcaactctgcgtttgctgcactatgaaggtcaagtttcggatcccttgaaaggattatatggagctggagctcatactgactatggtttaattacactgttagcaacagatgatgtctcgggtcttcaaatatgcaaagatagggatgctaaacctcagaaatgggaggatgtagcaccattgaagggagcattcatagtgaatcttggtgacatgctggagcgctggagcaactgcgtttttaagtccacactgcacagagttctaggaaacggtcaaggaagatattctattgcatacttcttggagcccagtcatgattgtctagtggagtgcttgcctacctgcaaatcagacagtaatccgcccaaatttcctcccatcttatgccatgactacctaactcagcgctacaacgacactcatgctgacttgaatgtttataagaaacaacaagcttgagtagtcaacctttggaactgaacagcctggagatttctcacaaggacactcacctaagctgatttggatgtttacaataaacaacatgcttaagaagttagtcttttggagctgagcagctggggaattttggactgcattatgtgttagagttaacagcatcatattgcattggcgatgttatgtagaatttgtttgaatggcaaattagttttgttttgtggaaggggggattcagctgtatggtttggtacttaatgttaaacctaaaagaaaaacatgtatgaaattagcagatgtattttttttattcagccctaaagttgggaaatgggaatgataggaagatgaacaagtgaccctgaccttaacatctggggaatctgtgcagattcctataggagctaggtttgtgggaattccaggaacagagtctgctgaaaaccctactgggtttatggtagaagtatactgggaacaagatgatactggtgccttatgcattgctggccactcacagaaggttcctattcctaatggcgttcaactatcttcttctccatctgtaagacaccgtagatatttaggccggtcaggaacagttcatggggttgtgattgatccaagtcaagttagttcagtagcttttcagtgatgtgtcatgcaaaatgtacagggagatgcatcatgcttatttatttttttcaacaggtaattatacatgagttacttatactcgataattgtagacacctctctcaaagcatatttaataaccgacaatgtttcaacataaatgcttccaaaagataaaatgaacattagtattttgctttcatctcttgtttctagccaatatgacttacgagaataaaagttttatgttttatgtaccttt

SEQ ID NO: 16321 - DNA, 379 bp, Glycine max
  Clone ID: PAT_MRT3847_114745C.1
attgaaagtcctatatttacagctatattcgcaagcatataattgacaaccaacaccttatgcgaaatcctcttctagctataactcatttatgcaaggacccaataggagggtctcaacagtcacggtcataaccactgacataactacccgacattgaatataacgtagcctcgctcacctgagaatagcccttcgccttagatcttggtcgagttgtgcacgatcatgagttcatgttgtctcaaactttgagagaggagtcaactgtaacatctagccttttgtactgcgaatgtcattgactcgctgtgcagcttgtgatccaggctgctatgggtcatgagactatatgtgccagtgatcaaacgctcattgt

SEQ ID NO: 16322 - DNA, 139 bp, Glycine max
  Clone ID: PAT_MRT3847_114746C.1
gggacgcgtgggcaagcccgaagattacttatgcgtatgttgctcatagactgagaggtttgaagccatggatccagcaaagagcgtatggcgaaaccatcccacatccacctagagaccaagctaagtccatggagcc

SEQ ID NO: 16323 - DNA, 455 bp, Glycine max
  Clone ID: PAT_MRT3847_114747C.1
ttttactttttgggcggacgcgtgggaaattctgcaattagtaacttgttgagaggtgctgcttggtacaaaggctgcttaatggttaaaattgcgatgtctgggaatgcagcagtcaaaaggagtgatcgtgcctcattggtacatgtgtttttaacatacagcaacagttcagagcattttgatgcatgtaacgtggacaaaaatctgaaccacattcctgggaattgatctttccaatataggtgttgtggtcctaacaatggttttgaaatgtggacttctgagtgggctaatcaaacctcatggcacttgagttttcttattgacaatcccaaacagtctacagtttttgacattctcttgggaattttccaagaatttcgaattgcttgtaatacttttatgccagctctttctgtttcacaggttactttcagatcttctgaaaatgc

SEQ ID NO: 16324 - DNA, 969 bp, Glycine max
  Clone ID: PAT_MRT3847_114748C.1
atccgctccaaggttaaaacgttagtgtgaaaataacctttgatagttcagacacgacacataatagttggctgctaaagaataattgcggccaagccactaatacccaaactcaaagccatagccatggccaccctaatttcagtttaggaacgtttcatatccaactttcactttcactttcactttcacttccacatctaattcctgttcaattttctatccctactcgtttattctattggcaacgggaagaagatggggttgtgatttgtaattggagaactgtgtgaagtggaggagggaggacactttccacgaccacaatgcggtggtttccgttgagtactacctcaaactcggaaagagaacggaatagagagaacactagtcgtacttcggtgtatctcaatgtatatgatcttactcccataaacaattacctttacatgcttggccttggaatttttcattcgggtatacaagtgcatgacattgaatatggctttggggcacatgaatatccaagtagtggtgtgtttgaggtggaacctagaagctgccctggcttcatctttagacgatcagtgttgttgggcagcactgatatgtctaactcagaatttcgatatttcatagagcgcctgtctgcaaaatatcatggagacacttatcatcttattgccaaaaactgcaaccattttacggatgaagtttgccagcatctaacaggaagtcctatccctggatgggtaaatcggatggctcgtgtaggttctttctgcaattgtcttctgccagaaagcctccaggttgctgcagttagacatctccctgaacgtgttgcatttgatgatgatgatggatcaggatctgatggcctttttgcatccattgagagtgaagaagatgagcccaatcaccattttttaacttcaccaaatggtgatgttgcctttctaaaggaaa

SEQ ID NO: 16325 - DNA, 422 bp, Glycine max
  Clone ID: PAT_MRT3847_114749C.1
gggggggggaaaaaatgcctctggcccacaaaaagacctcgtccttccttttaataaaacaatcaagctcccacaagaagcattgggtaaaactgttcacttttaaggggggttttaaaatattaaccggccactccctcgctttgaacagatttcctttttcccactggtctgaacttttaagaaaaaaagggaactctagacggggtgacccctttttcctttccattaatacgctgaatctcccgatttacagcttgggttgaggcttccccttttcaaaagttcttttgggtgatgggaaagccagccccattttgaattgcttcaaaaagcctttcccggggaggggttttcaacttttgaacaaaaaactaaatgggttttcccttctcaaaatatttgtgattggtaggatgttg

SEQ ID NO: 16326 - DNA, 446 bp, Glycine max
  unsure (1)..(446): unsure at all n locations
  Clone ID: PAT_MRT3847_11474C.1
gtcgaccacgcgtccgcccacgcgtccgccctgcgtccgagagggagactaacaaagatatcgatgaccgatcaacacggggctggattctcgaggcgtgccattgacagcgacagaactagtgaccactgtgcaacattctgagaagacagacagagctcagagagcgaaatcaacagcctgtctcgcctcctcgcgnggtgtcggaccacaaacaactaccctgaggcataagtatcacattgaatcaccaagaggacacgacacactctctagtaacacaggaccatgagttgatgaagcaggaaaccatgagcctgtacaagaaacttatctccaccactggaatggtgcgagataaactatcaccaccggaaacatgctacccacaagctgcataatgaagggaccggacacataacctctcggagcaagaactggcgagg

SEQ ID NO: 16327 - DNA, 306 bp, Glycine max
  Clone ID: PAT_MRT3847_114750C.1
gccgcccttttttttttttttgggggtttatattgcattatttgcgcggatccagcgtttacaatctttacatgaatagaagccttggttctaaaatagcttctcgattagtatgggagccttcattcttatttgatatagaaactaaagtcattcattttgattctgttggggtgagcctaatgatcctaacaaactaagaagacactgtatgtacagtttaccttccccacgctggatagtaaaggccgcagtagatataaaaatccccgttttcaaaaattaattttaaaaagttaccccata

SEQ ID NO: 16328 - DNA, 205 bp, Glycine max
  Clone ID: PAT_MRT3847_114751C.1
aatttattagtcttacatgttacaactatttctaatgaacctgcatgttgttgattcgaagtgcacaatatttaaagctagatacgatcgttttgtattgtttgtgagggtgacggcctctaaaaaaaaaaatccaaatttataaataagaaaattgtcaattccacaaaatatgttgtctttatatttaaagggcggccctttt

SEQ ID NO: 16329 - DNA, 218 bp, Glycine max
  Clone ID: PAT_MRT3847_114752C.1
cttttaccaaaggtggctcctccttacagccggatgcacattctcgggcgggctctaataggccctgtaaatatcatagaatgaatgctgaatcgcaaacttcagacgaggctcctgaaatggatgatcaagacaaacctacatagacagaggtcagactggaacgaagaattgttcgggacaatcatggaggtgtgggttgaaatggaaacaaattg

SEQ ID NO: 16330 - DNA, 296 bp, Glycine max
  Clone ID: PAT_MRT3847_114753C.1
ggaacagctttttgcagatgtcactggctcctcctgttgcagtccttattctcagcttgttggctactttcctagtggtgattcactccccgattgcatttatagaatcttttaccagcccttattggacagaaagacacttcacgctttctctctcacatccctttctctatgctcacatatatatataataaaactctacaactggccaatataatcagcttttgctccctgactcatgagtatatgatatatactttttatgtgttgtgtaccactttagattactacttact

SEQ ID NO: 16331 - DNA, 536 bp, Glycine max
  Clone ID: PAT_MRT3847_114754C.1
tttttaatgggtgctactcctactttctctcaagtatattcattcatgatcttattttttcttgcatgtccattcactccttacaacattcttatctttacaacaacacttaagcttatatgctcatgaaggtccattagtagctgtatgattttcctttaagcttaagcaacaccttttgataagaaataacaccagaagcattccaccgtttcattcacctagcaacaatcctaagatttatatctgcctcaatctcttcaccattatgtatgatatgtaaatttttaatatcgcaatcaggtcgtatcatggtcagcttgcaagcatctcaactaatgattaaataaataacagttataacttataacataatgagtgacacaaaagagaattagttgtgtaaaacttcgaaaatgagtgactgggtttccttgtcttctgcaatcaagtcaaacactcattccaaacaggattcaagttgttaccaataacctttgtttttaacctttaaaccagtggtcgaataaacaaca

SEQ ID NO: 16332 - DNA, 441 bp, Glycine max
  Clone ID: PAT_MRT3847_114755C.1
aggcaaggaagtggaggacggagacacttcaagcggtgttagacaagagtatgcaatttctccactcaatctatttcttaccactaggacgggttcaaaggaatcagttgacagaggtttgaatcagagaaaagactggctttaataagagcatgggaagaaagtgagaagacaaaagcagagaacagggcatataaaaggcacaatgctgttgtattgtgggagaatagtaagaagcatctgcgaagcacatcttaaaaggattgaggaaaaattggacagaaacaaagccaagtgtgtagaaaaaatgcaaaataaagttgcagaaattcatcgaacagcagaagagaaaagggcaatgatagaagcctacaagggagaagaattcctagaaatagaggagaaagcagcaaagtttcgtacccgtggctattcacccaa

SEQ ID NO: 16333 - DNA, 722 bp, Glycine max
  Clone ID: PAT_MRT3847_114756C.1
acacgttgctattgttcaggctgcacttccttcaaggaattgttccgtttgtgtttgctaaggagtacaatgcccatccagccattcttagtacagcggttatatttgggatgttgatagcccttccaattactttggtctactacatactccttggtttataatattctaataccgaagtaaccaagattcaaggaaaaattaagcaagtgatttcaacctttgatgctttttgaagttagtaagcatgcgtggagaccacagtggagtacgctaatggacgaaaattatcactaactagtaattttcacaacagaggaggtaattccaaaagtttccgagattttggggacttcagaaaatttgaccctttgggagttctcatataattgtaacgcctccctattaaaaaaatgtccaagatgatgtaattttcaagaacctcaaagaggaaggaataacattgtacgggagacataaccgaggaaagctagggtaagcaaagtcaatgatatctagaaatggttccctatttattgagcatttgtaaattttatttataagaaaatccgatttgggtcatcaagttaagaagaaagtttagaattaagtggaggaaaaaaatgaatgggatgaggaagcccttcctttttattttttttctttaattttggaatattatttttattagggtaaattataattttagttttctttttttt

SEQ ID NO: 16334 - DNA, 241 bp, Glycine max
  unsure (1)..(241): unsure at all n locations
  Clone ID: PAT_MRT3847_114757C.1
ggttttggtttggttccccagcagattctgaattctgataatatagtaccattccatgccagagtgtggcttangtggagagaagaactcactgggaatggaggggcttgcgaaggaagatagtggtggaagtgggagcaagggtggtgctgctcatttgaagggctttatgaggtgggagaagttcttgcccaagatgattttcagggtgctattggttgaagcagatgattccacacga

SEQ ID NO: 16335 - DNA, 658 bp, Glycine max
  Clone ID: PAT_MRT3847_114758C.1
gctagctaaagagcttaaaccttaaaccataatgttctcatgacacaatgagggttaacagagaacgaatgctaaagtccacaacacacattttactgaataaaaattgtaagaaacagacatcagatatatacagaaatttatttttgtacagtgcaagaaactatcataatttctttttaaatacccgaaatcattaacaatacctagtggcagtaatgaccaaaccagcagtgttttccatgaccaaattcctcgtcatcagatctgctgtgaatccaccacaagagattagtcaatgagtttccatcatcaaatccatttaagcttcttatcttctgcattgcaccttcattgtcataaataccctgcagagcatagacaaaccccttccatccttctccaacaccttccctattcaaagcaggcaatgtccactccacaagctccttcacaaaatcaacattggaaaacaagacctcagagataggcagtatcggtaagagttgaatgccaagcctacattctctccactcaggaggtgcaaaccatagtccactgtccctcttattagcccaaagaacaccaactaccttgttctcttttccctcgagccgaatttactgattatccttcctctttcacatgccaccacatt

SEQ ID NO: 16336 - DNA, 147 bp, Glycine max
  Clone ID: PAT_MRT3847_114759C.1
aaaccggggtttgcacctggaagcaccggtgctgctaatttttaggttccagtcatcactagcataatgtgtgagttataaggcttagaattggggcctcatgggaagccaggatgggggggatccctttcaaggggcggattggaa

SEQ ID NO: 16337 - DNA, 710 bp, Glycine max
  Clone ID: PAT_MRT3847_11475C.1
gttgtgtggccaaaatctccagcaaagcgactcggaaacggacaacgcacaaaacggagaacagaacccatgtgccaagtgcgacccgaaggaagtgaaagagcacgagttggaccgttccacggtcattcgctgtcaaatccaaggcgagcccaccaagcagtacacactgcacagctgcgagatgcgctcccaatatttgtaccgtaactcgaagagtgccgtgggaaactacggtgccgccatgcaaacgatcgttgccgccacattgcatgcgatggactccaaacacacataccagcaaatcccggcgatgagtgcgagcacggaagagacgctgatgtactccaacagcaaggaagtggatgagaaacgcttttacaggaacggtgacgacgactttggcacggatggaaagggttcgccttttgcgcaagtgccaaaagtgcagcaggcgcagcaggcactgatcaaactggtgcagaacgtgcaggacaaactgaagggcatcgaccaacaggcgcctgtccaacagcaacgccttgtcgaaatgttgcgcatgtgcacacaacaggaactgaaccaagtggaaaggcaatgtccagggaacacgggacaacagaaggagcagtgcaagcagatgttcgtcaatgggttggcggagtgcggcaccaaaaactgtgtggcggaatctgcaaaacggatcaaga

SEQ ID NO: 16338 - DNA, 495 bp, Glycine max
  Clone ID: PAT_MRT3847_114760C.1
cgattttcatgaaaccataacagaaagcagatggtcttgcataatattaataagtttgttgataataattgttttgagtgaatttgagttaaatatgaatgaatcaaaagttaagaaattttattccaggaattccatcacttcaaaacaactccttcagaaaattcgagcaccagcacatataccctttaaacaacagaagtttaaaatccagagaatcctaataacataaattttatttccagagcttctttgaaaagggatatcagcaactcctacgaatttgtcatctaacggatgggttgttttgaattgcattcaacaccatttactacattttgatctgagaagaccaacgacgaaataagcgtatgggctatcacaaagggcccaggaaaaactatgggacaagcttcgacatctttctagtccctgttgagatctctcgccaagctttgattcttttctagtcccttgcacatttgctcgaccttt

SEQ ID NO: 16339 - DNA, 416 bp, Glycine max
  Clone ID: PAT_MRT3847_114761C.1
ctcctcccttttttttttttttttatacgataaacttataaccaactaccccgcataaaggatataaattatgaccaataaatataattcactccttaccatatgcaaaaccttttaaataacaacaccctatacttctaaggctgctcttaacaaaatacactacaaactaaattacacctacaaaaatgttaacatacgaaccatatctgacccacttattatacttcccaccctttatacacaataccatgatcgaactattctctcactggaatcacttgtatctattacaactagaactacatggctagcttctctaatcatgtacatattaaacccctcccaatatactatgatatacacacttttctatgtatccccctacaaaaaagcataatcttagatttcaaaaa

SEQ ID NO: 16340 - DNA, 1640 bp, Glycine max
  Clone ID: PAT_MRT3847_114762C.1
gcagcagtaatttgattggtaaagggcattttggagagaggggagggagaaagatattcggatcgaggccttcttataaaaacacgagtaaaacgatatgtcgggtaagggaagggtttactaaattgtgagaaacaacagatacggctccgcattgacgacggaatcgtttcaagttattgtgagcaaagaaagatagtgagtgaagtaactgaagagaagaaaaaatgccgtgcctcaacctcagcaccaacgtgtccctcgaaggcgtcgacacctcttccatcctcgccgaagccacctcctccgtcgccagcataatcggcaaacccgaagcctatgtgatgattgtactgaaaggatcagtacccataggctttttggtgggaatgagccagccagcagcttatggagaattggtttccattggtggtgttaaccctagtataaacaaggaacttagtgctgaaattgccccacttcttatagcgaactgggtccggggtatccaaactttatgtaaaatttattctaactaggcttatagctctacaggggaacgtccatcagtataaaaggttggttaagatgttcatttttattgacattttctattgctttcttgctgcccaacacgctaatttttaatctacgaattaagatcataaaattcttgcgggcatcaagatcttaatccacattcttaattttaaatattcaccaaggtggttcaaaccatccggtgtcgatattcgtatacagcggttacaactatcctcattccctcaagatcttgagggccaggtcccctcggtggtagagagtcgaagtcggagccggagaggcgagtgtcacggttggcgtcggtgtcctgccggaatccgcgacccttggtctttttgggggcggcggcggcggtgatggcggatttgagcttaggttgaggcggagaagcgtcggcgtcggggggccgtcctcgtccatcaagtcatcgtcctcaggctcgaaatccaaggcttcaccgtcagctgcgcttccttgcacttgccctctctcttccaacacacgaaactaacacgggtcaggtataattgatttcgatattttccttgcatctctgcttcttaaccctagtgtaaacaaggaacttagtgctgcaattgcttcaattctggaaaccaaattgtcagtgccaaagtcgcggttcttcttgaaattctatgacaccaagggttccaacttcggatggaatggatctacattctgaaatccgaattccatgttacattggttgtggtaccttgaatgttggatggagtgttcattatgtttcacccgtgtttatgtctatgtttgtatcattatataagtacactcgggatttctggtagcctaagcgcaaacgtaacttgcttaattgcaaggataaatggggatcatatgtgtttgacactttttgtgacaaacattatctggcaccgcttaaaatgataatttgtattgatgatgcattttatgaattaagcttgaaaccatagatttgatatgatcgtcatgttattgcttattaatatgataccatacttgttctatgatagtaatggcaggtttgtgttcaccaccccacaaaacccaagggg

SEQ ID NO: 16341 - DNA, 254 bp, Glycine max
  Clone ID: PAT_MRT3847_114763C.1
attaatgattttttataatggatctgttatgtattcatgagatgtgacgtgtatccgagaggacatgataaactattttttttttcttatatgactccgaaacatttccgaatagatagggtattatggtgtaatatacaaaaaattataacaacaatatattaatattttattaataaccactgcctatttgtaattaaaaataaactaaaaattttctaaattttttaaatatcaacgtcaccgtggtttga

SEQ ID NO: 16342 - DNA, 463 bp, Glycine max
  Clone ID: PAT_MRT3847_114764C.1
gcaaggttttgctgttccactaaagttgaatttttgtttcttatgttaaattgggtatacaagaagatattggtgtgacacctagcaaggataaaatgagagaaaattcctgttcatgataaaaaatcttatcatgaaagtataaatgcagataagaaaattcctgttcattaaagtctactgccaaatcagtggttagtctcaaacgctgccttccactgttttgctttggggaatacattcatctggtaatgtggtctctccaaggttttgctgttccactaaagttgaatttttgtttcttatgttaaattgggtatacaagaagatattggtgtgacacctagcaaggataaaatgagagaaaattgacttaggtaatttagatgcatacaaataatttcactagagacattggttagaagggtagatcgcatgatttttaggcttgtgaaaaggagca

SEQ ID NO: 16343 - DNA, 474 bp, Glycine max
  unsure (1)..(474): unsure at all n locations
  Clone ID: PAT_MRT3847_114765C.1
gtgggtaaacggtaacagcattggtaggtattggtcaagctaccttgcagatgagaatggttgctctccaaaatgtgattatcgtggtccatacacttctaacaagtgcttgtcaatgtgtgcacaaccttctcaaagatggtaatcaaatcaatttcttcaccaaattaattttagaattgtgttattttggtataaaaacccattagcattttatattttgttgtattacaataattaggtaccatgttccacgctcatttcttcgtgacaatgatcaaaacacattggtcttgtttgaggaattgggaggccagccctattatgtcaactttctcacagtaactgttgggaaagtatgtgcaaatgcctatgaagggaatacgttggaattagcatgcaacananatcaagtcatctcagaaattaaatttgctagcttcggcttaccaaagggtgaatgtggatcttttc

SEQ ID NO: 16344 - DNA, 553 bp, Glycine max
  Clone ID: PAT_MRT3847_114766C.1
ttatttttttttattaatatatttatttttaaaaaaattttgtacctgactttttttttgccgaattttcacccctaaatttattattttttgtaaattttatcttaaatttttgtgctcattaatggataaataataaggataaaattcacaaatttcttaaaaattaaagataaaagacgttaaattaatttattaggaataaaattcacaaaaattaaaaaattagggataaaaattgcttatataatatgaaatcctaaactactacgaggcaaaactactaccactaggaaattaattaacttaattttattgcaagtgctccaaataatgctgataagatggaatactctcttgaagctcacctgagcctgctatatatgaactggagtcccacctttttgctcaaggttatataaggcatgatcccccacttaatagtacattatttatgggagtaattaagttaacgagagcgtgtaaaatgattagtacttaactaaataataaaacttttaatgaaaaagttaacaatgcaagcaaaagttgg

SEQ ID NO: 16345 - DNA, 1073 bp, Glycine max
  Clone ID: PAT_MRT3847_114767C.1
cgatcaacgacaagaaccatggtttatcaaaacttgtttccaaaaaagtttcaagtttaaagtagcatgcaaaggaaaaaagctgaaggcaaaagagttttctgttctgttttacccacgcgcgagaattcaaaatggacgtgaaagaacgaccactaaaactttacttcattccataccttgccgcgggtcacatgatccctctatgcgacatagcccagttcttcgcctcacgtggccaccatgtgaccatcatcaccaccccttccaacgcccaaatccttcaccagtccaaaaacttccgcgtccacaccttcgacttcccttccgaagaagtaggcctccctgacggcgtcgaaaacttatccgccgtcaccgacctcgaaaaatcctacagaatctacatcgccgccaccacactgctccgcgaacccatcgagagtttcgtggagcgggacccaccggactgcatagttgccgatttcctatactgctgggtggaagacttggcaaaaaagctccgcataccgtggcttgttttcaacggattctccctcttctccatttgcgccatggagtccgtcaaaaagcaccgcatcggcgatggtcccttcgtcattccagatttccctgaccacatcaccatcaactcagccccacccaaggacatgcgagaattcttggaaccccttctcacggtggcgctcaagagcaacggtttcatcatcaacaacttcgccgagcttgacggtgaagagtacctccgccactacgagaaaaccacgggccacagggcctggcaccttggcccagcgtccctcgttcgcagaaccgctctggagaaagcagagaggggccagaagagcgtggtgagtgcgaacgagtgcctgagttggctcgactccaagcgagacaactcggtggtgtacataagttttgggaccctctgctattttccggataaacagctttacgagattgcatgcgggatggaagcatcgggttatgaattcatatgggtggttccggagaagaaagggaaggaagacgagagcgaggaagagaaggagaag

SEQ ID NO: 16346 - DNA, 311 bp, Glycine max
  Clone ID: PAT_MRT3847_114768C.1
ccggaggttgggaatcactattatggtctatgacacccttttattccacatcaaatacggatgacacgggctcttctaacacaggatggaggggtacagcacattcaattccacaagccatctcctacttaatactaccacctttgtcacttacatgctgatgactatgtatatattacttcaaaacataactcctgaaacacaaaatgatcatctaaagcaactaatacgctataatgttaaacaagaccggcccataaaaaacaaccaaaaaaatccctccctttcttttacaaaaggtgcagaccccc

SEQ ID NO: 16347 - DNA, 666 bp, Glycine max
  Clone ID: PAT_MRT3847_114769C.1
tcaagggtggcagatttagctgtttatctcctttttatttacggaaaattcaatccattcatcaattgttaaaaacagtcagtattatattgctataaattgcaacccttgctcgaatattttcttatacatacttctatttgtgtagatattagacacttttgattatctagagaatgatagattccctcttgttcattttgaaatggaagtgcactcagaatgatgggaaaaatctgttgaggttcaaaggaagtgaatagaagtcttcagttctagtatcctggttgaaggtcctgaatttttcccaccagtgtctcccactgtctcggcgagttgagccctctccacgactcatagttaaatccaagaagtaagcaactatgattgccactgttgctggggatgagaaaatcacttgcactatattgttgaacgcggtggtgccagtatgaacagggccatgtccggatagcaatacatattcgttgaaatattgtggaacagataaacccatgaagagagaaaagccaacgatgaacattgacctataactgtttagattgcagaattgaaggaaaccaaggccagctgatgctacgtaggcatggaaaacgctagaaatagctgctataattgtcaaaggtattgcagcaagaactgctc

SEQ ID NO: 16348 - DNA, 109 bp, Glycine max
  Clone ID: PAT_MRT3847_11476C.1
gtataagctcgcatgcccactctcgaaatccttggaatagagcatgcatacgactgagacagattatctagattatcactctacttgggtggaagtatgccccacctgg

SEQ ID NO: 16349 - DNA, 396 bp, Glycine max
  Clone ID: PAT_MRT3847_114770C.1
cggtccggaattccgggtcgaccacgcgtccgatgaagcagcgagtgagtgagcgagcaggtagggttttcggtgttcccctctttgtgttcgatctttacaatagggtatgaccgatagccctctgattcttttgtgttgcctattaaagcgcctataattaccatctgcaattcaaaagcctcgcataggggactacctagagattatcgacttgttagtacagtgcctagaacatgcctgcacttacaagaggatcatgtcacgagtgacatcttcatgctcttgacaaagactccgacgacgactcttgcgctatctgcgcggaccatccacatacggctcagctgctcctttgcacctctcgtgacaacggttgcagatcttacctgccat

SEQ ID NO: 16350 - DNA, 508 bp, Glycine max
  Clone ID: PAT_MRT3847_114771C.1
aaagtacccgcaaatttaaacctacccatattttgtatccatttacaacttcagtaggccttatgattggaatttttctgagttttactatttttgagccagtttgtagcgatgcattggtgtgttggttcaaattttcatagtgcttgtttgtatgtgacttaaaacagagttacctccttaaaaattttatccacacacaaacttagaggattgattaaaacagagttaccaaaaaactaactagaaatatgagctttccagttcaatgattgattggagcggaattagagcaaaatatttatattctgttgcataagtactctgtactcaaatggaattaatttcattctcaaaataaataccatacttttcttttcatttcataagaaatacaaagaatgaattttgttcattcacatgtgagggattaatttcctttcaatgttaaatcttggaaccatgttacatgccatataaacagggacgacataagggtaaagcaact

SEQ ID NO: 16351 - DNA, 393 bp, Glycine max
  Clone ID: PAT_MRT3847_114772C.1
gtgagaatttgccaaagaagaagaagaagaaacatggtggaaggttagagagtgagagagtgtgaagcatggaagtgggtatgcttccaatctcagcttcaaagagaggaaaactcttggctgctggttacaccactctcgatgccattgctcgtgcctcccccacccaccttgttcgagatattgatgtttctgagagtgaagccacggaaattctgaatcttgcaagcaaacctagtgctttggagagaccgaatgggtctcacactgctgttgttggtgatctggataacatccttggtggaggaattaagtgcaaagaagtcactgaaataagtggagttccaggcattggtaaaacacaaattgggattcaacttgcggtaaatgttc

SEQ ID NO: 16352 - DNA, 773 bp, Glycine max
  Clone ID: PAT_MRT3847_114773C.1
catcattgatgttaattttgattgagtattattgagttttttttgtgaacataaggagtgagaatttgccaaagaagaagaagaagaaacatggtggaaggttagagagtgagagagtgtgaagcatggaagtgggtatgcttccaatctcagcttcaaagagaggaaaactcttggctgctggttacaccactctcgatgccattgctcgtgcctcccccacccaccttgttcgaggttttcctttccagtttcaattctcaacccttctttcattttccaattgggtatgcatatatgttaaaaagttcctctttttttcacctacccattatctcactttgacagatattgatgtttctgattcggctcgaacggaaattctgaatcttgcaagcaaacctagtgctttggagagaccgaatgggtctcacactgctgttgctggtggtggtcagactgcctgggatatgctcaatgatgaaaagttttcttcttacattaccacatcttgtgcagatctggataacatccttggtggaggaattaagtgcaaagaagtcactgaaatatgattcaacttgcggtaaatgttcagattccacaagaatatggtggcctacgtgggaaggcaatatacatcgacacagaaggaagctttatggttgaacgtgttctacaaattgctgaagcatgcatagaagatatggcagaatacagccagcactttcataaagattttcaagcttgtgatgctaaaaagcaccctaata

SEQ ID NO: 16353 - DNA, 271 bp, Glycine max
  unsure (1)..(271): unsure at all n locations
  Clone ID: PAT_MRT3847_114774C.1
cacgtgaganagttcaaagagttaaacacggagaatctgaaaacactgtgcaatgctttggagaaaaaagtgccgtggcagaaagacataatacccgaaattgcgagcacccttttgcaatgccgttctgggcatggtgagaagaaaagggaaagtgntgagaaacagtgnaagaagtgaaagaagagacgtggttgttcctccaaggtgttgatgttgaagccaaggagaaaatagcaagagaactagctagacttgtttttgggtccca

SEQ ID NO: 16354 - DNA, 223 bp, Glycine max
  Clone ID: PAT_MRT3847_114775C.1
ctcagaatcctgcagaacctgattttactgctgatgaggaatatgatggtgtgattgagaaagatgattgagcataggaatgatatattggtagaattgtataatatatggggtccataaattgcgaggcaacttgtatatattaatatagatatcttgttattgataaaacaagaggataaaaaaggggcgacccgactagaggattccgaagtcccgggaa

SEQ ID NO: 16355 - DNA, 467 bp, Glycine max
  Clone ID: PAT_MRT3847_114776C.1
ggctcgagcaagcatgctggcgccttctggcgaggccctgattatcggggactcaactgggataacaagcttgctggtgctcaggttcttctgaatcacccgaggcagggcctgagtgctgggcatccatatcaacaaactctgaggaccttgcacaatcagacatgcgtaatcatgcgctgctatctaccaggcttcacatgctgcaacagtaccaaaggtggctggattgaattaatccatgggaagcctcagcctgtacatatgcggccaatgcagccttgttggctgccctatatagtgattatccggacgctggtgatacacccgtatgggatcgtggaccgtaactcttttcaaccgacatgctgcgctgctttgccatggcccagatggagtacatacttggaaataacccaaggacaatgagctatgtcctacgttttggcatcattacccagatcacg

SEQ ID NO: 16356 - DNA, 372 bp, Glycine max
  Clone ID: PAT_MRT3847_114777C.1
agttattagtgaacaattcacatgggaacctcagctggatgtggatgacaatttcttcagcagtttccaaatgtgcgacctagactcctctgcatatgaaactgggtttcccattattgatgagctaagttcatttgataacagtcaaagctgttataacctttctgatcttctatttcctgggatcaattttacaaacgatggcactgaggaaaatatggagtatcccactctcgaggagacaataggagcagcagattttacttttggaggatcctctgaagggtttcaacagatgtttgattcttcatgggttaatcatctcatgtgccatcaggccattgcatttactgaagaactactgtcagcctc

SEQ ID NO: 16357 - DNA, 480 bp, Glycine max
  Clone ID: PAT_MRT3847_114778C.1
cccacgcgtccgtacggctgcgagaagacgacagaaggggactttcttaatccttaaaccttaaatgttaaaacccattactagtatactgcagcaccgttcgttcattgaaaccacaaactccaaacagagatggctttgagacatcgccgccttacgaagcaactctccaagtttctaactcccgttctcaacgcaggtaactgctgtcagcaatctagcaaagctttaaacttagtggctttgtctataatgcatatgccttctgctcagagtccaattgctaattggactcaagtgagaggatttcgtgaatacaggatctcaacaaagtctgatgaattatgtgaacctgcaactgaaattgatcttttgtctttcattaaggcttcactggatgagtttgaaggcacccatcattattgggtaaatagatctgacaacaacgaccaactttttggagctgatggaatattttta

SEQ ID NO: 16358 - DNA, 1297 bp, Glycine max
  unsure (1)..(1297): unsure at all n locations
  Clone ID: PAT_MRT3847_114779C.1
gggaaaaactaaggttgcaatcttgttgctttgggtcttgtgtatcaaattgcagttgaatgttgaagcaagaacatcatcagctttagaaacagaaatcgaagccaaattgaagcaactcaacaagcctgccgtgaaaaccattaagagtgaagatggagatattattgattgcgtcaacatctacgatcaacctgcttttgatcatccagccttaaaaaaccacactattaagatgatgcccgattttttgctagaatcccaaaatccaagcacagaagatgcttctgagtcagtgatatttcagacatggcaaaaaagtggaagctgtccaaaaggaaccattcctattcgcagaattctaaaggaagacttactcagagcttcttctcttggccgatttgggcagaaacccccagcttctctcaatttttccaatgccgacagtgaatttattcctgtaaatcgctcgtcatcatatcttgtgacattgggatacaattatatcggtgcagaagcagacatcaacgtttggaatccaaaggttaccatgccaaacgatttcaccacagctcanatctggcttaagaacacaacggtgaagtttttgaaagtgtagaatcaggttggatggtgaatccaaagttatatcatgacggagccacccggacgcgtccgctcctggactagggattcatacaggtcaataggttgctttgatcttacttgtccaggatttgtgcaaacaggccaagtagcccttggtgctagcataggacctatatcatccattatgggcccacagtatgagcttaacgttggactgttcctggaaccagactcaggaaattggtatcttaaaattaagaacaacgtcccagtgggttattggccggctgaaatattgggttctttaacgcacagtgccatattggttgaatggggtggacaagtatcaagcccaaatataaagaatcatgaaagccctcacacgggaacagaaatgggaagtggacatgccgcaagtggtcgatttcagaacgcgtgcttcatgcgcaatgtgaggattaaggattattcgctacagcttaagtatcctgagcatgcatatgctatggctgaagagccctactgttacagctccctcaacgacgtccattatgggaaggaacctgttttttattttggaggacccggacgaaacccccccttttgtccttaattcattttccatttttataaataaataaatattctgtaattttgaacgcattattattaattttaggacttttag

SEQ ID NO: 16359 - DNA, 594 bp, Glycine max
  Clone ID: PAT_MRT3847_11477C.1
tgtgaaaaatgagagtaaaatgcaacaaaaaagaaggaatgacaaagtgattgtttgagtaaatatggtgatggaaaaggtagaaggagacaagaagaaaaggacagtgtaaagatgtatgtagaacgtggcaacgacaaatccttttacctcctttttagcccctttcagccacatctctgcacgacttttcggaggaaatacgacaactggtttatacaactgactgacagatattcgttgataataccttaaactatcaaagagaatatgtagcttgggtttcccgatgtcttgttgcctgctcttagaaagcttaaggtaatatgtacatcttaagcaaagtagctcattgggaagattcttaaattgttgatcaaccacatctgagcattcaagactgctgagttgcccaatggatgagttcaatattatttccactccagcatcttgtgctatgttttgcagcatgctcatctcagttgatgttagttcatcgagtagtgaaggatctgagcagtcatcaataagaaggtagtgaagacattttatgtgaatctcacttgcaaccctcatgagttgtttgcaccctgc

SEQ ID NO: 16360 - DNA, 474 bp, Glycine max
  Clone ID: PAT_MRT3847_114780C.1
ccaaactcaccctttgttgatacgtaccacgtttccaagttccaaccatgttgcttaacacaactcctttcacaattttccatgccacaacccattgatgatcagtttgtgacactttattttccctacaatggcttctttgtattcagcaccacccctcttgcgtttttcctccaggaggtcttcatctttggcacccgatttgagtttggtcaatttgaggaaatcccatttaagatttgagtccaaaatctcaccaataaaattgcaatggaaaagtatagaagggaagtggcagagaaagagaaagatacaatggggtgtgaggtgcactgcagatggcatagatggtggaatgtttttgggtggcagaaaagaaggtgcaggtgttagcatcccagagaggttgaaggtggtgtctttgattgcatgtgttatgtgtctgtgtaatgctgatcgtgtggttatgtctgt

SEQ ID NO: 16361 - DNA, 391 bp, Glycine max
  Clone ID: PAT_MRT3847_114781C.1
cagagggtttgggttgccacccccagcaaaattcagaagtgggcatcttcctgctaatgcaatccctgtgtcaacagtcatgccgggtgagactggcgacagcggttcaaattctgataatgacgacagcatcgaatcggaggaggaggtttatggtggcaggtattcattggattcgtcaccgcaagaccgaagagtcccccccaatggtgctgctaggagatatgggaacctcactcgaccccggtatgcaagtgattatacatattccgaggtcagttcttccagggaaacactggttggcaaacctggtactgtgagggatccattgatgaggggggcggcaaatgtaggacaaagtggcttcaacagagatgattcatcggattct

SEQ ID NO: 16362 - DNA, 445 bp, Glycine max
  Clone ID: PAT_MRT3847_114782C.1
ggggaaacaaaacactttttggtgccatttcactggaagcaaaaaaaacaattcccctaacaagaaggggtaaaaaacaaaaaagcccaaaatcaattgctcccaaacaaacgaccttttaaaaaaataacccggtggtaagcccataaaaaccctaaaatttaacccccgaacccataaaaagtcctgccctgccttttgagagcctaaacaacttccatggggggaacagtcttcctcctagcaggctcgggggaggaaacagcggcccgaataacgttttcgaggaagatcttaaggaccccgggggttttttcataaatgaggccactgatttttttgaccccccctttggaaaccaaacggaaaagggcgggttttgggatcccctggatggtaagggggagcaccttcctgggccttttggctcctcctttacccaaac

SEQ ID NO: 16363 - DNA, 520 bp, Glycine max
  Clone ID: PAT_MRT3847_114783C.1
gcgccctttttttttttttttttttttttttttttttttttttttttttttttttttttttaaaaccggcaactacaaatatcggattcacacttcaaaaaaaggggcaaaattttccatatggggcaaggattttggacaggaccctaactcatttggctatcaaggccaggactcaaaatattttatctaaagattcaaggtaaggggggaaaaatgatcctcaaaaagcaggagtccttggggaggaaactatataggaaggccggaagttcacaaacatcctcacatcatgattagggaatttctaacccttcattgggggggagtccatttatcaattcaaaacaatccggcttttatttatgcgctacatttatggaattagggggacggggcctccaggaggagggggggggccacattgacatcattttgggcccgcgctagggcttgtcggggaaaatttctgggaaagcctcttgaaacaggggggggggtcggggggctgcgggggggt

SEQ ID NO: 16364 - DNA, 217 bp, Glycine max
  unsure (1)..(217): unsure at all n locations
  Clone ID: PAT_MRT3847_114784C.1
ttcatcattcatgggctccccaaaccatttccnttcactaccacaccacccgcttcttacntgaacccggtgtctnnattcgnantncccacggaacacgcattccancccangccggcattctggnntccatgtnccntgtnttngacanntttntagatcgcccangtaagcatgtgaactccgagagngttatccnaancnacggntncncctg

SEQ ID NO: 16365 - DNA, 1606 bp, Glycine max
  Clone ID: PAT_MRT3847_114785C.1
caatttgagagtgatgtatttttaatttgctcaaatgcaatgcaatacaatgcaccggagactatataccacaaacaggcgcgatcaatacaagaacttggacggaagaaatttgagaagttaaggattggctttgagcactctcagattgaactgaaatcagaacaaaaagcaggatccaattatttggttaagaagcagccaaagaagccattggcacgtgcctcacaagaacctgttggctctgatttctcctcaggggcaactcttgctactattgcagatgtacagccaacttcccatctgatgcaaggtggtagatgtgagaggtctggcaatcttgatggtattttggaggcaaatgctttctggattgatgcaaatcaagagaaagctgaagatgttttgttagggaaaggtcttctctctaagtggggaaggaagtcctttgcgcttgatgaaagtcgtcgtgcatcttacaatatgtccaatcaaccaattgttaaaccagattcaatatttatgacctttgagagaggaatgaagcatctggttactgttggacttcatgcagaatattcctatgctaggagtttggcccgttttagtgcatctctaggacctattgcttggaaaattgcttcccacaggattcaacacgcactgccagctggatgtaaatttggtcgtggttgggttggagagtatgaaccgctttctaccccaatattaatggttaataatcgtgtccaaaaagaaaatagtttggttatgaagttgcattccactactgaattaccaaagggtaaccaaaattgtaagaatgtggaatccagcatcatgcatcctgtaaatggacagatgcttgagggaaaacgtccttcaatgcctgatttcaaaggaaaacctttatttcaatcacacaaacagccttaagttgattgctagagctcatcagcttgttatggatggatttaactgggctcatgaacaaaaggtggttaccatttttagtgcacctaactactgttaccgatgtgggaacatggcttccatattggaggttgatgattgcaagggccacacatttatccagtttgaacctgctcctaggagaggagaacctgatgtcactcgtagaacgcctgattacttcttataatgtagctgttgaatgtcatactgttatatcatggttacctctactgcactaattttaggtagtagcgcatcctcatcacgagattgccgtaaacatttaaatccatggatatacgtgttccgtgcttttggggttgtccaaagactgctttgatgcataataggcaggtaacattccactgatctgttacactttgaggaattgctggacaccttgtctggagaagtcgccaagatgatgtcagaatacatattgttccagcaaaatgtggatattttttgtttgtttttcatcttttttgtctcttatgttcagtaaaacccttttatggctttacaagctatatgactggattttttttttttgtctcgtggatgtttttgtcatgttctatcattttcagttaaagttgcatgataatagtgattcatttttgttcttacg

SEQ ID NO: 16366 - DNA, 1397 bp, Glycine max
  Clone ID: PAT_MRT3847_114786C.1
gcaaagtgtaccgaaggattcaatctgttgagggcttgaatgatgcaaccctttctctttggacattcaaaataatggtttaatctatttttattctagtttttggtaaatcacactggcgcctaagggcaggaatttttaacctgtttctttacctttctgcttaaacagggagacgggttgccactagtcactagtcactagtcagtagtcattaaatgtctaggatgcattaatggtcctcctgctttagtctaccttagcttattatatcttgctggtgatagaggggttttatgaagtctagaaactcattttaagtatagtacataaaattgtatgctgataaattgcatcgcttttgttattagtggccccagcgagtgggcaaaacaaattagaattccttgctttttcttgcttctctcttcttgttgtcgctgtcaacgagtgcgtcgtgtcgctctctgtaaaccactttcttcaaaaaagaggagaaaaagcagcatcagcagccccatagtcgacgccccacagaatacagtcatcaaaaattaatcaaggactaatggaaatgatatgccagcaaacctcatgttaccctatagttcccttctagatccgctcagggtacgctacgggttgcggcttgttgccttgcctttttgggatcacccccttcctggcatgtcccagtgcgcgtctgattggtctcaggtggaggacagagaaggaagtcatatctggcaagggacagttcatatgtggtaacaagcattgcaatgagaaagatgggttagcaagctatgaggtgaacttttattactttgaagctggagaaaacaaacaagccctagttaaattggtaacatgttggagatgttctttctaactcaactacaagaggcagaaagaaaaggagcagttagaaaaaagacaacaagaacaggataggcgaaagaggaatcgttcaaagagtgatgatgatctagatgacttccatgaaagcaaagagagaaggcggaaagggaaaagggctttgacttcagccagtgatcataaaattgatgatgatgatgataacttggatgagtttcttgaggggatgtttccatgaccttggctgtttgattgtcatacctgaaaagtgcttctcagcaccaaagctgggcaaatagaaaaggttaggcagtggtggagacaagtttatgatctgcagtagatgcctaaaatataggaacataatgaccatgaatgctttttgacaaaattattccctgttgtaccttccaaaattgtttccatttatgcagactataaattgtttaacatgctagttgagttttgtattctgtacagctcgtatagtcttttcatctgtcaataatgaaaagtgc

SEQ ID NO: 16367 - DNA, 447 bp, Glycine max
  Clone ID: PAT_MRT3847_114787C.1
ctttttgctctgtttcgaacacttttggaacaaattgatttggttcatggaatttgtcagctgagttaaggatgcggaaaagctgaagggcaaagtgcgcgggacgggccgaatgcccgtgcttttggccatcggcgtggccttcgcttggatgtttctttgtgcggccattttcctcaaattcgagaaggattgggactactttaagagcttttattttttcttttgctcattgaccaccatcggatacggcgatgtgacccccacaaattccgaagatgagcatggtcgacctgtggaaagtttggcagcggagaaggcaacgaaggaatcaatcgaccgatttgggggagacggcgccctgggacgactcgccacaacgaaagcaattcaaacagaacaatctactgatgtctgctgggaaggcccagtgcgcggcacgacaat

SEQ ID NO: 16368 - DNA, 1007 bp, Glycine max
  Clone ID: PAT_MRT3847_114788C.1
tgctttagtctaccttagcttattatatcttgctggctcaactatattcttaggctcctgttaaatagcattttaaccttgtttttgatatatcaacagttaatttgtattatcatcttgtaaaccatttaaaattttttgagatagaagagggggtgttaccataatctcattttcaagggatgttggtgatagaagggttttatgaagtctagaaactcatttttagtacatctttaaaatggtatgctgataaattgcattttcttgttagattggtctcaggtggaggacagagaaggaagtcatatctggcaagggccagttaatatgtggtaacaagcattgcaatgagaaagatgggttagcaagctatgaggtgaacttttgttactttgaagctggagaaaacaaacaagccctagttaaattggtaacatgtgagaggtgtgcattcaaactcaactacaagaggcaaaaagaaaaggagctgttagaaaaaagacaagaagaacaggatagacgaaagaggaatcgttcaaagagtgatgatgatctagatgacttccaagaaagcaaagagagaaggcggaaagggaaaaaggctttgacttcagccagtgatcataaaattgatgacgatgatgataacttagatgagtttcttgacgggatgtttctgtgatcttggctgatttgattgccatacctgaaaagtgcttccaggcgccaaagctgggcaaatagaaacggttaggcagtggtggagacaagtgggtgatctgtaggtagatgtctaaaatataggaaacatggtgaccaaatggttcttgacaaaattattcaccctgttgtatccttcaaaattatgtccatttatgcagactataacagttcagcatgctagttgagtttgtattatgtacagtttgtatagtcttttcatctgccaataatgaaaattgcgtagctgaatgagctgctgcttgattatcaccccccaaaaa

SEQ ID NO: 16369 - DNA, 437 bp, Glycine max
  Clone ID: PAT_MRT3847_114789C.1
ccacgcgtccgcttgactcgtttattttaaatctaattaggtttttcttgaggtttaagttataatatcagcaactatggatgataagcaagaaaatttgttaacgttgtccttgcctagccaattggtatcaattgatgaggaactatggcggatggctgaagacagggtgcaagagatactatggacaattgaaccaaatgttttatctgaagtgaacagaaaggatgttattgactatgttcagaggctgattaaaggttactatggagcaaaggtcttgccattcggttctgttccactaaaaacctatcttcctgatggagatgttgatttgacaactctcattcatgaagatgcagaggaggatttggcacaagcaatatgcaatatacttaaaagtggagatgactctgaataccaagtaaaagacatac

SEQ ID NO: 16370 - DNA, 480 bp, Glycine max
  Clone ID: PAT_MRT3847_11478C.1
ccggggtgttttcatttctgttctaaaatcaaaaaccctaaccaagaaagttttcaccgcatctccacctattctcaatctccacaaatcgaagaaaagagaatgagtagacgctcgagcagaactgtctacgttgggaatctacctggtgatatccgtgaaagagaagttgaagatttgtttctgaaggtgctttgatgttcttttctttgtctgcattttgatttgaaatgtgagacttgctgtaagctaagggatgtggcttacacgtcacaagatgggtttcgtttgggattaatgttacatgtatttgggattgaaagtcattagcttgctatgatctatacctacatttccattcttctgttatttgaggattttgtttggtttgtatttgttaaggtggggagtgaactccatttttagtccctaagattgtaagctatgatatgactttgcaagtcattactttggacctgg

SEQ ID NO: 16371 - DNA, 274 bp, Glycine max
  unsure (1)..(274): unsure at all n locations
  Clone ID: PAT_MRT3847_114790C.1
cattcatcagcaatgcctgtataaaacactacgagctggtcatacaagtatatgtagcactgtggaattccttccttggagatcctgggaaggtatttacatatagtcttgcttatttttcacatatgaatccctctttctctcctcctcctcaaatgtgctcatgcacagacacatattgggtgatatgtttacttttctaagacatataaatgttactaaaaaagctaaatcaagaaagaaactggcatagatggttnnctgcaacattttc

SEQ ID NO: 16372 - DNA, 378 bp, Glycine max
  Clone ID: PAT_MRT3847_114791C.1
agctactagcggggccgacccttattctatttgttttaaagtttataccaatatcattgaacgcggcaaatggagtaattcaatcactcactgagtccccgatacactaaatacagatcattggcttatactggaatatatgttaaaaaatgcagattcaatggttaataggaagagcccgagactaatggtccattataatactttcactcacacaatacataccaaatacaggaacagttggtctaccaagccaggtcatttccacttgcttcacaaactatgggtattaatgatatataacagggtcatgtaataaaaagactacattcaatggcctcacactaaccttcactaaggctcgtggaatgtccatta

SEQ ID NO: 16373 - DNA, 430 bp, Glycine max
  Clone ID: PAT_MRT3847_114792C.1
gagagagagagagagagagagagagagagagagagagagagagagagagagagagagagagagagagagagagagagagagagagagagagagagacagagacctttgcttaccctctaagatggcttcctttgtatccttcctagtgctgcttcttgcagcccttatcctcatgcctcgagggcttgctactttctacaaaccaattaagaagccaccagtgtacaaccctccagtgttctagccacccgtgtacgaaccaccggtttataagccaaaaccaccggtttaccagccgataccaccggtttacgatccaccatataagaagccaccctacaagaaaccaccttatggaaagtaccctcccgtagatgacaacacccatgcctccagcaagcaatgatgtctattatctactttataaata

SEQ ID NO: 16374 - DNA, 269 bp, Glycine max
  Clone ID: PAT_MRT3847_114793C.1
agtgcaatcatgacgaccataccacagccggacccttggaccgttgagtaataatgtgcagcccacgcagacctataaataatatcctgccaactcttcatataacccgggaaatcatgactggaccctgtacgcagcctagatttccccatagtgaatgcggaatcagctagcagtacccctggtcatggatgcctacggcttaaaattgaaatccgatgactattcaagacaagattcgagtcactttacctcctttgtgtagcact

SEQ ID NO: 16375 - DNA, 443 bp, Glycine max
  Clone ID: PAT_MRT3847_114794C.1
gggaaaaaactggccactttcataaaactttcaacaaaaatggaaacaaggttttcacttccttaacaggactatgaccggttttatatcacaaaaatggccatcaaaaattaccgtggccttcacaaatttaattacttccacaattcttccttgggaatcccacgctcctaagaaacctaacaaagctgcttatttttcggcacaccaccaacggtggctctggcattgttgagggcattattcccccctagttgttaccccaaagcattctcaactccacccttttaaaaaacatttttgactgacccaccagcaataactccaggacccggagatgcagggctaagcatcaccttggccggtccataatctccgtcagctttatggggaaagggggggtccttagccataggaccctggaggaggttcctccgggcatt

SEQ ID NO: 16376 - DNA, 272 bp, Glycine max
  Clone ID: PAT_MRT3847_114795C.1
acactctccgttcactctgttcaatacaacaaaatggcccataatatagtaacactgaggcccaaagcggagcaaccgtcgaggcaccgaccagttatgctagcacccaattcaattggtgcatggccgttcctgtcaaaatcagcatgacaatgctaatcctactactcttaaaacctgtcataaattagatgacgtaacaaaatgtccctctacaaacttcaaaaatattacccttttctccgtttcaagatccacctatttccctataa

SEQ ID NO: 16377 - DNA, 395 bp, Glycine max
  Clone ID: PAT_MRT3847_114796C.1
gtcgaaccgtaacggcgtctaattgggaagcgccaacttcaatcgccggctggggccactcccccgccccgtttgctcctcttctgtatcctacctttgccgacccaacgctctctttcagaaaccatatactccttgacccttactaattgtcggtctgtgtcaagagttagaatccaatattctttaattcgagagctgaacgcagagtggctctccgttttgatctacatccgaacttaatttttgttgaatttgtagctctcattattcttgatgactaccatcaatagtcggtgagaagactgagtgaggttttgatttttcttttaaaaagattattgttttgatcggggaaagtgaagcttatgggagtgatagcgctcccaagaatg

SEQ ID NO: 16378 - DNA, 567 bp, Glycine max
  Clone ID: PAT_MRT3847_114797C.1
gggaaaacaagggcctaaaaataaaaaccaggcaattggggatttcggggggggggtttcccatcaaaaaatcaaaaatacagggggggggggacaggatttcatgggacaaaaatttaaggaggaggcggggggctggataaaacaaacggcccaacaaaggggccggggaaaaacaaagggaaggggtcaaaaatctaaaacttctttaaaaaccaacaggattttcctaaatcaaacaggcggaaatcaagaccaacggggggcataaaaaaatttaaatgggggcttcctataaaacggaagaaagctggcaaaagcccggccccaaattccaaaaaacaaaccctcataatggggggtaaaaaaaaccccaaaaattcccccaaaaaaaaaaatctttggacgttttcgggaggcgggtttcgggctaaaaacaggcacaaaatgggggggctcagaaacccccatatttggcccatccaaaaaaaaccgaaaaaaccggggggcccctaggttatttttgaaaagggcagtaggaaaagaaaagggtcaaacatcccaaac

SEQ ID NO: 16379 - DNA, 166 bp, Glycine max
  Clone ID: PAT_MRT3847_114798C.1
tttttaaattaacacacacttttcacattttttcaaacatcacaaactgtgcacataatttccaatatgcaaagcgggctgaacattttgcatatgcctaaacatactcaacaaagggggcaggcccacctttgtttataggctcaaacaccagatcatgcgaaag

SEQ ID NO: 16380 - DNA, 293 bp, Glycine max
  Clone ID: PAT_MRT3847_114799C.1
agcccacgcgtccatccacgctttcgcacacgcgttcgaaattatcttactcaaaaaaaaaaaaataaaaaaaaaaaaaaaataacgaacaaaaaatccaatagaattagcatataaaaaaaaaaaaaaaaaaaaaaaccaatataaacaagtcaatgatatataaaagacttgttaataaccctaccttatccaacctaatatgcgttccaaataatccatcttacccaaattgctgtaaaattgaaaaggcccgaaccaaaggcccttcctaacagttgcacatcctgaat

SEQ ID NO: 16381 - DNA, 368 bp, Glycine max
  Clone ID: PAT_MRT3847_11479C.1
tttttacgttttgcgatatatataccaacaggtattgtgtgtgtatgtatatcgttcttgtcaccaagttttaatccctaataaataagaatcgctgcttctaatacttataataaacacgacaaattctgatacttactacagaaaggacatacgttagataaaataccttaattaatctatttcacaaaaaaataatgtctccatagcacaatttcgacttataatacctcgggtgctaatgaaactctttttgtgaaatactactgtgtcaatccccgatcgattgcacacaagattcaagtgcctcttggatttaccttttgatcaatgaccactgcagcattatcatcacactgaattattat

SEQ ID NO: 16382 - DNA, 495 bp, Glycine max
  Clone ID: PAT_MRT3847_1147C.1
ggctccctacaactcctggccctttgctccacacacaaccctctctctccaatgctctcattgctgctctcaagagagcacaggctcaccagagaagggggtgcattgagcaacaacagcaacaacagcaaccacctcttctcaccatcaaggttgagcttgaacagctcatcatttctatccttgatgaccctagtgttagtagggttatgagagaagctggtttttcaagcactgttgttaagagtaatattgaagacacttcttcttcagcaccttctgttttctacaacagttctggtggtggtgttttctcttctcctggctcaccttctcccagtgagaagaataatgttttcaggcagaaccatttcttagctgcttacacttctaatgagtttagtagtacttctcctaattcttcacttttgttgaagaaggcttcagtgtttcccatcattgagtcaccaccaccctcttcatctaaggaggata

SEQ ID NO: 16383 - DNA, 265 bp, Glycine max
  unsure (1)..(265): unsure at all n locations
  Clone ID: PAT_MRT3847_114800C.1
gcaaattctgatggttacctcttaactcttaatttctagtcaaagtatattaatgggggtctatgcattctagtgtctgtctcgttattagtagggattttgattggttggttctcttcaccttaatatgtaagatacacccaggtatctcaaangtagggnaattcaattttcataaatcttacttcatggtatgataaattaaaaataattgtctgaaaacttagatttctttacatcatatgttcttatgcaatatggtgtt

SEQ ID NO: 16384 - DNA, 466 bp, Glycine max
  unsure (1)..(466): unsure at all n locations
  Clone ID: PAT_MRT3847_114801C.1
gtttgtgagtccccaaaattatgttggcagcattgtagctatagatgttgataaatcaagaagattcatgccacctccgagaagtcctctggtttctggcacaagtacaaagattcaagctcgtaaaatttgtggtattcaacagaaaactttgttggaaattaatcaatcctgaagtatctccatggaatgctcaagccctttggaaatgttcaagttcagagatctgtttcaacctcttctaacttcaatttttttttcctttttttctgcttaattaatggtataccataccagaacaatttgacaaaaatatagtaattattgttactacctaatttttcctttattatttggttaagaaaaaaagtttgttggttataatttttcctttattatatttctgtataagaaagcaataaatttgtctattcccatcctaaatttnannnttagannnnggggg

SEQ ID NO: 16385 - DNA, 410 bp, Glycine max
  Clone ID: PAT_MRT3847_114802C.1
cgaccccacgcccgtccgtacccggctgctgagaaagacccgacagaagtggggatgtaacttatgaatagatgtactcatctcacattaaattcgagagtgtcaatgttgtgactcccaagcgaacgcgctacatagacccataatcgatagtccaataaacgacacctgcaatggagattggacgtcaccgctacctactttcgagtcgctttcattataccttttaacaaaagcttcaattaccaattgacaagtgggtatatctgaaacctttgccaaaattgtagaagaatactagtcgtgccaatgatattggcgtggagaggtaccttaagatgataaaatgggtgccagaggagggactatatgctgaaagcctatgccatattggcactgcgcatttgata

SEQ ID NO: 16386 - DNA, 449 bp, Glycine max
  Clone ID: PAT_MRT3847_114803C.1
tgtttctcagtggtacgatatctagcgatcacttctggcagccgcctatccctgactccggcggccaacttcctgccacagagccggaggcctacgagtgggccttacaacgcttcctacaagaagcttccgtcttcgcaccctctgctacgactgcttcctacgacgccgacggcgtattcgtcgagatcgaagatcaacctaaacccgcccctccccctacggaagaggcgcacgactccccaacggccctggtcccggccccctcgactcctgacgaagaccaggcctgacccaagaggaagcccaacctcacatgcgccgccgtctgcatgactaggggatctttggataaatctcaagacccgtgccctttttctgaacgtggatcacaaacggctaatccttctctagttgaatctaagactacttgtagaggatctattcct

SEQ ID NO: 16387 - DNA, 595 bp, Glycine max
  Clone ID: PAT_MRT3847_114804C.1
gtcaaagatagagagtcgtcctttgaagcagcgctcattgagggttgtggatcatttaaatgaagggagtgccacgtactttgactacctcttctatattgatattgaagcttctatggcagaacctcgtgcacaatatgctttaggacagttgcaggaatttgctagatttcttcgtgttcttggttgttatcctatggatacagtattatagaagttcagtgtcttaactaggagcaacagtcatgctgttcattttgctgataacataagtggctactaccccagaggttcatcttcaatcagagaggtgggcaagaagtatcctttaaaagcattgcccctgtcacctctttcaaaaatcttttcatctcctaaggaggtgctttgaagtatatcatcatagttttgacagtggagtgaatgctgctacaggaatcttcattgtgttttattccttcatttagattttagaactcttcatattaaagagaattccaatgcaaacttagtgaccaaagtatgtacatatggctctattgagctatggcaaataaatgaaggaccaagccacccaaaattttcttctaccaaa

SEQ ID NO: 16388 - DNA, 305 bp, Glycine max
  Clone ID: PAT_MRT3847_114805C.1
acaagccttagccttctctacaactataaacataaagacatatacatccatggctgcctccgtctccactgtcggagctgtcagcagagttctttagaacctgaatggttctggagctggagcttcagctcccacttcagccttctttgcggaccagcttgaagagggctattgcctcagggtccccaacagcaaggtttccggtggtagcttcaagattgttgctgtagaagctcagtgacagatatgaagagactcagcatctcgataatgacagacggaacagtcatgcctatgatatctca

SEQ ID NO: 16389 - DNA, 301 bp, Glycine max
  Clone ID: PAT_MRT3847_114806C.1
tggacgagagaaagcacgcccttgaaacagagaaaccattgacatcatctggcgcaaccccccacaaaaaacagaagcacatgagatcaagaagaaggaagcaaacaacaaaaaaagaaggagcacaatagctgaagggaaagaaaacaactcaaagcgcaggacacaaacaaggcgaaacaatgatggaacacagactaagcaaaaaggacgaacacgcacccagagaaaaaaagagaaagtgccaaacagaaaacagctctggaacaaacacagaacatagcacaagaacaagaaaaag

SEQ ID NO: 16390 - DNA, 853 bp, Glycine max
  Clone ID: PAT_MRT3847_114807C.1
caacaccctcgaaaatttcaaggaaaatttaacacagcgtttttttctacgcgtccggttccgtgtctgtcagatatttctcaagtgcgaaaatgatgcacatgacattttactggggcaagaaggtgacgatcttgatcgattcatggaagacagattcctggacgagttactttctgagtctactcgcctgcctcgtcgctgccgcgttataccagtacctcgagaatcgtcggattcgcctgaagctcctcgccggcggccggaggccctcgccggcgccggagatccgcgctcctcttctccggtggggcgtcgccggcgacaaggagaagttgggggtcaagtttgcggaagcggttctgttcggggttaactcggcgatcgggtacttgttgatgttggcggtcatgtccttcaatggaggggtatttttggcaattgcggtgggtctcaccattggttatttcttcttcaggaatgaaggagagaatgacgcgcttgttgttgataataattcttgtgcatgtgcttagtgcttgttaatatcatcttacgtaatgttgcaaaaattttattttggtaacaatttagtgtctgaaaattgtatttgtcccgaaaggaaaggatgaaattgtcgtattttttacagattgggactaaaataagaattttcatctttcagactacattttcaccggttggaccgaaatggtcatttactgtgtaatgtaatgtcatgcatttcatgtaatagtgtatttgtgaattgggttggtctctaattctttgagatctgttgtgctgtgtaattttgtgttgatgaatgaatgtgtagttgtgaggtgtgatc

SEQ ID NO: 16391 - DNA, 1302 bp, Glycine max
  Clone ID: PAT_MRT3847_114808C.1
aattcggctcgagattgactccagtttctctgaggattgctgcacttgagacattggaatctcttattactgtggctggtgctttaaaatctgaaccatggagatcaaaagttgatagcctcttgttagtcacagcaatggactcttttaaggaaggatcagttagtgaagaaagaagtgtgtttcaacaaaaggaacctgctgcaactaccacagagttgcagcttgctgcattgcgtgctttattggtatctttactttcatttgctcgggtacgacctccatatttagcccagggtcttgaacttttccgtagagggaggcaacaaactggaactaaactagctgagttctgtgcccatgctctgttaaccttggaggtgcttatacatcctagggcacttccaatggtagattatgcctatgcaaataacagttcctttggtgaagctcatagtaatctccaacatggatattttggttggagccacaatacgccatatggcttaccgcaagttcctcctgactatgatgatgatctgtgtgcaagatggcttgaaaatgacaatgaagttggtgaatcattggataaaaatacaaaatacacccaggagccttctgaagcttgcagagctagtgatcctgaagtgcttttcgtgcatgtatcttccgacaccaatatacaggagaggattgagatggtgtctgagactgccacttgtgcagatgttgagatgaaaactgttgaggatgaaaccaatttcaagtcagatcaaccaggagaatctgtggtgcaatttcaagaaactgtttcttgcaccacaaacatccccgtggttgaaactcgcggtgatgtagctgatgataaagtgtctgagaagattgtttcagacaactccattcctcataatgaagccagtcatatggaatcaagacatggaagctcggttaataaagacttcaaattctcttctccgagtagtagtttatggcatagaacctcaggctctaatatttttgaggaatttgcttttcaattggaacatgataaggcactggcggatgaagatgattttcctgatattgtggatggagacccagattctgattctgaataaaggggagattttgtaatttatttttatccatagaagcataaggaacactttgtagttcaatttcattctctttttttctatctgttttcccaaggttaaacctttgaagttttgactttgtttttacaaaaatgaaaatgatagtcgagcagttttggaaatgatattcaagcttcatatagtc

SEQ ID NO: 16392 - DNA, 1149 bp, Glycine max
  Clone ID: PAT_MRT3847_114809C.1
cggccgctcgaggcggccgggcggttggctcgagcggctcatcttccctcgtatacttcccctcctcaactttgttttgtttttcatgtacgctttttgaatcatcttacgtgctcctaatcatgattccaacacttgtttgtattggcacaacaatattccaaagcaccctctcttcttactcattgtctttcatctctctttttctctccacgtcactcgcccttcttgctatttccctcaactattggcttgtccccggaggttttgcatggaggaaatatcacagtcgttacaaaggccatgcaaaactctctggcccaatgggctggcccatattgggaactttacctgcgatgggccctctagcccacaggaaacttgctgccatggccacttcaccaaaagcaaaaaagctcatgacattgagtctaggaacaaatccagttgttatcagcagtcacccagaaaccgcaagagaaattctttgtgggtcgaacttcgctgaccgacccgttaaagaatcggcccgaatgctcatgtttgagcgtgccattggatttgctccatatgggacttattggcgccacctacgtaaagtggcaatcacccacatgttctctccgaggaggatttctgacttggagagtctccgacaacatgtggttggcgaaatggtgatgaggatatggaaggagatgggggacaaaggggtggtagaggttcgaggcatattgtatgaagggtctttgagccacatgttggagagtgtgtttggtattaataattctctaggatcacaaacaaaggaggcgttgggtgatatggttgaggaagggtatgacttgattgccaagtttaattgggcagactattttcctttcgggtttttggactttcacggggtcaagagaaggtgtcacaaattggcaactaaggtcaatagtgtggtgggtaaaattgtggaagaaagaaaaaattcagggaagtacgttggacaaaatgattttcttagtgccttgttattgttgcctaaagaggaaagcataggtgattcagatgtagtggctatcttatgggtaagtaccccatttttatttttttttgtcaaatgcatgtattattaagatttgtgagtattaatatttt

SEQ ID NO: 16393 - DNA, 298 bp, Glycine max
  Clone ID: PAT_MRT3847_11480C.1
atcctgtatagcgggcgcgatctattcgttcgttcacgcgaacgatacacttttatccatacatacaaggacgaggtacatgatgatacattacgcatcattttctcagaaagcctttctactatctaactataaaagcttcgcccagatgaaagcacgctgaaggcaaattttcaattacaaattagcacagtgagcggcattgtcgccgaaattattctgtgtgacaactttggatcaaccctggatggcaacaccaaggtgagcagcatacagaggcatcatgttcttaattggt

SEQ ID NO: 16394 - DNA, 151 bp, Glycine max
  Clone ID: PAT_MRT3847_114810C.1
agggaatccaaaccaaaacgagagaaaagtagcaatacaattcttatctttgttgtgataggtccatggctctcttcttttctcatcatcctcttgcttcatgtggaacaaattgacttttacgctctggcagtgcactaacgcatgaact

SEQ ID NO: 16395 - DNA, 541 bp, Glycine max
  Clone ID: PAT_MRT3847_114811C.1
ctctgattgtttttcccatgattttaaaaagtgctgtaggcagtgggatgattcttcacctttggcatgttaatcccaatctggtattgagagggtttattgattctcaaaacaatgatgcaggcagtattgtaagaattgttgaaatctgccaggagctaaagattctatcatctgtggtggaaattattccctattattatagtataaggttagcagctgttgcatcaagaaaagaatttcttgaccttgagaagtggttgagtagcaacttaactacatacaaggaagccttttttgaggagtgcctcaagttcttaaaggatacccattttggtggatcgcagaacctttctggcaaatcatttcatcagtctggtgctgttctgagtctatatgccgaggcaactgctaccatcttgaaggttcttaaatctcatactgacttggttgcttctagacaactttctgaggagttggagaggcttcatatatctatgatagatacaaatccaaggcttcagaatggtgggacagctga

SEQ ID NO: 16396 - DNA, 142 bp, Glycine max
  Clone ID: PAT_MRT3847_114812C.1
ccagcttctctttctctctgtatcgtccactctcttcatctgacactggctacattgatggcggtgatcaaagcacagtctccgccgctagctgccgtagtggtgccctctgaagatttatcactgagcgaatatgtgtctg

SEQ ID NO: 16397 - DNA, 303 bp, Glycine max
  Clone ID: PAT_MRT3847_114813C.1
tggcttggaacctttgggctgatttatgtgcttggtgagaagatgatagaagggacactaaaaagtagaataaaaaaacaaaaacaaagggagaagagtattggctgacacgaatgacgtaaatgcatgcatgtacgtacgtgaagatactatccacacacagagtcaatcaaacctaaccgatcgattgacgacaaataatccatcgataggaaaactttcgcatgacattcaaaccaacccgtcggaaacatactcactgcccagtcagtcgaagcatcaataaacaggtatggactgact

SEQ ID NO: 16398 - DNA, 296 bp, Glycine max
  Clone ID: PAT_MRT3847_114814C.1
ggggtgagttgctggatatctattgtgctctctgcggatagactggggacgtaaaataatgattatgttatttggtttggcactcttagaatcttctaatctttaatcttttttatgaggcttcccttcataacaaaaccatacttttatgatgaggtcttctgcttcttttggtttgagcatgatgcgtaccatttgtattacctgctgaaccctttcttattattcttagacagtcagtaacagttgtgggatgatgtaacaaaagaaagtctccaaatagatgaaaaacactc

SEQ ID NO: 16399 - DNA, 169 bp, Glycine max
  Clone ID: PAT_MRT3847_114815C.1
gcaagacgccggatcgccgcagtgcaccgcccggaactcggatcgaggatagaggtttagcaatgagcattcctctgccctttaaggaggcggatatgtcaaagacgcgatgtcttaaaagactcaggattattggaaggatgaagatgccaactcacttgcttcctaa

SEQ ID NO: 16400 - DNA, 214 bp, Glycine max
  Clone ID: PAT_MRT3847_114816C.1
ttttaccagattatgcttcatgtccccagggacggatgtgactcctataatacctgctttggaagcgatttggccaacctctgctggagaaagactgtctgattttacttttcgtactgtaactggaaagttgatccatttggctcacaattatcccattcgaatccctgacaggtttccactggtaattctttctttattgacccacaaaggg

SEQ ID NO: 16401 - DNA, 431 bp, Glycine max
  Clone ID: PAT_MRT3847_114817C.1
gcctcaggcttgttatggtgttaacatttcaatgtagggtgttattgaaaaaaggaagaaaggacaggacaaggccaaaggcaaagggggctaaaaccagaccaggaaagactagctagaactaggacccctcgggatacataaagaattcaccagggaactttggaagcgaaaaactaagggcccaaaattgccttaaaagcctttgcacctgcattacgaccaaaatatgctacaagggcagctccggcaaatgctcccaaagaaagacccggggcaggcaacctcgcgggaaagatccaaacacaagctcccatatggggcccagaccaatggtaagcgatggaacccgaataaccacggagccacagacacccaacagaacggagctggggccccacaacccacttccttagggattcaattggggc

SEQ ID NO: 16402 - DNA, 283 bp, Glycine max
  Clone ID: PAT_MRT3847_114818C.1
gggtggtgatgacgggtctctggctttcgttcccaacaatttctccgtggcctctggggagaagatcgtgttcaagaacatcgcaggtttcccccacaacgttgtgttcgacgaggacgagattcctaccggcgtggatgcatggaaaatctccatgagcgatcaacaccttctcaatgctcctggtgagacttacagcgttactttgaatgctaagggaacctacattttcttctattctcctcaccaaggagctgatatggtggtaaaaatcactgttaat

SEQ ID NO: 16403 - DNA, 237 bp, Glycine max
  Clone ID: PAT_MRT3847_114819C.1
aagcacggaccccggctcgagaggagccagagcgagatgaacacaccaagaagaaagacccaaaagggggagaggaacaaaaggaagccgaaaacccaacccggaggaggggattaactgcacaacccacggaaaaaccccagaaacggagcagggggcgcaaacgacgacgccgaagacgcaagacgcggcaggagcgccgcgggaaccgaacaggcccccagcaaccgcagccca

SEQ ID NO: 16404 - DNA, 113 bp, Glycine max
  Clone ID: PAT_MRT3847_11481C.1
attacggatttggcttctggtgataatgattcagatcaattctatgggttgctaaattatgggcacattgggaccattgtagaaactttgtaatgagaatgctcctgcatgcg

SEQ ID NO: 16405 - DNA, 406 bp, Glycine max
  Clone ID: PAT_MRT3847_114820C.1
ctccacgcgttcgcccacgcgtccgaattagttcattctctttgcgcagttccctacctctccaaaaaacgaagcagatcttcccccaagaccctgaccggaaagaccatcaccctctgaggtggccagctctcacaccattcgacatcttcaaggctctgcatccaggacaacggaaggaattcccccggatcagcacacgtctaatctatcaccagacagcactctttaggacagggcgttctcctcgccgactacaacatacatatggagtcaaacccttcaccttagaacttcgacctccgaaggtggcatgcaaaatcttgcttcaagactctcacctggcaaaaccatcaccctacaggtcgaaagctctcacaccattgacaacgtcaaggccaagatc

SEQ ID NO: 16406 - DNA, 463 bp, Glycine max
  Clone ID: PAT_MRT3847_114821C.1
aagccatgaaagtgactagtgagtaagataaaacataaagaagcgttcatagagtacaaagatttcatcaaactacagtgatataaatccttcaacttttacccctaagagagatatctcaattgtgtttctaaacaatgagaacaaactaggaaagtgtgagttgagggcctgagatcaatatattatggggtattttgtgctaacctacctaagttacaacaaggaattggcttttcaaaaagcgaggaaaaatttaaacaaagtacaaatacccacttgcagataatattatttggggaggtaaagaataagcaagcttgcggaggtaggatgatttggaaaaaataggcacttcttcaggagggttggcgggcatcaagcatgtgttaaccccttgggggtgggcgaaaggaaaacacctaataggtggtccagtctccttctttacttttaactcatc

SEQ ID NO: 16407 - DNA, 356 bp, Glycine max
  Clone ID: PAT_MRT3847_114822C.1
aaaactgactttgggccccaggactttttaaattacccgaaatccaagtttggattttacagatttaaatcctaaaaactggttaattggttgcactagcttttaaagggtccttattttataacctaaataaatttttcttagaaggcctttaaattaaagggtttatgcaaaacccaccaaacttttttgatacctgacaatagttatggtgggggaatcctttctttgctggggtagcagaaaacccaaagccgaaatcctagtaaacccaaaaaataaggggggggattttacgaaaccccaaaaaataagaaattaagattttttttctggggaaagccaaaaatgaaaaa

SEQ ID NO: 16408 - DNA, 759 bp, Glycine max
  unsure (1)..(759): unsure at all n locations
  Clone ID: PAT_MRT3847_114823C.1
gttgtggtggccttgattaaaatgttcctgttaggttttacattaacttaaggtttgagtggaataagcctctattaaccgtgttaaatttctttcttcatatagatcacaacacattatataggttgtgttgatattgtgctgtagtctacattgagtcactttttttttatcagcagaagtatatatattatagaacattaaaattagtacaaggggtactgttgtatatacatcctagcatttgcaaggtgcagaactatggtgacctaatacaagctaaccaacctgaatcagcaaaccaaagatctggattatataacctgaattatacttttcataataatgtcggtgagtgaaaaagaggaaataatcatgaaaaagtttggaggattctggtgaagttttataatgaagggagcacactggacaagtttgtgtcagtgagtgtgaaatttgtgacttaaaagaaaaagttctcttagctccataaattatttttattcattccctgtgaacagttttgacttacatattaccatctacatgaatctagcacgtccaattcataaccattgaantatttgggtgtagatattgccatgaatattataatattaatgatatttcaggnttggagaaaagaaataatcatgaaacgaagtacttccattcagtagaaagaaaactgaaagggaaataactttaaatgcaactctgaagcaggtttctaacatctacctgtnncgcagttccagc

SEQ ID NO: 16409 - DNA, 388 bp, Glycine max
  Clone ID: PAT_MRT3847_114824C.1
tgagcacacagacggccaccaaaaacagaaggcggagcttaaccctgagggggggggtttatcgaacgggaacacggctatcatcaaccacagcccatgctggtggacaaactcttccttcacaagggcccccatgatcactacatcgccatggacagtttcatataggatccatggactcatgagcactataacgatgtcgtatcacgatactaaaccatagctgctgcttccgaagtggaccattatcatactcttcttgactctatcaccactaaagatgactacatggtctccaatatattactacagagtgcttgtgcgacagataacttacgataaatgctcagtctttagggtgatctgcatataaacttgactactattc

SEQ ID NO: 16410 - DNA, 550 bp, Glycine max
  Clone ID: PAT_MRT3847_114825C.1
gatagaattgttttatacttttttccaaaaaaaaggaaaaaaaaaagcttgtggaggcctaaagggcagctaaaaaaaaggcccctgattccaagttctttaaccaagctctttaataaaaaagaattaattaaccaccttcaaatgcaatgctgaatgctgccctagtaaaaaaaaaaaattgaaaattaaaattccaaggcaaaacacattctattaaaagcattattatcttctccaaatcttaacttgggggaacaggggctttaaaaaagcttacctgaactttggagtattaaccccaattagggagactttcagtcatgcttaatgcctagcattttaaatgctagcccccatgccacaattgttgcagcattagcaggaaaggctccacttacaggaggacccaaacctgtttaacaccccttgaatccacccctttggtaaattgaactcaagacccgaaaaggattttttggacaatttttatcaggggtggtctgaataaaagtctttgccacataagagggaaaactgtcaaccaaaa

SEQ ID NO: 16411 - DNA, 438 bp, Glycine max
  Clone ID: PAT_MRT3847_114826C.1
atagccacattttaatttttgggtgggggaatttaaaaaccacttattaattttcttggggctgcaaataacccccaaattaaacgtattcctatgtgcaaaaagtctttaaaattataacatatacacaatgtaccaggggccttctacttaaaaaaaaaaaaaaaattacctattcctgacagataattttcttttaaactgtatgaataacacgaaggaggtatcactgcaaaattgacctgtaacccaattttaccacccaaaggaaaatcttaccgaaattcaacaacacaaccccaggaacattgttcgggcccgtcacaaaccaatttgcattcacatttcgtggacacataaaaaccttaaaagttccccaataacttcaaggaggctattactgcaaaattgatctataatcccattttacctcccaaa

SEQ ID NO: 16412 - DNA, 177 bp, Glycine max
  Clone ID: PAT_MRT3847_114827C.1
tgctaaaacgcaaactcaagggtcaagcattctccttacctagtaagcaacttgctcatattttatgctttgttatacttcctttgatctgtgtactatgtgatgctactgaatgtacttcctggttatgtattcatctaagtattctggttttattgtggctggcttataccttct

SEQ ID NO: 16413 - DNA, 879 bp, Glycine max
  Clone ID: PAT_MRT3847_114828C.1
cttcccgtgttttcccggcaacaagaccaactcaaaaaccctaatttcccatctccaccgttcactgaattcaaggccttctctcgcctccatctcactccaacatttctcatccgcaaccaacattggtcaaatcgattcatcctcgttgaaattccaatccttcttcctcaatttctttcttccgttgtctcagagtggttttgtgtttgaaggtccttcaatggcggaggaccgtagtgaggtgagtgattacagttcggaggacgaaggaaccgaagattacaggcgcggagggtaccacgcggttcggattggtgacactttcaagaatgggagctatgtggtgcagagcaagcttggttggggtcatttttccactgtttggctcgcttgggacactcacaaatcgcgatatgttgccttaaaaattcaaaagagtgctcagcattacactgaagcggcaatggatgaaataaagattcttaaacaaattgctgacggggatccagatgacaagaaatgtgttgtaaagcttttggatcactttaagcattcaggacctaatggccagcatgtttgtatggtttttgaattccttggagataatcttctcacacttatcaaatatagtgattatcgaggagttccccttcccatggtcaagggaatttgtttccatattttggtgggtttggattacttgcatcgtgagctttctgtaatacacactgatttaaagcctgagaatgtcttgcttttgtctccaatagatccatctaaggatcctagaagatcaggcattccacttatccttccaaacacgaaggataagactgtgaccaagaatgggataacaatagaaaataaaagtttgaa

SEQ ID NO: 16414 - DNA, 462 bp, Glycine max
  Clone ID: PAT_MRT3847_114829C.1
tacggctgcgagaagacgacagaagggtagccattctataacacttgaatttggttttaaaaggattaaaagtttaaaaccatttcttaatttctccaacggacagaattgacaaatgctctatagaaagagtgatggtagcttgagtcttcatacgccgagaatatttttctcttcttttcatctcttctcccttctattctctatattttgtgggtattgtttgaggttgcaatgtatttaccttgagtgcacaggttcaaacacgacgctgtataaatcttggggagcaaactagatattaggttacattagaggtccaccgatatttgctttcaggacagtgattattgttgcgacacaaaatttccttatttctataacatttttttccttctatatttctaacctcaagtaccatgtttggcattctctctctctctctcttttttttttctaaaa

SEQ ID NO: 16415 - DNA, 285 bp, Glycine max
  Clone ID: PAT_MRT3847_11482C.1
gccacccgtacatactgaacctgacattgtcagtcgcattttataagcttgttctatggcaatggctccatttgcatgacagtctgttcattcaaactcaacttgggaagactttacaggacctcaatgcccttgactgtctgaaacatcatatagaatctatttatggtagctatacagatacacaccgctaacttgtatttccatggtgcaccaatcgtagatctacgcttagatactactctccctggttatactaaatacaccttgcacccactacaaccc

SEQ ID NO: 16416 - DNA, 683 bp, Glycine max
  Clone ID: PAT_MRT3847_114830C.1
cttatcaacgatcttaattcctaagtaatattttattaaaaaaacatatacctattctaaaagtatatctctagaattataaagtagagttttagacatatatttctgaaatagatatatttaattctgaaaatacattttcagaaagcaaaaggatttgaaatagcaactaccagaatgtgaaaatagttgggaatcagaaattcaagaagcctttcctcacttcaccttttaggacaaagaaaatcttataaagggtattgatagacgatgctataaaggacgtgcaagttaagaatacagagaatcatatctctgggcatgagccagtagagtatgagacaagttccattaactacttatgaggagatgggaataaaagggaaataaaaagtagataggaaaggaaatagttagccatttgaaaatggagaattcaggtctatcgagaacttgaaagatttcttcaatccaataaatatcggtttcttctttatttctgatccaattctatcaaaatgactacaagcctattatgtcaatgaacatcttgcactcttgcagatgaaaatgaatgcaaaagtatgacagattaatgaaatccaaaattcagacaaagattaatagggttggttggttaaagcgtcatatgaaacagattcacctcaactcaagcaacaaac

SEQ ID NO: 16417 - DNA, 309 bp, Glycine max
  Clone ID: PAT_MRT3847_114831C.1
gggacaatgtttaacaccaatacttatggggaggccattggattaatacaaatgaaaaaccaatcagactgactaaacaatgaatttctatcgctacaaaacaatcacgattcaaaagatcggacactcttgcttacagaaaccagatatgctggtcatattacaacggataaatgatggcggctaggattctaatcctacttgaacaccaaggtatgagtttgattccatccagaagaatagtaccgttattcaatgcaatgaaacaacaccctatggattgcgtagaagatataacatgctaaggaa

SEQ ID NO: 16418 - DNA, 577 bp, Glycine max
  unsure (1)..(577): unsure at all n locations
  Clone ID: PAT_MRT3847_114832C.1
gcctatgaacttatcgagcacccagattactcctgtcgttttggtgatattgtgttcaaggtggctcaaaaacttggttatgaagctgatagagataatgcaaagtcagtgactgactcggctgaagacgacagaagggcagtgcatcagggacaccttatcatgatggctttgttttctttgatatatgcttccctccagagtatcccagtgaaccccctatggtgcattataattctggcggctaccaattaaatccaaatttgtacgagtcagggaaagtctgtccgagtctcctaaacacgtggactggtacagacaccgaagtgtggaaccctggagcttccacagttcttcaagttcttctttctctgcaggcccttgtccttaatgagaagccttatttcaatgaggctggatatgatcaacaaattggtagagctgaaggggagagaaactcagtgagttacaatgagaatgcttcccttgtcacctgcaaatccattttgtatcttaatagaaagcctcccaagcattntgaggcattggtggaagagcactttagacagcgctccaa

SEQ ID NO: 16419 - DNA, 2385 bp, Glycine max
  Clone ID: PAT_MRT3847_114833C.1
gcgctcgcgcgagtttttcacatacaaactggcaacttggtgactggtgcatgctcccagttgtggaccaaaaggaagagatgattcaagatgcatctacttgtgatgcttataatgagcatggtatggctagaggatataagagaagaaatcttaacgttggggaattatttctaattgagaagataaagaccaaagttgatgttgtttggcaaaatggtgaacatactttgggattggatccacacaacttagtcccagtgaatgtcataaacactcatgaattttggccccagcagtttgtgctggaaaaaggtgcttccgatgatcctcttaagcctagcaaacaaagatggggtgttgttctttccatggatgcaaaagagcatactgtaaaggtacactggagaactgttcccacatctgagacagataatttagctggagacacaatgattgaaactgtgagtgcctatgaacttgtcgagcacccagattactcctgttgttttggtgatattgtgttcaaggaggctcaaaaacagcttggctaccaagctgataaagataatgcgaagtcagtgactgacttgaatgtggaagttcctctgataaactgggaccaaatcagtcatccgaataagtatgcagataacagttacctctcctgcattggcaatgttactggttttgaagatggtgacatggaggtgaaatgggctactggtttaacaaccaaggttgcaccttatgaaatttttcgaattgataagcacgaaggttcaactgcaacccctgtttcttatgaagcaaatgttgaggagttgactcaagagatgattgtaagtcaaccatcagacaagaagggaaagggcttgttagattgtgatggctatagagataattgtgagcatccaggagaaagtagttcctcttcccttccacaagctgcctttgaacttttctccagtattaaggccagcatattcaaaacacttggtgtaacatcactttctggcaaattctgcccagtccctacgtttgaagagggaaatgaatctggttgtcttgataagaaagatttggacacttgtggccctgaatctgaatcacatccagtgagcaagatgcagtcttctggagacatttgtgaagttattaggactcataagaggaatgattttccagtttctttagacaacaaaaacagtttagatcagttgaagcagtttgatgtaattgataattgctcagatcaccactttattcaagaggggaaaggattgacatcatctcagtttaaaaagggttgggtgaagaaggtacaacaagaatggagcatcctggagaaaaatcttcctgaaactatttatgtccgtgtttttgaagaaagaatggatctcatgcgagcagccattgttggtgcatcagggacaccttatcacgatggcttgtttttctttgatatatgtttccctccagagtatcccagcgaaccccctatggtgcattataattccggcgggctacgattgaatcctaatttgtatgagtccgggaaagtctgtctgagtctcctaaacacgtggactggtacagacaccgaagtttggaaccctggagcttccacaattcttcaagtccttctttctctgcaggcccttgtacttaatgataagccttatttcaatgaggctggatatgatcaacaaattggtagagccgaaggggagagaaactcagtgagttacaatgaaaatgctttccttgtcacctgcaaatccattttgtatctattaagaaagcctcccaagcattttgaggcattggtggaagagcactttagacaatgctccaaacatatacttttggcttgtaaggcatatcttgaaggagctcctattggatgtggttttggtggtggaaaagctgagcatgaaaaccaaaagggaacttctactggatttaaaataatgcttgctaagctcttcccaaagctagtagaggcattttctgacaagggaatcgattgcagccagtttgctgagatgcaaaagtaattgtctgttctaccttgttgtgaataagccgtccagctttctgtcaaggatattcaaactttatgtgtaatattaatttgttttcacttatcttgtataatatcaaatgtgtgcttgataaaaaaataccaatatcctcttgtaaaccaccaccccctcccaaaataaaagaagtggtgaagatgtattgataataaaaataccctgtggtatgtaatgtatcatatgtactatgtaatggcttgaagatgtgagaatgtaaaataagaagcacagtgattggagtggtttacttaaaaaaaaaaaaaaaaaaaaaaaaaaagag

SEQ ID NO: 16420 - DNA, 450 bp, Glycine max
  unsure (1)..(450): unsure at all n locations
  Clone ID: PAT_MRT3847_114834C.1
cattgaaaaggtatccggcggaattgtcacttatcttcattggtttgcttatcgggtgctttgcatgccngcgaggtggaaaatgtaacaactcttttttcaagggctccgcggcatcgttccttaagaagctactggaggctccacccccctacacaaacgggggtaaaagcctatcggatcacatagcgtgcccaatgtttgtttttgggaaccatatgtcaagcattgccaactgccttccctcccgtttgaatgggaatccgtcccgccccaggctggttcctttatgcaaaaaatctccccccgtaacttttccttgttgctggggctatcgaatcggaactgcactctgtgccatggtccttaggaaaagactgttcaaacccaacgccggcatctcctaacccggggcgctcttagacgcctcagtttacaataaccccatct

SEQ ID NO: 16421 - DNA, 472 bp, Glycine max
  Clone ID: PAT_MRT3847_114835C.1
ggctcgagctgaggttctacagtgcgaaatacaacctctactttttaccgacacgtgcgttgcggatgaaagcatggaactcaatgccactgcgattgcccttcgtaactatcaggctcatagcgatctaggacgtgccaggacctgagcatatgtccttcccgtagccaatacactcggacagatgccagaatgattcgagatgaccaagtgctcaggagcaagcggacactgtgcatgcagcccctgataactgacgcgactgcattcacttgatggctcacggtgctaatatgaacgttatacaaggacgggtcagacccaggtatatgacactacgggttcgacagtagggtgcacatttgcggcttaaatgcagcgggtctcaatcgtggaaccggcaccacagaatatcttgtcaagacttgagatgtaaaaagtcatgcaaatggtgctaggtacgacggacatg

SEQ ID NO: 16422 - DNA, 353 bp, Glycine max
  Clone ID: PAT_MRT3847_114836C.1
cggctcgagcccagggggtgctaacaattttccttacatttacagatgacaaaacaaaaactaattgcctgttttcagctgcaggtgtctatccaattgattccattgccgcaaatgtgacggaacataatttgacagtgattggtgaaatggatgcactgcttttttagatgaagcttaagaaagaagggatagttcatataatatcatttcgacctcccaaggaagatattaaagaagaaaacaaagcgctaactattgaagacaaaccagaagggaagccagatgatagacaggaagagaaaaaataaaagcatgccatcatatttttcaacaccctaccgcttctttta

SEQ ID NO: 16423 - DNA, 179 bp, Glycine max
  Clone ID: PAT_MRT3847_114837C.1
aacggcaaacaaatggaattttattacattatgaattacaagtttcttgcatggcattctttaaggaaaactgggaagttgttttttgtgaattaatttgcccacatcttattttgacatacaaaatgcttaatattaacataaacacgttttcggaaaaaaaaacacttttttagaaa

SEQ ID NO: 16424 - DNA, 641 bp, Glycine max
  Clone ID: PAT_MRT3847_114838C.1
agaaaggacaaattatgacataaataatctgcctcaatgatgtatttggtatcaaataaattacaacaagtttcatgtgatttacctaactctatgctaacaagttcgtcagttgctccattctaatctagcaagcagagattagtgattctcaagaaccaaactgctacctcagttctataggagaaacgaagtcagaaaagatataagctgcagtccgaggatgttgtgcaagtgaaaagatcatcatctcataacagactctttcacatacgatcgaccacctgaagtatattcaaggtgactattcataaatcgagcattttctttgctttgtgacaatgtcactgaaccttcaattagttttttttttatcagcgaaccttcaattagttgatcttgctccagctctatagggtcataaaagtatatcaatgtctgctgccaatgtgttggagggtcctcaggcgcagtggacaagaccagtgcttcatttgggtttgttcgcctttttctctgactaccattcatctgatgattgtcaacaaatgaagtagttgattgataattggttgatgatattgcatgcccattaaattcaacgtcaaaccaaaatgcaaaaccatgtaatggtgctcgca

SEQ ID NO: 16425 - DNA, 244 bp, Glycine max
  Clone ID: PAT_MRT3847_114839C.1
ccgggattgaaatttctaatagattgtgccgatgtgagaaaagagagaaaaagacaataacagagtctactttatggggcggtatcaaaaatttaatttgggtgtcaatctcttgtaaccactactaatggaaaaggtagaaaaagttggggtagcgtgtttagtatccaaagctttaaagggtaactctatgttgagaatatattctatctttaacagttcattggctggttcacatgagttg

SEQ ID NO: 16426 - DNA, 601 bp, Glycine max
  unsure (1)..(601): unsure at all n locations
  Clone ID: PAT_MRT3847_11483C.1
ctgttcagatgtagtgaatcatattcatatggtatgtataaacaagtaaatgaaatgttccttgtctttctgaactaacaaaaaaggtgtctttggacacataacaatgattttatgcctaaagacctaatcgtaaccactgtgacgaaattcttgtgtccaaaatcctcttcaccacatctcctacaaaggaatcaaagcaagatgaacagcaacctttaattagactcgtttgcccaccagccattagctccatatgggaacaggcagatggaggaggcacagtgcaaacttcactcttcatgtgctcaagatcacaagctgctagtatggtgtgcatagaactccttgcaatatccttgatagtattgtggcctaaatcaatattttgagacaagctcttcaagtggcttttaaccattgactgcaactgctnctttgcaaagtgaaagttactctcttctctgacagnaggggataagccaccattaggaacaatgtttgatctactgaactgatgaacttgtnnacaatctggnactgggggtgnnnnnataagnncagaccataatgngncattctgnattaatggggaggaatt

SEQ ID NO: 16427 - DNA, 828 bp, Glycine max
  unsure (1)..(828): unsure at all n locations
  Clone ID: PAT_MRT3847_114840C.1
accggtccggattcccgggtcgacccacgcgtccggcgcagttgtagaaaggtgaacgaagatgtttcctcaggagaaatatagtaacggctatcagcaggggcagggggtgggttacagtcacagagagcgagtccgtcgtgggactcncagggcacgtgcctccacttcctccgttaggggttacgaccagcaccaaccgcaacatcgagctggttggactgatttcgacgtcgcctattaccattcttacgctcaccttggcatccaccaagagatgatcaaggatcgtgtgcgtacggaaacttacagggatgcaatcatgcagcatcagagttccattgcaggcaaagcaaatgaagttgtgaaagcgaataacttgtgctgatgtggttgttgtattgcatgggcgagttgaggatgttnaaattgatgaagaggtggatgttataatttcagaatggatgagctatatgcttctatatgagagcatgcttggaagtgttattaatgctagagatcgttggctcaaacctggtggtcttattcttccttcaagtgcaacgttgtacatggctcctgtcacacatacggacagatacagtgacagtgttgacttctggcgcaatgtttatggaattgacatgtctgccatggtatcacttgctaaacaatgtgcatttgaagaaccttccgtggagacaataactggtgaaaatgttttgacatggccacatgtggtaaaatatattgatagttattctgttaccgtccaagagttagaatcttgtaacagccaagtttaagttcaattncatgatgcgagca

SEQ ID NO: 16428 - DNA, 337 bp, Glycine max
  Clone ID: PAT_MRT3847_114841C.1
ccacgcgtccggcgcagttgtagaaagggtgaacgaagatgttgtcctcagggagaaatcatagtaacggctatcagcaggggcagggggtgggttacagtcacagagagcgagtccgtcgtggcactcgcaggtcacgtgcctccacttcctccgttagggtttacgaccagcaccaaccgcaacatcgacctccttggactgatttcgacgtcgactattaccattcttacgctcaccttggcatccaccaagagatgatcaaggatcgtgtgcgtacggaaacttacagggatgcaatcatacagcatcagagttccattgcacgcaaagcaaa

SEQ ID NO: 16429 - DNA, 509 bp, Glycine max
  Clone ID: PAT_MRT3847_114842C.1
ggccgttgtagttgtagctgtagaagggtgagagaagatgtttcctcaggagaatcatagtaacggctatcagcatcagcagggttacagtcacagagagcgagtccgtcggggcacttgcaggtcacgtgcctccacttcctcacactctcactccgttagggtttacgaccaacctcgtcctccttgcactgatttcgacgtcgcctatttccattcctacgctcaccttggcatccaccaagagatgatcaaggatcgtgtgcgtactgatacttatagggatgcaatcatgcagcatcagagtttcattgcaggcaaagttgtcgttgatgttggatgcggtacaggaatcctttctatattttgtgctcaggctggtgcaaaacgggtgtatgcaattgatgccagtgacattgccctgcaggcaaatgaagttgtgaaagcaaataacttgtctgatgttgttgttgtattgcatgggcgagttgaggatgttgaaattaatg

SEQ ID NO: 16430 - DNA, 774 bp, Glycine max
  Clone ID: PAT_MRT3847_114843C.1
cagatgaatgtagtcagagaaaaaggcgaacaaacccaaaagaagcactggtcttgtccactgcgcctgaggaccctccaacacattggcagcagtccactgctcctgtggcccctcctactctttggcaccagacgttgatatacttttatgatcctatagagctggaacaagatcaactaattgaaggttcagtgacattgtcacagagcaaagaaaatgctcgatttatgaatattcaccttgaatatacttcaggtggtcgatcgtatgtgaaagagtctgttatgagatgatgatcttttcatgcattttggcagtgtcttttgatcgtatgtgaaagagtctgttatgagatgatgatcttttcatgcattttggcagtgtcttatgcattaacacttgcacaacatcctcgaactgcagcttatatcttttctgacttcgtttctcctagagaactgaggtagcagtttggttcttgaaaatcattaatctctgcttgctagattagaatggagcaactgacgaacttgttagcatagagttaggtaaatcacatgaaattttgttgtaatttacttgataaaacacatcattgaggcggattatttatgttataatttgtcctttctaaagcctttattgtggggccgactcgtttcaattttttcttggagtcttactgtaacatagagctgttttgaaccatatattcttgtcgattttattttatgttcgttaaaaattggtagtacatccgccattttcctg

SEQ ID NO: 16431 - DNA, 472 bp, Glycine max
  Clone ID: PAT_MRT3847_114844C.1
tgcatagcttggttaggttttgtgtttgggattccatcttggttggagttggaagttcatggaattagaaatgttgaaattcttctcatgattgagttgggaaaatgcgcatatctgttgatgttttatttagaaataataattgttcatcaatgtttgagatctaaggtggccggcatacttcttttttaaaatagaatgagtcagtttggaagtgtttatggagtaagaattggtggacttcttctgttgtttggggagttgggaaaatgcatatttctggtgatgagttgcactaatgtttgagatctaagcgtggcctgtcatcctttaaaaaaataaaataaactgagtcaggttgatttttagggtagaatggttatgttcttatgttttcggaggtctgtcctgagtttttatgcttttattgtgttcctttcttagagacaagtaataatgtaaaaagatttca

SEQ ID NO: 16432 - DNA, 935 bp, Glycine max
  unsure (1)..(935): unsure at all n locations
  Clone ID: PAT_MRT3847_114845C.1
attatcgttccctattgaattcattcaacctgctttatatgtcaatcctntttgaatatatatgaattctatatttgtgttttttctctctcaaatctctctgattctggctttaatgcaaaaggggtgttctttcatcacattcggcttctttttcaatagcacttaaataaacacaagacctaactttcaggctgggattaagttaggcctaaaggccataaaaccatcatttgcatttggaaagatgagagcattgagattgaggaattgtgtgtatcttcctctcttagctttcttgatcgtgtcggtatgtttcctactatatcactaccctagatcacttgaaaggggagtcacaaaggtggttctgctcaagcatagatcaactaatataatcgagtctaatcataggaaagattctcttcaagtaaaatcaacctatcctctcttattactcagaaaatgaagaattggataatgtactgtggagtgctaaattgccagacagaacagttatcctaaccatggtagatgaatcaatggcaagtcctggatctatccttgacattttactacagagcttcaaatcaggtgaagggaccgaaagattgctgaatcacttggtgatcatatccatggacccccaagcttttgagtactgcagttccttgcacccctattgcatccatccctccatatttccacgtcccattatgacaaccccagatcataatttattcacttggacaacaaatgatgttctgtatgaagtgattcgattgggttacaacataattttcacggatgcagatgtactgcggcttagaagtccgattataaacttccatgcggctagtgaactcacaatttcatgtagcgatggaccatagtggaagcgacctgcaggatggggggatcttcttcttgaaagc

SEQ ID NO: 16433 - DNA, 1705 bp, Glycine max
  Clone ID: PAT_MRT3847_114846C.1
gattctttttgttccatcttccatgcttcaatttgaaagttttcccatttcaattctctctcacaccgctttagaaactttcctaaaccctgctctccattttcccttgtctcttcctttctctctctacaaagagtgtgtgtgagagagagaaggatttggaattttggataactagagcgaaagcgtgacaccaccaaaaaccgaactgttcccagatctctctctctctctctctcttccaacaatccaaatccaaatccaaaaccctaccaacaccacactcaatcgatcgatggggcagaagtctctgatctacgcgttcgtgtcgcggggaactgtgattctcgcggagtacacggaattcagcggaaacttcaactccatcgccttccagtgccttcagaagctccctgccaccaacaacaagttcacctacaactgcgacgcacacaccttcaattacctcgtcgacaatggctacacatattgtgttgttgcagatgaatcaattggaagacagttacccatggcttttctagagcgtgtcaaagatgaatttgtggcaaaatatggtggtggaaagggctgccactgctcctgtgaacagccttaacaaggaatttgggccaaagttgagggaacatatgcagtactgtggttgatcatcctgaagagataagcaagcttgcaaaggtgaaagctcaagtttctgtagttaagggggtcatgatggagaatattgaaaactggcctggtcacctcaagggaacttatcatgagagatggatttcgatttcatcatttcaaggatgggttttgctcctgtcgagactactggtaaaatatattgatagttattctgttaccatccaagagttagaatctataacagccaaatttaagttcaattctatgatgcgagcaccattacatggttttgcattttggtttgacgttgaatttaatgggcatgcaatatcatcaaccaattatcaatcaattacttcatttgttgacaatcatcagatgaatggtaatcagagaaaaaggcaaacaaacccaaatgaagcactggtcttgtccactgcgcctgaggaccctccaacacattggcagcagctgcagtatttatttttccaattttcagtttaaatatatggttctagtttttttgttcagcgtgaaggggggatggaccttgaacaatgttcccatctatccccgttagagatgtaaacacaagacccaaagcttaagcttttggaatatagttagttaggtttttattattatgcttattttgaaagctggaatattatgttcaaaattacatttcttttattattttggtgtcttgatcttattgatgtattttgcagacattgatatacttttattgccctatagagctggaacaagatcaactaattgaaggttcagggacattgttacaaagcaaagaaaatgctggatttatgaatattcaccttgaatatacgtgagtcagaagaatttctttcaccaaaatatgccattgcagttgaggtggtcgatcgtatgtgaaagagtctgttatgagatgatgatcttttcatgcatttcggcattgtcttttgcattaacacttgcacaacattatccaactgtagcttgtatcttttctgatttggtttctcctagagaactgaggtaccagtttgtt

SEQ ID NO: 16434 - DNA, 535 bp, Glycine max
  Clone ID: PAT_MRT3847_114847C.1
caaaaacaaaaaagtaatctttgaaacaagctaatccaattcaacagcacagcaatatacattcatctgatttgaattcgggatcacagcatgtttctcggactgacaatgataacaggaaaaggcgccaattgcacaaccgtcacattaagatctgtaattgcatgcatctgcattctttatgcaacccattgtttgaattctcaattttaagttcaagtgatcagacagcaactgggcaaaaccaattgtgtctactgtgcgaactgcttggtcttgcacgttatacatccagctctggtgaatttatgaacaatggtaatggcaagtcgggggagacatgtgctgaaaatactactgatggaaaagttttcaatgaggacacacatgtttactgtgtgaatgatcttgctgtgcaaagtgaaatggatttttcaactctgttagccaatgacatgtgccaacgatttcacccatctcttcccattcctcttccaccatcaaatggaaaagaacatggcatttctggggctga

SEQ ID NO: 16435 - DNA, 660 bp, Glycine max
  Clone ID: PAT_MRT3847_114848C.1
tacagtaagactccaagaaaaaattgaaacgattcggccccacaataaaggctttagaaaggacaaattataacttaaataatccgcctcaatgatgtatttggtatcaaataaattacaacaaaatttcatgtgatttacctaactctatgctaacaagttcgtcagttgctccattctaatctagcaagcagagattagtgattttcaagaaccaaactgctacctcagttctctaggagaaacgaagtcagaaaagatataagctgcagttcgaggatgttgtgcaagtgttaatgcataagacactgccaaaatgcatgaaaagatcatcatctcataacagactctttcacatacgatcaaaagacactgccaaaatgcatgaaaagatcatcatctcataacagactctttcacatacgatcgaccacctgaagtatattcaaggtgaatattcataaatcgagcattttctttgctttgtgacaatgtcactgaaccttcaattagttgatcttgttccagctctatagggtcataaaagtatatcaacgtctgctgccaatgtgttggagggtcctcaggcgcagtggacaagaccagtgcttcatttgggtttgttcgcctttttctctgactaccattcatctgatgatt

SEQ ID NO: 16436 - DNA, 3288 bp, Glycine max
  Clone ID: PAT_MRT3847_114849C.1
ccacgcgtccgggtgagcgaagatgtttcctcaggaaaatcactagtaacggctatcagcaggggccgggggtgggttacagtcacagagagcgagtccgtcgtggcactcgcaggtcacgtgcctccacttcctccgttagggtttacgaccagcaccaaccgcaacatcgacctccttgcactgatttcgacgtcgcctatttccattcctacgctcaccttggcatccaccaagagatgatcaaggatcgtgtgcgtactgaaacatacagggatgcaatcatgcagcatcagagttccattgcaggcaaagttgtggttgatgttggatgcggtacgggaatcctttctatattttgtgctcaggctggtgcaaaacgggtgtatgctattgatgccagtgacattgccctgcaggcaaatgaagttgtgaaagcaaataacttgtctgatgtcattgttgtattgcatgggcgagttgaggatgttgaaattgatgaagaggtggatgttataatttcagaatggatgggctatatgcttctgtatgagagcatgcttggaagtgttattaatgctagagatcgttggctcaaacctggtggtcttattcttccttcaagttcaacgttgtacatggctcctgtcactcatacggacagatacagtgacagtgttgacttctggcgcaatgtttatggaattgatatgtctgccaaagctcccctttcacatttcaattctctgaacccacgcgtccgcccacgcgtgctttttattatatcttgattattgtgatttttaggtttttttataaaaaagcactctacctgctctctattttgtctgttacattctctctctacaaagagtgcgtgtgagagtgagagagagagagagagggatttggaactttggatatctatagcgaaagcgtgacaccaccaaaaaccgaactgttcccagatctctctctcactcttccaacaatcgaaatccaaaaccctaccgacaccacactcaatcgaaattcttcattctcttctcatcgatggggcagaagtctctgatctacgcgttcgtgtcgcggggaacagtgattctcgcggagtacaccgaattcagcggaaacttcaactccatcgccttccagtgccttcagaagctccctgccaccaacaacaagttcacctacaattgcgacgcacacaccttcaattacctcgtcgacaatggctacacatattgtgttgttgcagatgaatcaattggaagacagttacccatggcttttctagagcgtgtcaaagatgaatttgtgtcaaaatatggtggtggaaaggctgccacagctcctgcaaacagccttaacaaggaatttgggccaaagttgagggaacatatgcagtactgtgttgatcatcctgaagagataagcaaacttgtaaaggtgcaagcatcacgtttctgaagttgtatagtgtgaggtcatgtggtatatgaggtttgcatggtcccttgacgatttagattgagagagaagttgtatggtttgatcttgaccagagagtggtccaccttgtttatggaggatgcagatttggttatagcgaaagtggtgggaagagaagccatggcggagttaggtgcgagtgagtatgaacaatgaaatgaataatttgttagataataaagagtccagaaatatctggtcttgtccctactctacttaaggaactttgtcatcctaatgagcatacaaaatattcctttaatattcttcttcaagcttttaataatgttttcagttgtggtatcacttgctaaacaatgggcatttgaagaaccttatgtggagacaataactagtgaaaatgttttgacatggccacatgtggttgggaagtcactattgataaagtctttggttaagcattacacgaagcataatttgcccgatgtgagaggtctaattaccatcatatcagggaagcaaaggcaggtgcagtttgcagtttgtggaatgtccaaatgatatcaatggcatgatagatgccgcgaagtttgacgatttaacacttcttcttatcgatggaagttatggtttcgaaatggaaacctttgagttccttaacatattgcaagttcatgggttcctgagggtcatggtcaaaaggcaaatgtgtcattaggagctctaggtgatgaacatggcacaatttaatgagtagtaatgctaagaatgttgaacagaatgacaaaatagaagctttggataaatatcagcctgggactggttctgatgaagatgaagatgcaccaaatagtactgctaagaatggagtccacttgcaagaacatattgattttcatgatggaagatggaggagaagagcaatatttgaaaatgattgtgtagtcaataaaattaatgtttgtttatttgggtagaaatggagtgaaaaagaaataggaagaaggttttagaatttgagttaggagtaattggcgtaaaattttttagtttgataaaaaagatttgagtttgaatgttaaatactgaaaattaagttatagcacatacctaattaagaaccttttttttatccgagtagctgaaatcttcaatataattggattgtccttttataggcattattgggtggatattgggtagatatatcccttgcagagcacaattaattgtaatggaatacttataagtgattgagaggaaagagagagatttcatacttgagactcatatttatatatatatgtaagtttgggtagaaaagtaagctaaacaattaataaagtttgatgcgtaagtagagcagacaactttgaaaattggggcaaatatacttttctactttctatatttctttttttgtatctaactccgtccttggccatctccgtattgcagttcctaagaggttcaggcttgcaaaggacacaacatttggacaaaggcacttgaataagtggagtcagtcatcaatttccttatggatggaattaatgaaacattgggcttaatccggattttggttgtggacttgaagagggcaaataaagcagcgcttaccttaattaatttctaattaggaaatttcgcaattttattttatgttgttcagtgtttatttcgttttgggccagagtattgtaatagggcccagtgactttgagtgactctttttaaatagcttccttgggattcgtggagggcattatgttatgctattttcattattcagagctttggttttaggttttc

SEQ ID NO: 16437 - DNA, 464 bp, Glycine max
  unsure (1)..(464): unsure at all n locations
  Clone ID: PAT_MRT3847_11484C.1
ggcataatgaaatgatgaaatttgtatactaaacctgttatattgtctttaaattaaagtaagcttgtctccttgtttgtgggaatttatgactatgtcatctgctgtttgtcctttggtagccattagatatttttgtgaatattggaaatattttttgcatatctttattaatattaatatattaaattgcacctanttataaatggccactcttctgtgcgtttgtaataactctcatctccttcattgcagccatatttttcctacccattcaaattctgtgtttacttgtcactaaaatctccctcttcaccatttctgatagttttgaaaacattaggaataatgcttgcatgttaatttgtttggacaattatagtttggtgcttgtgtgtcattttggcgtgacttaatttgagataccatctctcccctgtgcccccagtgatgtgaatgtgata

SEQ ID NO: 16438 - DNA, 2169 bp, Glycine max
  Clone ID: PAT_MRT3847_114850C.1
ggctcgagaaaagatagagcaaggaactcataaaagtgggaggaatgtggggttgaaagcttatgttgtgtgccaagtgcttgagattgttgtcaaaaaggaaataaaacaagctgaaagaaaatgtacacaagtcaaaatcaggaaggtcattcgaccagaagatttatcaaatgagagggcatattgaactgatatacgagatgtgtattacagcgatgaaacatatataatctctgtagaatccatagaagggaaatgtcaagtcagaaaaaagaatgatattcccgaatgcagtgctcttggtggaatcttccaaaatgtttttttctgcgagctcttgtatgatcctgccactgggtcactgaagaagttgccggctaatataaaagtaaaatattcaagtggacaaacatctgatgctgcagctagaaagaggaaaggaaaatgtatagagggagatggtgtttcagagtccacaaaggaaggaaaaacattaaatgataaacgtttagcaaccttggacatttttgcaggctgtggtggcttatcagaggggttgcagcagtcaggagtttcatcaactaaatgggctattgagtatgaagaaccagccggggatgcatttaaagctaatcatcctgaggcattggtgttcattaacaattgcaatgttattcttagggctgtaatggagaagtgtggggacacagatgattgtatctcaacatctgaggctgcagaattggctgcaaagcttgatgagaaggaaataagtagtttaccaatgcctggacaagttgatttcattaatggtggtcctccatgccagggtttctctgggatgaataggtttaaccagagcagttggagtaaagtccagtgtgagatgatattggcattcttatcctttgctgattatttccggccaaggtatttcttgttggagaatgtgaggaactttgtgtctttcaataaaggacagacattccgtttaactttggcttcacttcttgagatgggttatcaggtgaggtttggtatccttgaggctggagcatttggggtttctcagtcaagaaaaagggcattcatatgggctgcttctcctgaggatgtgcttcctgaatggccagaaccagtgcacgtcttttcggcccctgagttgaagatcacattatcagaaaatgtccagtatgctgctgtccgcagtactgcaaatggtgctcctttacgtgcaataactgttcgagatactattggtgatctcccagctgttggcaatggagcctcaaaaggaaacatggagtatcaaaatgatccagtctcatggtttcaaaagaagattcgaggtgatatggttgtcttgactgatcatatatcaaaggagatgaacgaattgaacttgattcgatgccagaaaattcccaagagaccagcacctggtctcttggcgtgaccttccagaagaaaagataaaactgtctagtggacaagttgttgatttgataccatggtgcttgccaaacacggctaagcggcacaatcaatggaagggactgtttggcaggttggattggcaaggaaatttcccaacttccgttacagaccctcagccaatggggaaggttggaatgtgcttccaccctgaccaagataggattcttactgttcgtgaatgtgctcggtctcaaggcttcccagatagctatgaatttgctggcaatatcatacacaagcaccggcagattggtaatgctgtgcctcctcctctagcatcagcattggggagaaagctcaaggaagcagtggacagtaagagctccacttagaagatgggccttctacattaggtcatgcttattgtattcataacagtcaccaagatattgcaaatcatcattccgggttccaaaaactagaaacccttgtatatagtgatatccattggtcatttgttgaggctaattccttgtttaactttcctcaaccaaggaattgaatggatgatgctcattttctatcaactaggattttcttgattagatggtattttggctgtttatgaaagaaatggttgggaattgattacctcccaatgtgtagttgaaaattgagaccaattttttttaacctgttatgaatatttgttgttgccactatttggct

SEQ ID NO: 16439 - DNA, 435 bp, Glycine max
  unsure (1)..(435): unsure at all n locations
  Clone ID: PAT_MRT3847_114851C.1
ggttccggggggggtagaagcttttttataaccttatttttttattgacgcatatcaagctaatcttatcctattgcaacttcaagaccattcaattgctctaagcttattttactgcctaacgcgtaaaccaaccttctggcacgatgggcatactaacaccaccagggcgggtatctctgcgccaaccaagggagtttggtgctataggcaaaatgctgcagcaaatggtcaacgatggatgccgccctattgccgctacttacagccgcctacttcacagttaaggccgcccaaactacctaagggaggctctgtttgttttccaccaaatgcaggagatgctatgcacgcccnancgtnttacctactgcacgctcatagaaaaacaaccaaaaactgtatttcttgaagcggctatgtggatgaataaaa

SEQ ID NO: 16440 - DNA, 444 bp, Glycine max
  Clone ID: PAT_MRT3847_114852C.1
aattcggctcgagacggccgcggctggacgaaggcggggccccattaacttcatttgaaaacagaggaactcttttggcgggagctattgggacacttcttctaactcgtcttgatatctttggtggctttagatgtgacgcgagattaggtattccacttgcagcagataactttcatgagtataaatgtgtcagttttgtgaccaataaaagtgatcctatgctctcataaggtatgtaagataacaagtgattatgcattttcaaataccaatttttaatgcagagttcaataatgcatagaatttagaataaataataaatataccgatcatggaaggatctggtaccccatcatttaatgacagattggcgtctatagtaaatctgctcacttttgtaatgactaccttcataaattgagagtgcatgtctattaaact

SEQ ID NO: 16441 - DNA, 276 bp, Glycine max
  Clone ID: PAT_MRT3847_114853C.1
gactctcgctcaaagcataatacagtgagtttgatcttggttgggacgctcgacataatgtcgtcgacaatgcagaatcgtcattcatcctttacttcctctacagcgtcatctctgtgaacagcgacatgacttctatcttcggtgtcgttgtggtcgtcttcaggtacatgctaaagggttactactcagaacgtggttgtgaagatagcgctcctcgtcatcctcatgaatcggaggtacacgtcatcgtcttccacatcctctttggtgcaa

SEQ ID NO: 16442 - DNA, 210 bp, Glycine max
  Clone ID: PAT_MRT3847_114854C.1
ggcagatgttggtgttggaatatgtgggttggaagggcgccaagcagtgatggcttgggggtttgttatgggacaatgacaggtcttgaataaactaacttttgtgcatggacactggaattcccaacgtgttgcttatttaatttggacgcttttatacaaatctgcctttgggtgatgctattcagggtatatatgtaatgtttttat

SEQ ID NO: 16443 - DNA, 322 bp, Glycine max
  Clone ID: PAT_MRT3847_114855C.1
tttgggctgatttatgtgcttgcatggtcgtaagatgatagaagggggagagagcataaagaactaaagaaaggggcggcggtcgtcctgaaagtaccaacaaccgggcacccttagaatactacagcccctgtagtagtaaatcaataaaccatctacactacacaacaagacggtttgcctctctctgtaagttaaatgcaccggcgcttccgccgtctaactcactctttcaaccttagcctactggtgaggccatatagcggtaccttgacgcaccgggaagagccggaccgggcaacaccgggtgaaagaacggaac

SEQ ID NO: 16444 - DNA, 530 bp, Glycine max
  Clone ID: PAT_MRT3847_114856C.1
tttgaaatacaaaaaataccaagaggcccttaaaaataaggaatattattattattcgtcaaaggggttgtttttttgtgaagaacacagatgcagatgaagaagagcctttggattgcgttggttaccataatgcttgtgttgtcatcgcagctatgtttggtgcatagccgagttcttcgatcgaaggtggtgttaacagaggtagctgatgattgtgtagaattgaaagaatcaggttcttctctatggagggatcagttctttgttgtttcttctgaaaattcaagcactcgtgtttcaaaacgcagcttggcatttagactagcttctggacccagcaaaaaaggacctggacattaactaactactttaaattcagcacctattacattttttttctctttcgattttgatttctacaacagttttttttctccatgttatatgttctttttgtttttattttttagaagaaaaacttctcccccagacattgatctgatacgtgtatgtaatttgtattttgt

SEQ ID NO: 16445 - DNA, 226 bp, Glycine max
  unsure (1)..(226): unsure at all n locations
  Clone ID: PAT_MRT3847_114857C.1
tncgactcgatncangnacggttntcaccaccacaactgtgtnnaagatnntgcaggaanccttaggnccttccctacagagtatgatatctctttcacaagcgctggtgtcnctgggaggttggataggtacatgtctagcagggaattgatggattcggttgagagagaagaagggtgtggtggacacactgctgtggaggtcaaggatggaaccttcagctgg

SEQ ID NO: 16446 - DNA, 653 bp, Glycine max
  Clone ID: PAT_MRT3847_114858C.1
cggctgcgagaagacgacagaagggggatataatgaaagtgaagtgagttttacggggggagcgagaagcgagaagggagtgaggtttggagaagagagagatgggaaaggagaagaagaggtatcttctgaaaacggaaccgtcggagtggtcgtgggaggaccaggcagcaaacggaggcataagcaaatgggatggggtgaagaacaagcaggcccagaaatacctcaagtccatgtccatcaacgacctctgcttcttctaccactccggccccaaggcccgccgtatcgtcggcgttgtttccgtcgtccgcgagtggtacggcgatgctgtcgacgtcaaggctgtcggggagatgaggaggcccgtcgacttaaaggagatgaaacatttcaaggatttcgctctcttgaggcaacctaggctctctgttgtccctgttcccgatcacatttggaaccaaatctgtcatttgggaggtggctaccaaggcgaccatgcttcctaatgtaaatactttaactactcctttctgttctcttttccgttgaattaaatgtcttccttttacctttaccaataacctgcttatgcttgtatatttctcgttcatttctgaattctgagcgcaaccaaagaatcattttac

SEQ ID NO: 16447 - DNA, 399 bp, Glycine max
  Clone ID: PAT_MRT3847_114859C.1
cccgcgtccgctgctcaacaacccaatcgccatggcgtcgcaggagagtactcgaaaagctgctgtcacggcagaattaccggaatttacggcacaccgatctcttgagatccacttcaggccgatacaccttattgttgcctcgcgttgtggtggtatgtgatctggaacttcctctcactatggcgatgttcttgtcaattcttgttctgtagatctgatgattgttgtttctagtctgaaattttgttcgtttggacgaggaatcgaatctttaattttcactttcgctgtttatcattttcgagttatagaactcgcattaacgttgacttgcgtggactaacgaagtaatttgatattctgcttaaagaaaaaggagtttctgcgctctgttca

SEQ ID NO: 16448 - DNA, 2319 bp, Glycine max
  Clone ID: PAT_MRT3847_11485C.1
ctcgagccgaatcggctcgaggaagaaagaaaagtgtgaagatgaggataattttatggataatggcacaaccatcgggacaacgactgggagaaagcggggccagaagagaagaagggtgcttctttcagattcagattatgcatcttctggatcatctgattttgagtttaccatatctgaagaagagagagaacaggtgagagaagccaagagattgtgtggaaatttgagaaataacttgaggagttcatcccatccaataaataagaagaggttggagtccatgagtatcaacatccgcagcggaagcctccagctcggaagggtaaggaaaagatagaagaacctctgggaagaaagggtaaggaaaaggtggaggatttaaaaagtaagggaaagcaaacatgtggaatttgtctatctgaagaagataaaagaagagtaaggggagtactaaattgttgcactcacttcttttgttttgcttgcattatggagtgggcaaaggtggaatctcgctgccctttgtgtaaacagagattcaaaacaatcagcaagcctgcacggtcaacgacggggattgatttaagagaagtggtgatacaagttccagaacgtgaccaggtttatcagccctctgaagaagaactaaggagctatattgatccatatgaatatgttatttgttcagagtgtcatcaaggtggagatgatggcctcatgctactctgtgatatctgtgattcccctgcacacacatattgtgttggtttggggcgggaagttcctgaaggtaattggtattgtgatggatgtagaccagttgctttgggacttcaagaagtccaaagaagggaaggtgtggctgatccaagggtatctgtccagagccatcctgttagaccaccccctgttctacatgtacgagaaagtatagacctcaacttgatttcgtcaccccgtgctgcttttaatcaaggttttgggcatcttccatcttctagatttagtggcagaagtgctgaaggagcctctcctgtatctggaggggcaccaactttatcagagagacgctggatacaccgtcagattcaacaactactttcaatagataggatggcctctacacctggcagaaccaatggtatttctgctaccagttcaactagtaacttatatagctctcactttgatcaaagtaggggaaccaccactctgcatgcaaggacacaggatgtgggaacatcataccacacattttttgatgagagattatgcaacaattcctctccattaatgcagaatggggcattatggcctggacttatggggacaaccccagtaccagattgtgaactagctcatcagttcagtagatcaaacattgttcctgatagtggcttatcccctgctatcagagaagaaagtaactttcacattgcaaaggagcaattgcagtcaatggttaaaagccacttgaagaacttgtctcaaaatattgatttagttaagtatattctttcttcttgtggtcacagatattgtaatagttaccttttctctttgccttcatcatacggggagggacgtattgtggcgacatttgggactcaaaacacataaagtgggtccttccccaacctttagagacacggtacatgtctatgaaaccacaaggcccggatcattacaaaaattgaggacaggctttcttgtctgtgaagagaaccttcgtagaggtacctgtgcgttaatccttttctaatcaagccttggaataattttccaacatgatatctaatagggaaattgcatcatggttccattgaagtgttttttgctcattttactgcagtcataaaaaaaattcaaaatgccttttatcttttttattcaggccacaatactatcaaggatattgcaaggagttctatgcacaccatactagcagcttgtgatcttgagcacatgaagagtgaagtttgcactgtgcctcctccatctgcctgttcccatatggagctaatggctggtgggcaaacgagtctaattaaaggttgctgctcatcttgctttgattcctttgtaggagatgtggtgaagaggattttggacacaagaatttcgtcacagtggttacgattaggtctttaggcataaaatcattgttatgtgtccaaagacaccttttttgttagttcagaaagacaaggaacatttcatttacttgtttatacataccatatgaatatgatttcactacaactgaacagaaaggctgttgcttctaacattttatttgtttaattgatacag

SEQ ID NO: 16449 - DNA, 347 bp, Glycine max
  Clone ID: PAT_MRT3847_114860C.1
ttttctttttttttttttttcacaatttttatttagttcttttacttcatggggtgaacaaacgaatccgtgatttgcaaaacaaaaattcctattattcccgttttcctgatgcctaaatctgaataaggggtttattccgttccttgtaccaatttattttttttacgccatactttcacttaatctttccaataattaattttacaatttctccgactacttctctttttgtttggtttttttacttcgggccattttttttttgtggcttctttcattattacctcgtttccttaattttttttttttcttccctggaaattcagattctatgcttcccctct

SEQ ID NO: 16450 - DNA, 404 bp, Glycine max
  unsure (1)..(404): unsure at all n locations
  Clone ID: PAT_MRT3847_114861C.1
gggcgcccttgtgaggagaggactgggagggaacctgaaacgtgcaggagcggcgggagcgtcacccagtccacgtgagagggcgcaaagcgcagatgatgaaaaaagggcacagctcgatgaagacaatcatgcacaacccgccggagctgaggtgctaaaggctcctgctcaggcaggggagaaggttgacaggtctcactctgatgattgcagatctgatgaagaaaaggggaagagggacaccgatgatgattggtctgacgaaagtcaagagccacgaaagagaacgactgggaacaatccaactagaaagnagggatagcnccnaatactacagtgatgatgaaagtgaggaggaaccctncaaaactccttagaaaagagacagagacgctgagatg

SEQ ID NO: 16451 - DNA, 258 bp, Glycine max
  Clone ID: PAT_MRT3847_114862C.1
gttaaatatttctcaagagtgaagcacaatttaacttgcattatcttgatatcctcccttttttttcaaaaaatgtccttctccctctaaaaaattattagatggttcatattattatgttcttaactaatctctatatgataagtaattaattgttattaactttttttgtaaattaaaatctttaactgttttttgttagcgctaaaaatggttgacgatcaaaatagccattttaaaatggctgacatgtgccca

SEQ ID NO: 16452 - DNA, 570 bp, Glycine max
  Clone ID: PAT_MRT3847_114863C.1
gaccacgcgtccgcccacgcgtccgggtgagtgaggtttttgtacggctgcgagaagacgacagaaggggataactgaggaggaaaaaagaccagcggttgacgatgaaacagaagtgtcttgttgttctggtctttgttgttctcttggcttgtgcggttggttgggatgagggtatacccggcggatggaaccccatcaagaacattaacgatcctcacgtgacggagatcgcgaatttcgccgtgacggaatacgataagcaatccggtgagaagctaaagttggtgaaggttatcaaaggcgaccttcaggtagtagcaggcctcaactaccgcctcagcctcaccgccagcgactccaacaattaccaagcaattgtctatgagaaggcgtgggcccgggagcattacagaaaccttacctcctttacccctcttcatgcttaacctcttttgtcttatcttctctactgtattattttaaccaataaaaaggttaagtgaatgagaatggcctctttatcttaatttatttttattaattatgcgtgtaccaatagtaggcaga

SEQ ID NO: 16453 - DNA, 223 bp, Glycine max
  Clone ID: PAT_MRT3847_114864C.1
cacgcgtaccttctctctgttttatttctgttgattgtctattattattaccatggattttctttattattagctgcatattcattatagtgggcctctcttatgctttttctaacgctgatgatgatttctactgctgaaattcgcgctgaagattggatcttcttgacggaccagagctctaagaccattaggttatcagaactgtgagctttaccacttt

SEQ ID NO: 16454 - DNA, 511 bp, Glycine max
  Clone ID: PAT_MRT3847_114865C.1
cattgcatctcaaggatgccagttgctgcaatggatatgaagagggccatgaacacaatactggcatagttgctaatctgcatttgagacagaaatttggatgttagtaacctaacaagtctatgcctatcgcttttattatttgaagtaaaatccaactgtttaaaattacaggaacacaaatgacgcagtaatatgcaatgccaataacctccaaaatagtttcaagatggcaaggtcacagatacgagtatttagatgctccaaaatcattttcattctagttttcccacatgtagcattatgaatttagcttctgtatggtgagtgcacatcaaaagggaaaatccagctttataaccattgattataaaatcaaaggcttagattataaaatctactctactctagattttccaacaacccctcgctattccctctaaagttcacctacacttcagaggagctagatcctagccttaatctcaacaatccaaatactacattttcg

SEQ ID NO: 16455 - DNA, 1126 bp, Glycine max
  Clone ID: PAT_MRT3847_114866C.1
gacagaccattctttcaaaccgatttagtggaccaagggcatagtaagtcttcttcgattattgaagcgtataaacggtccaagtcggatgctcccgtgatatctatattgggtgccaaggtagaagttggtagaagagaatatattcctcaaactttatctttgccaaatggcaaggcaattgagcctgcaatggatcttccattgtcaggagcaggtagcattttaggaatgggccctacactaccctacaatcattcaactgcttttgggtataacagactgacatcagtgcctgctttgtctttttcatcagccatgtatggatcatctggtggcccaattccatacatggtagactcaagaggaactcctgttgtgcctcaggttgagggatcttcctcaactgtcctgtcatcttattctcaacctccatttatcgtgagcatgaccggtacacaacttggtttaaatggggttggatcttcacgtcccaactttgatttgaactctggcttcacaattgatggagggaacagagacatgttgactgcaagacaatttttctttcctgctcaaggcagagccatggaggagcacgtgagaacccttccacaatcctcaagttccggagttagtgtgaaaagaaaggaaccagatggtggctgggatagggatacctatgcatttagctacaaacatcagcaacctccatagaagtagctctaatttatgcttttgcctctcatctgatctgtttataattctgctccgctcccaattgatgcttatattattacttaagttgatcctgaagagtatcccaatctattggaatcctttagcaagagaagaaccagcccaataaaaggcggaggaagatggatgtaatatgatttatgagagtgattggcgaagggggaattagtgtttttcttctttgtttttcctttcctgcagtttcatagaaagtcagtacaagcccacaaggcttggtacacgtagctgtaacttttctttcatattcaaagaaattataggcatagtatggtgtttctccctgagtgggacttgagtacatggtcccaaattttagttgattttagtgagttttgattttccaggg

SEQ ID NO: 16456 - DNA, 563 bp, Glycine max
  unsure (1)..(563): unsure at all n locations
  Clone ID: PAT_MRT3847_114867C.1
ttcagacatggtcttcctcttctctcatttccacatcacccttcctttgtttcncatcatttcgtgataacaacaacaccctctcgcctccaacacacacctcttttttttctttttcttttaaggttgttaactgcttcccttttccgaggtttatttaaggttgtcggtctcgacctgttccagatttcggattttgtcgcattgcgatctggtttttgttctgtttgatccacttcttcggctttgcttcatctccttctctgggtcttctaaatttttgtttttttatttgtttgaattttcaagttcggttttttaaacctgctggaaattctgaacggcttttgcttttaaaaaatattaaatttttttgtggtccaaattttcatggtcagggatcaggaagagatatattattaacaaacaaaaaaaaaacaaaaaaactaggagtggtgaattcccgtcatgtttttctttgggccctgcttttctggaagttgtggaaaccggcgcttgtgtctatttaaatttcattgggatattttgctgttgtatttttt

SEQ ID NO: 16457 - DNA, 584 bp, Glycine max
  Clone ID: PAT_MRT3847_114868C.1
cgacctcgacacagacgctgccttcacatctaacaacggatccaacggttgataatcctgttcagcttcaggtggtggtttttcagttgcagcagctggagctggaggaggaggaggttcagcgttttctttctctttttccttcatttcttcttctttaggtttctcaccttctggtggttgtggtggcggtgtttcttccactttctccggttcagtaatctctgcttccttctgcggtggtggtgggggcggcggtgcttcctctattttaagaaccttctcctcgtcgacgtagtagattttcaaaccgatttcaccttggatcatgctgagaaggtacttcttctccaggacgtagtacaccaaagcctcctcgcctttgttgacgaactgggcggagctgaggcggattcggccgagggagttgtgtctgcgggtggagccgtaagacttgtcgtggtaacgtcgagctcgagcgtgtcgccgaagatttgagacgactgggagttaacattgtctacattaaacgacagcgtttctttccagaccgggttcaagtcacggaaccgcggtccgcgtct

SEQ ID NO: 16458 - DNA, 594 bp, Glycine max
  Clone ID: PAT_MRT3847_114869C.1
acggctgcgagaagacgacagaaggggggtctcgtgcaagtgtaacccaaaaccctagcggcgcctgctttcttcgttcgtcttttgcatcagccatcaggtgcgaactcaccctatggatttctatccaccgctggctgatccttcttctctaactctaatttattattttcaggatggagtctcaggtgaagcatgctcttgttgtcaaagttatgggtcgtactggatccagaggacaggtgactcaggttagagtgaagtttttggatgatcagaaccgtcatatcatgaggaatgttaaaggaccagtgagagaaggagacattctcaccctactcgagtctgaaagggaagcaagaaggttgcgctagagggtatttttttcttgatctttatggtagttagttggtgctaaaggttatagcaccctgtcttgttgtcttggatctattttcattcaaattatgggttgaattttggatgtttggagtttaatatatgattttgaattatggcttaaattttggattaatatatttgtcttctacatagtgatattcctgcttctcaccaatcacttactatcaatca

SEQ ID NO: 16459 - DNA, 453 bp, Glycine max
  Clone ID: PAT_MRT3847_11486C.1
tcctctccatcccaatttattctaaaaaaactagggaggacgtttaggctatccgcaacagtagtattgatcagagaaaataagaaatagaatggtgcgtgttaaacacatgttgttagtagaatcttgaataggaatcaagtgcttatatcattaataaaaaaataagtaagaaaacataacgatgtatggttatgggcatactttgtttaaatttatttgttgatttttattttattttaatataataattaactttttattttttaatgtgtttatctaaattactgttgcttaaataatagtttttttttacttgttttaagaaataaaaaataaattatatctggttattaaaaacttattttttaaaaagtgtttattttaaaaaaaaattgattctatttgtaagacttatttaataaaatttgtagagttgttagatggaaaaag

SEQ ID NO: 16460 - DNA, 1339 bp, Glycine max
  Clone ID: PAT_MRT3847_114870C.1
ctgcgagaagacgacagaagggggcaccaacaacatgttgatgattcaaaacagaaaaaaaatgaggttttttacagtgaaagtagctctgtgctgtgtggtggttatgctactaaccctctcagatgcacagctagataactctttttacaaggacacgtgtccaagagtgcattctattgtgcgtgaagttgtcagaaatgtttccaaatctgatccccgcattcttgccagtctcataaggctccactttcatgattgtttcgttcaagggtgtgatgcatcaattctgttgaacgacacagctacgatcgtgagcgagcaaagtgcaccaccaaataacaactcaataagaggtttggatgttgtgaaccagatcaaaaccgcggtggaaaatgcttgcccaggcatagtttcttgcgctgatatccttgctcttgcagctgagatatcttctgttctggctcatggccctgactggaaagttccactaggaagaagagatagtttaaattcaagtttttctcttgctcttcaaaatcttccgggtttcaatttcacccttgatcaactcaaatctacatttgatagacaaggcctcaatacgactgatctagttgctttgtcaggtgctcatacaattggtagatctcaatgtagattttttgctcaccgaatatacaatttcagtggcaatggcaacagtgacccaactctcaacactaccctctcacaagcactacgagcaatatgtcccaatggtggacctggaaccaatctcaccaatttggacttaactactcctgatagatttgactccaactactactcaaatcttcaacttcaaaatggcttgcttcggagtgatcaagtgttattttctacaagtggtgcagagaccattgccattgtcaatagtttcggtagtaatcaaactcttttctatgaacattttaaggtgtcaatgataaaaatgagcatcattgaagtgctaacggggtcacaaggagaaattcgaaaacattgtaactttgtcaatggggattcttctaatctggctactctagccaccaaaaaatcttcagaggatggtatggtgagctcaatctagatgagttaacaaaagatatcctaatgcaaaaatgaaaggtcattaataaaggggttatataggaagatacatgttgtgtgctaatggtgaatcataatatcgtttgtaccttgtattagctacggataacaactacttattttgtaatatattattattagaattaagttgtttggtgttgatgggtaaaaaaaagaagggcggccaccgatgaaatatagttaaaaa

SEQ ID NO: 16461 - DNA, 280 bp, Glycine max
  Clone ID: PAT_MRT3847_114871C.1
tggacacagggggaagaaagcgaacgaccaagatttcatcgttgctccaaaaaaggaaggatggcaacgccaagcgtgcgcattgaagactctgggtatgaacactgggtagggcgcccgatctgcgggggggaaatgcacaagtacgcggctagctgaggaagcacacggcagtctctggttgatgagaccatgcttaggagagcgcgcaggcgcacacaaatgaatacattcatggcgaacaatatagaacagactgcacaacagttaaccaacaagc

SEQ ID NO: 16462 - DNA, 795 bp, Glycine max
  unsure (1)..(795): unsure at all n locations
  Clone ID: PAT_MRT3847_114872C.1
ggtccggaattcccgcntcgacccacgcgtccggctaatggctactaccacattctgtacatacctattccttctctctgtgtacctttcaatcttcattaatcttagttcatcttcttcagaaggtaatattcttctctccttcaaggcctccattgaagattctaagagggccttgtctagctggtccaacacttcctcaaaccaccactgtaactggactggaatcacttgctccaccacaccttcactttcagtaacttctatcaaccttcaaagcttaaacctttctggagatatctcatcttcaatatgtgaccttccaaatctgtcttatcttaaccttgctgataacatcttcaaccaacccatccctcttcatctctctcagtgcagttccttggagactttgaatctcagtaccaacctcatatggggcactatcccgtctcagatttctcagtttggttcattgagagtgcttgatttgagcagaaaccacatagagggaaacattcctgaaagcataggctccttgaagaacctccaagttctcaacttgggaagcaacttgctttcaggtagtgtacctgctgtctttggaaatctaactaaacttgaagtccttgatttgtctcagaatccttacttggtgagtgagattcctgaggacattggtgagcttggaaatctaaagcaacttctgttgcaaagctcttcttttcaaggtggaattccagattctctggtgggcattgtcagcttgacccatttggatctctctgagaacaccta

SEQ ID NO: 16463 - DNA, 190 bp, Glycine max
  Clone ID: PAT_MRT3847_114873C.1
cttcggtaaaaaaattaaaaccggggcggcttattctgaccgatttgaatgttggcctttgttcccccccttattgttggaggtattcgaacctgaaccggggttgcaaatttaaaaggccttttttaaacattggaaggtagggtcctcttttttgcccgttgccacgggccgaaaccacaactttttg

SEQ ID NO: 16464 - DNA, 340 bp, Glycine max
  unsure (1)..(340): unsure at all n locations
  Clone ID: PAT_MRT3847_114874C.1
gggggggggggggggagggcaancnnagnngggagaggcagaaagccnncacacannnaaanaaanancnaaanaanacaagaacggananccagggaacacanancgcngnagnnnnnnncannnnaanaaagnnnagangcaaaacananccannngagggggagggangngncacgaggacggnnnnaaccnncaacgncanccnaaacngannaaaggcangaggaggnangcnacggacaacaacnncgagaaaangcnnaagggnagaaaagggannnagnagaaanccnnnaggggngangangcngnnagagcaggggacaagcnnaacgga

SEQ ID NO: 16465 - DNA, 383 bp, Glycine max
  Clone ID: PAT_MRT3847_114875C.1
gtccacgtcatctcagggcttccggctggcagcagcaccgggcgcctagatgtggttgacgacgactgactcgtcatactcttcaccataaagcagggcgaccacatgctaatgaactaccagtcagtcacactactgctcgggctaaagtgcgacggcaagaccggtacccgggttgtggaatgcgctcctaccggaccttcacgaagggaacaccgactgagacacgcgtctagctgctgatactgcagcgaagctgaatgtgcataggctggcgtatgtcagcgtacgaatgctctgagaacgtgactgtgacagtgacggcataggttatagatcatattatgcacgacccatacccgaagacgaaaaagaaaaggttc

SEQ ID NO: 16466 - DNA, 1528 bp, Glycine max
  Clone ID: PAT_MRT3847_114876C.1
acttttctctatatccgaccacctccccttgcacctcgtacccaatcacttccacaaccaagaccaatgcaagcagtggagggatcgatggtcatggagtataggagtcaccatattttttacagtagtcaccaattaaaaaatgccaaaacataattgtagacattaagcatgccacaattgttgagtgtcaagttaagcaaaagcaaggattaataatggtgtttgtataattttgttttacttgtttgtctcctgaaagtaccatacaatcttcgaagatgatcgggaaggacgagttcgtctcttactcgccccttccctccaaccccaaccctaaccctaaccctaaccccaaccccaaccccaacccttattccaatcctaatccttattacgaccctaaccctcatccttacccccaaaacgtcgtcgttttgctcccctcctaccgcctccgttcccagcgccgtcgccgccgctgcatcctctactccgccgcgctcttcctcttcctcctcatcgccggcgccgctttcctcctctacccctccgacccggagatccgccttacccggatccgactcaaccgcatcgggatccgaaccaacccgaggcccattctcgacctctccttctccatcaccgttaaagtccacaacagagacttcttctccctcacctatgacaccctcgccgtctccgtcggctaccgcggccgccagctcggcttcgtcaccggcggcggcggcggccgcatcagggcgcgtggctcctcctacgtcgacgccacgctcaccattgacggatttgaggttatctacgacgcgttctacctgctcgaagatatcgctaagggcgtcattccattcgatactgacacccgagttgaagggaaattagggcttttcttcttcactgttcctttgaaggcaacagtgtcgtgcgaagtgtatgtgaatataaaccagcagacaattgtacgtcaagactgctatcctaagtcactgggtgatccgctggatcagagcgcatatattgaagctggagatacatgatgtggtatcaaccttttgcatccttctcctatacagcgctgctgctggtgttttcattacattacttttagcgtgctgtataattgtatatggatcacacatccttgtaaattatggttgactacagaccacttgcattttgtgatttaacgctcggacgaggtaaattcaatgcaaatggtacctgggagttactcagttttatagtcgctagctggtccgctggatgagagcgcatatatcgaagctggagatacatgatgtggtatcaaccttttgtatactttgtctatacagcgctgctgctggtgttacatcacattgagcgtgctggaaaattgtatatgggtcacacacccttgtaaattatggcttactaccagccactggcattcggattaaacgcttgatgacggaaattcaattcaaattggacccttgagtctgttctgtacttgcgtaggaagcta

SEQ ID NO: 16467 - DNA, 202 bp, Glycine max
  Clone ID: PAT_MRT3847_114877C.1
cccaaccctacggaaactcttattcttcatcgcaacggcctgacatatcatggccgctcaccccaccaccaaattatactgatgcaaacaaggcacaatctccatgtccctaaccccacccccctacgaaccttcaaaacttcaaatttcaccccataaaagcatccatcagtgtcacaggaaacgacgctccatatacatg

SEQ ID NO: 16468 - DNA, 509 bp, Glycine max
  Clone ID: PAT_MRT3847_114878C.1
acgtgtttgtcccctgaaaggacatacaatcttcgaagatgaccgggaaggacgagttcgtctcttactcgcccctttcctccaaccccaaccctaaccctaaccctaacccttattccaatcctaatccttattacgaccctaaccctcatccttacccccaaaacgtcgtcgttttgctcccctcctaccgcctccgttcctaccgccgtcgccgccgctgcatcctctactccgccgcgctcttcctcttcctcctcatcgccggcgccgctttcctcctctacccctccgacccggagatccgcctcacccggatccgactcaaccgcatcgggatccgaaccaacccgaggcccattctcgacctctccttctccatcaccgttaaagtccacaacagagacttcttctccctcacctatgacaccctcgccgtctccgtcggctatcgcggccgccagcttggcttcgtcaccggcggcggcggcggccgcatcagggcgcgt

SEQ ID NO: 16469 - DNA, 482 bp, Glycine max
  unsure (1)..(482): unsure at all n locations
  Clone ID: PAT_MRT3847_114879C.1
acgcgtccgcccacgcgttcgattttttcaaactccctcccatcaatggttgaagttaaagaaggtgtaaattaaaaagagaaaaaaagtgactgattgcgtatatgcatgggaaacagtgtctagcagagtagagttaagaattgaaatttgaaaggattgaatggtgaaatgaagaggtagtgagagacaagaaaagaaaagaatgagtgaagaaggtcctccaaagctatataccgacaagccccgaaaagcgcgattgaagcagtttcgggggcaacagaaatcaaacgcgttctcctcgccggcggcgatggggacacacgccgttactccgccgncaccttcgtcaccgtcaaaggaaccctttattcggcgctacaaattcgtttggcctatgcttttggctgtgaatcttggtgtcgcagcttatttgttacgaggacaaagaagaagggtactggtgaggaggagcaagatgt

SEQ ID NO: 16470 - DNA, 462 bp, Glycine max
  Clone ID: PAT_MRT3847_11487C.1
attcttagggcacaaagcttttttttaccaatcaaggcaacaagggctgaattttattggatcgtgggagataggccactatgccacttacaataccccatctcgtatttaagtcctttgcgcaggatactacccaccgatcgatgggaattgcgcttaaaggtgttttgtaagggtaattctcctcccaaggctcaccatctgcacgttcctttggggggccgacgcctcttactgctgctgggaaaacggaccgctggcacactgcgatgcttaccaactgtaatccgacttataggcgtgcactcatgatcaaacgcacggtagctaacggccattggcttgtgaaataagcgcgattactaagagtgcgaattaacctatgctctggtactaagtttcatatctattcgcatactgacaccagtaggtatagactgacctatgtcactacggtctaaa

SEQ ID NO: 16471 - DNA, 779 bp, Glycine max
  unsure (1)..(779): unsure at all n locations
  Clone ID: PAT_MRT3847_114880C.1
ccacgcgtccgaaaaacattctcaagttgaattgaagaacacttttttttgttcccatgcatttgcaaggattgtcgtgtctagttatgaatatactttttgttacttggataagcttaaaaaaacaaggcactctcttgacatttttttaaatgtttcataaattactttttctattgcatgagaaaaacattaaaacagttttattttgtcataagcttgtctaactattataattttcaaaacatattttattattaaaaataggattaattatgtatttagtccctgaacttttttagaattctgtttttagttcctgaacaaaagtttgacctgtcaaagtttctaatttttccttctggtgccaattttgttccttgacgttaattttcaccattaaatgatgatgtgacattaatgtttttaatatttttttacgttttgtggaggctcattttttggcagttctaaaccgccagataatgcttcataatagtctttaatgaatagaaaccattttttggcagtttaaatactgccaaaagttgcttctctcttcttagcaagtgagagccacttccacttccataaccttcaaattgcgaatcacaacaccaatgatcaacaaattctaattcatgcacacattaaaaatttttccaatttgtttaggataaaagagaaggggaaagttagntaaagatggttagactattaatgagttaggttagttagtaagttagaggggttgatttgatatttttaagagaagaagg

SEQ ID NO: 16472 - DNA, 458 bp, Glycine max
  Clone ID: PAT_MRT3847_114881C.1
ccacccgggccgctttgggggcaatcaccaatcctggacctgtaggagccggcccaagggcacccttgaggcatgactcttttattacctttgtcagattggatgggaataacggagctagcagatcgaatacaatggggagactgctggaataatcatgacaatgtcgcatgattgtgatggtcactactttatggcaaagacgctaatacctgcagttttgaaagatcagatgccttggaacacgatccaccatctaaggcgaaagggctgtggactttccgtgggcaagacagacattacttatccaaagtacaaagctgtcgcccgcagctcgtacttatatctcatcaagtcttttcttgccaacctcaacgaggtctagagaatccagccattcagcatgctgacttattgctgccactggaattgtgcaaatcagacgggcttatattgag

SEQ ID NO: 16473 - DNA, 206 bp, Glycine max
  Clone ID: PAT_MRT3847_114882C.1
catattgttctggtgtattgtagttgtaaatcatggcccttaatataccttttgtatatttaaaaggcccagtaggggattcaacaactacctaatgcaccagtgacacaatttaccatttacattctaattcaaaccacaatgggattttaaactctatgtttgacctttgggggcagaatcctggcctagtcttcaatatacgg

SEQ ID NO: 16474 - DNA, 190 bp, Glycine max
  unsure (1)..(190): unsure at all n locations
  Clone ID: PAT_MRT3847_114883C.1
tacggctgcgagaagacgacagaaggggacggctgcataacaacgacttgagggtcatgtgtgcganaacactacacacagctactggatgctagaagacgatgttacgggtacgagttcgcgacaagacgacagattggtacggctgctaaaagaccacagatgggttcggctgtgacaagacaacaaa

SEQ ID NO: 16475 - DNA, 142 bp, Glycine max
  Clone ID: PAT_MRT3847_114884C.1
cgtcactactgagattgtaatgtaactaggatcttactactactgtggcgccgcgaatgatgagtgtgtttgtaccgcctagcgagacatagagagagattggtgtactagatcacatcatcaattaaggggatggatgatt

SEQ ID NO: 16476 - DNA, 458 bp, Glycine max
  Clone ID: PAT_MRT3847_114885C.1
acggctgcgagaagacgacagaagggaggtagcaaggctattctatcgttatactatattaggctgtacacctcatggcctcaattattttttttaacaatgtacttatttatttgtattttacttaaatatttaattaatttataattatacttcaactcttttaattaaaaaaatcaattgaaaaagagtcaaagactaatttgttataatagacaatgctataagcaaatttctttaagatatccgctccccacaaaagagggtcaacaatggcgggtaccgttagggacgttacggaagtttaatacggactttgcccaacgataccacccttcttttcggcgataattcagcatttttaaaattttttatatggagagcctcattcttaaatttgatattttatgtaattttgaattatgtcacaattaatatatctattattctaacacata

SEQ ID NO: 16477 - DNA, 375 bp, Glycine max
  Clone ID: PAT_MRT3847_114886C.1
gattggaaccccattttaggggaaagggtaaaaaataatttgattaaaaaatttggtatttgaagcctttattcactttgcctctatacttttcagcattaggatcaaaatttttgggatttttacatataaagggttttgacattggttttaaaatatgggggcggcctttaccatgggtcaggaaaactgattttggtgaaatggttgccaataaaaccatgggaagacctaagggaaaatttttttttctaaattattgggcttaatggggggtttatcaaaaccaaggggtggaaattggtttggtacgcctcaacataaagggggagttttgctatttccgattgaaaggttgaaaatgactcaattggg

SEQ ID NO: 16478 - DNA, 393 bp, Glycine max
  unsure (1)..(393): unsure at all n locations
  Clone ID: PAT_MRT3847_114887C.1
cccacgcttgcttacngataaaacaacacaacttaatttattcatccaacatcacacacatctggtacgtttactttcttacaatcaaaaccaacaacaactactacaacttatcacaaacactaccattatcaaagacacacagcttactaatattgcaacgatcagaagcaaaccgactaatacatctaccttctccatgctactattgtcacctatgtacacaccaaaactactgctttagcttacagacataacattcataaccaacattataccaccaatgcctactccattaacactgantaacaccattctacttgctgctacgaatgtcacactaataaacatcatataactacttgtgcccttaatgataacaccaataaacat

SEQ ID NO: 16479 - DNA, 193 bp, Glycine max
  Clone ID: PAT_MRT3847_114888C.1
cacagatgcagactgggcaggatctattactgatcagaaatcaacatccggttactgcacatttgtttggggaaacttggttacttgaatgaacaaataacaagatgtcgtggccatgagcagtgtctatgctgagtacagggcaatggcgcatagtgtttgtgagatcttatgtcttaggaggattctagaa

SEQ ID NO: 16480 - DNA, 815 bp, Glycine max
  Clone ID: PAT_MRT3847_114889C.1
cccattttctctcattcatctccatctcaaagggccaaaacaaaaactgtcttatataaagagaggtatttcattgtattattgttgtgattagtgataatgcaaaacgggattaaccggcaactatccctgaaggagaaactgaaatcttcgctatgctgtttctccggatccgttcacagcgacccattagagcgcggagaaggagggttctacagcaagctacgcataccaaaaacaccgatttctccacaggggtccacgtcatcaccgtcgtggttcaagataaggtcaccgacgtgcaccgagtacggcggtgacccgcatccacgtgtcagggggcggagcctgaagtcgaggatgggccgcaagctcctccaccaccgccaatcccagtccgctgacttcagctacgacccttcgagctacgcgctcaatttcgaggacgacagccccgaggagattccgttcaggaacttcagctcgcggttgccgccgtcgcctccgtcgtcaacgccgccggtggagtactccaccgggaaggagattgttgggtatagttgatttgatgtggtggcggtttaattagttggtttgggtttggcgggtgccacacggggattcaacgaactaacggagttaacgttggaacagaaacgaagaatgaatggtttttttggtatgtggtgaactgtgaatgttcatgatgtccccttgtatacaagttgattttttttttatttacttttttaggacgacttgtgacatcacaacataaatttagttatatattgaatttaatcactttcctttaa

SEQ ID NO: 16481 - DNA, 368 bp, Glycine max
  Clone ID: PAT_MRT3847_11488C.1
agttgagacgaagccgcctaagggggggctttctccaatccacgcactagaatgggggcagtggtttgctcaacacgaatgtgacaagttcaccggttaggactggctccattgctgtgaacgtacaagcagcggatacatatatgatgaggcattggacaacactccaaatgaatatcctaacatcgcaagacacgactaatctgtacgccctaaacgttcaaccgctcactgacacactatgtgcagcctttcccgaatagctgaatatgcaaactagcagtgttacttactgaaaaaccaaaacactttgatgctcatgtgttgactaagaggccagcgaaacagcatggataaccttatcgggt

SEQ ID NO: 16482 - DNA, 668 bp, Glycine max
  Clone ID: PAT_MRT3847_114890C.1
ctgggttttttgttttttttttttttttttttttttgggtttttttttttttttttttttttttttttttttttttttttttttttttttttttttttggaaccccccaaaaagaaagggggcttttaataaaccaaagcaacacaacccaacaaaggcctgaaaccgggggggcttaaaaaaaatgtaatcgggggttcccccaaacacaacacattaaaacacaaataaataaaagcaattttgcccccggcgatcaaaaacccagttttgggaacaacagttgcaaaatgaggggggaaacttaaaactttggccaaaaaacaagctacctaaaaaagaaaacccaagagtccaaaaaaaaaaccaacatttattggaaccaaaatcccctgataaaccaccccgcacaattaaattttttttttgggcagccttggggaccttggctccggggggatcctttttttaaacgtttttgatgacccccacagcaacagtttgacccatgtccctaacagcaaacctaccaagggggggatactcggaaaaagtttcaacaaccatgggtttgggtggaattattttaacaaaaccagcattaccgtgttttaaaaaacttgggctccttttaaagctttttgccggatcgcctggaaattttgggc

SEQ ID NO: 16483 - DNA, 838 bp, Glycine max
  Clone ID: PAT_MRT3847_114891C.1
gccactccacaccacaccactttctctctctttctatcaccagcttctccctcctcatgaagaagctctaccataaagggacggttcacccgtcgccacccctcatctccgaccaactctccttcctcccggcggccatcctcaccctcgcggcggcgctctcacccgaggacagagaagtcctctcctacctcatctcctgctcctcctccgccacctccacctccaccttctccggcaacgcgcggcggaaaaccggcgcggaaaccgaacattccccttcgttcagctgcagttgcttctgctgctacacgagttactgggttaggtgggatgagtcaccgaatcaccagctcatacacgagatcatcgacgcctacgaggattcgctttcgaaaaagggcaacaagggtaagaagaacggtaagggaaagaaagagaagaggaacaacaagaaagggtgtagtagcactactactagtagtaatcacacgcacgagcacgcgcattcgagcgagttgaagcgctccgagttagcgagttcgccgagtcgcgaatcggccgagtcggaaccggtggtggagattcacactaatattagtggcgatgaaagttgtgaaggggttgtggttgaagagaaagggtcggtgagaaggttcatgagtttcgttggtgaaaggatttgggcgcgtggggacagtgagccaatgaatgatggatgattccccagagaaaaaatatgaaagaagaaatttagatatggagagaaaaagaagaggaaggtacgtttagattttaagattacacccctctcctaatttcctttttcccttttttt

SEQ ID NO: 16484 - DNA, 1062 bp, Glycine max
  Clone ID: PAT_MRT3847_114892C.1
aagagtaaccaacgcaccacaactctttctctctctatctatcaccattttctccctaatgaagaagctctaccataaagggacggttcacccgtcgccaccactcatctccgaccaactctccttactcccggcggccatcctcacctctcgcggcggcgctctcaccggaggacagagaagtcctctcctacctcatctcctgctcctcctccaccttctccggctactcgcgaaggaaaaccgccgccgaaaccgaccattccccttcgttcagctgcagctgcttctgctgctacacgggttactgggtcaggtgggacgaatctccgaatcgccagctcatacacgagatcatcgacgcgtacgaggattcgcttgcgcaaaagggaaacaagagtaagaagaacggtaaaggaaagaaagagaagaggaacaacaagaaagggtgtagcactactactagtactaatcacacgcacgagcacgcgcattcgagcgagttgaaacgctccgagttagagagctcgccgagtcgcgactcggccgagtcggaaccggtggtggagattcacactaataatattagtggcggtgaaagttgtgaaggggttgtggttgaagagaaagggtcggtgagaaggttcatgagtttcgttggtgaaaggatttggggcgcgtggggacagtgagtcaatgaatggatgaatttccaatgaaagaagataattagataatgaagagaaaaaaagaagaggaaaggtaggtttagattttgagatttacaccacctctcttactttgtttttttcctttttaattttggcttttgtacattaatcactactactaccctgcaatatttaaaaagaaatggctgtttcgttttgtaatatatgatctctcaatcaagtcatacatatcaaattatcaatctccttgtttcaatttttctattttcaatttctggcgaagcggtcgctggtgtttcataggtctcatgaacacaattttttaattgaatagttgtgaagagaattactatttcctcctcacgaaggg

SEQ ID NO: 16485 - DNA, 437 bp, Glycine max
  Clone ID: PAT_MRT3847_114893C.1
acccgcgtttgtttatagtcgctcagaatttcctaaaactggagggttttattaatatttcgattccgctatcagcattataaacttcctcttccaagaccaattggtataagctttaccaacatcgaggtgaacttagctcgcagaccgcactgcccagagggatatgacctttttaccagattctcaatgagcataatggatattaaagatgcggaatttaatgataggctcaagcccattcctcctaaagctttagaccaagatgagactgagtcccttgatacttatgaaacaccaagatgggaatactcaacgacaagtggcctatgaggaaaccctccaaatccgtatctttcaaacagcggtggaagcacaatccaacatcgtcgcatgaagtaaatgaaaacacctcactttcctgtcttccaggaaca

SEQ ID NO: 16486 - DNA, 169 bp, Glycine max
  unsure (1)..(169): unsure at all n locations
  Clone ID: PAT_MRT3847_114894C.1
acaaaaatcanaggttttgttaaaaacgtctttattatctttttcttcgggaagaggaaaacgcatcattgtggtctgggtacttggtgaccaagccctcaccaacttttagatgcgcaaatgtgtttttaaggggcaaacctcacttttagtatgtgccctaaacatg

SEQ ID NO: 16487 - DNA, 1657 bp, Glycine max
  unsure (1)..(1657): unsure at all n locations
  Clone ID: PAT_MRT3847_114895C.1
ccactctattctggcaaaatataaggggtcacacgcgaaatgcacatcgcaacattcacactctgcggagttcccaaaatcgcccttaatcttaacaacattcacactcaccggagctcccaaagcactaatctaacaaacgcaatttaaaaaccgcaacaaactttctctcttgcgttcacacttattctctggcttcttcttccattttcgcttctcgtagcgttttcggaacagttatggcttccattgccggatccaactgcgtcgctctccgaaccgccaacttcggcgcctccggtaaccggaaaatcggccagatccgccaatggtctccgattctcacgaatctccgtcccgtttccggtcttcgtcaccgatcgaatactccgtttagctcctccggtgtgagagcacaggttgctactctggaggaagcaggaaccggagcaactcaaaaagtggaagcgccggttgcagtggtgaccggagcttccagaggcattggaaaagcgattgcactgtcattaggtaaagcaggttgcaaggttctggtcaactatgcaaggtcatccaaggaagctgaggaggtttccaaggagattgaggagtttggtgggcaagctcttacatttggtggagatgtttctaacgaggatgatgtggagtctatgattaaaactgcagttgatgcttggggaacagttgatgtattaataaacaatgcaggaataacaagagatggtttattaatgagaatgaagaaatctcaatggcaggatgttattgatctaaatctcactggtgtttttctttgcacacaggctgctgctaagattatgatgaagaaaaagaagggaaggatcgtcaatattgcatcagttgttggtttggttggcaatgttggacaagccaattatagtgctgcaaaagcaggagtaattggcctgacaaaaactgttgcgaaggaatatgctagtagaaacatcactgttaatgcagttgctccagggtttattgcatctgacatgactgccaagctaggacaagacattgagaaaaagattttggagacaatcccattaggaagatatggccagccagaggaagttgctggactggttgaattcttggctcttaatcaagctgccagttacatcactgggcaggttttcaccattgatggaggtatggtgatgtaaattagcaatccttttaccttgcaacatgagcttttgcacttttaaactacttctgtacggtgatagtttgttctttgctgagttttgtttaagctagttttaccctgtgatttatcgtagaatattagttgaaatgcaattcagtcacttttggcactagctctgaattgcttactgatgaaatgcaatgtgtccagcatcttgtaccattttggtttttatggtcatgtcagcagaataggcataattcttatatgcaattcagtcacttttggcactagcttttccttggatgttctttcagggaactgtctcatttaagcaagcattattatgtttattttctggtttcccgaaaaggggtatgcttttaggcttcctatccgaattactattttccatttccatttgcaatcgtgcacaattgtacccatgatttttcctcattcaagnng

SEQ ID NO: 16488 - DNA, 736 bp, Glycine max
  Clone ID: PAT_MRT3847_114896C.1
aaagaaagggaagaattgtcaatattgcatcagttgttggtttggttggcaatgttggacaagccaattatagtgctgcgaaagcaggagtaattggcctgacaaaaactgttgcaaaggaatatgctagcagaaacatcactgttaatgcagttgctccagggtttattgcatccgacatgactgccaagctaggacaagacattgagaaaaagattttggagacgatcccattaggaagatatggccaaccagaagaagttgccggactggttgaattcttggctcttaatcaagctgccagttacatcactgggcaggttttcaccattgatggaggtatggtgatgtaaatcagcaacctgtttacctggcaacatgaacttttgcacttttgaactactcttgtactatgatagtttgttctttgctgagttttgcttaaagatagttttaccatgtgatttatcgtagaatctcagttgagcttactgatgaaatgcaaggtgtcccgcttcttgtagcattttggtattcatggtcatgttagcagaataggcataattcttgtaagcaattcagtcacatttggcattagcttttctttcttggatgttcttataagcatatctcatttaagcaagcattatgtttattgtctggttccccgaaaagggatatgctcttaggccatttcctattgccgaattactatttgctattagctattttctcg

SEQ ID NO: 16489 - DNA, 797 bp, Glycine max
  Clone ID: PAT_MRT3847_114897C.1
gaacatgctaaaaaacagttctttgagtacttacaagggtttattcttcaactagaatcttagtttgaaatgtcttgcatttgtggcagctcccctacaagcgattttttttccctacaggtgaggcagaatctggtttggagagacttcatcaatgtgctgaaaaggaactacagctattcctgaatgctgatggcccatctaaagaattcaatgactttcgcactaaacaaagtggattgaccagtcgttaatgaccaagatggcggatgcagctccagattgagcaaaatatgcattatcagtgaagtcacagcccccacggacacagagagcaactgagccagataactttgaagttgaattggaacagcagtctatgggattagcgaatattgcgggagttctgacactgttgtcaggtttgtccggcaacacagacccaaatctggcactgacgccattgtggacatgcccttcctcaccgtccacccagctctccaccttcaccaattggaaggggttattgcaggattccgacttgggagccctgtcgtcgtcgcgtttggcatcgtcggcgcccgcgccaatcacaaacagcaacaccaacaacacaccgagaccacgaaacgccatcgtttgccaccagatcaagatcaagactctttgctgctgcttttataatttattcttttccttctgtctctgtctcgcatggaatcgaatagaacagaggaattcaattcaataatgcaaattttgttactcgctccgcctcttcgctgcctccactctcc

SEQ ID NO: 16490 - DNA, 589 bp, Glycine max
  unsure (1)..(589): unsure at all n locations
  Clone ID: PAT_MRT3847_114898C.1
ccacgcgtccgctcttttactgtatgtaatgtgaatcttgtcacttcccaacaccaaccactgataattccatgccttcttattaaccccaccattttgcctctcctcagaatttcatgtgcgtcttgtgttctccaattccctccaactacaccacaggggctggttagtgcctttactgtgacctcctctttcaagtgatgagagggggtctcagaattttccatttcaggttgggatcagacacccttttgagcaattaagaaaacccagagagcaaaatctcaccttggtctggtgctacaatggcttcacacccatggnggtttttggagcataagagatctagtgtttaagttgcttcagggtctgaaaaggagcttgatagttggaacaaatctgtgaaggatttgggttgtgaacagagatttctttggctttggcagcagcaaaatggcatctgatctgaattcggggttgtccaagaaaacatttgtttttggattgaaagtgtgggtactaatgggaataatagntgggttattcatcataatcattcttgtggtgctatcaatatgtctcactttaa

SEQ ID NO: 16491 - DNA, 363 bp, Glycine max
  Clone ID: PAT_MRT3847_114899C.1
gggggaacgtggcccatggggggctattaaaaaaaaattttcgggcttttgggacagggggaagtttccttaaaaacccccgaaccggggggccccccaaaaaatgggggggggcttaaaaaaagggggggggggggcaaggggccccaaatttgggggaccgcggccctcgggagccgcccaaaaaacggggtgggggggcccccccgcccccgggtgttctcccctttttattccccacactttacgacccgggacccttttgggggaaaaaagagctgccaagggactgggaaaccctggttctaaaaacccctggcaaagaggcggcgccccacgcgggaagggggaagggcccccccc

SEQ ID NO: 16492 - DNA, 237 bp, Glycine max
  Clone ID: PAT_MRT3847_11489C.1
cttttatgtttcttccagaacagaatcagactctgccgtgggttcttccatatacttgtgcacatccaggatccataaaagaaggatcttcggatgaacagcgggaacgtggaagagaacctgcggggggccactattcccaggctgcagtggcatgatggaccagacaggttggcccaaagctccaacaaaggaccagcggggttcttattgacaggttcagaatcccatttaaaa

SEQ ID NO: 16493 - DNA, 196 bp, Glycine max
  unsure (1)..(196): unsure at all n locations
  Clone ID: PAT_MRT3847_1148C.1
gattgtntcntgataaaaaggcctcatgccttgtcctcccttttgatcaagcgtgacaaacttgtttttncttntnttattgtaaatccaaaagttccctttctttttgttntncanttctttggaaancaaanaaactaaaagggcattttatttgccatcctttctttctttcccnggtgagnggtgnnggcaa

SEQ ID NO: 16494 - DNA, 1796 bp, Glycine max
  Clone ID: PAT_MRT3847_114900C.1
ggattcaaatatgtccctcgaaacaaaaattaacaactaacattagttgataggaaaaaaaaggtaaaaaaatttctaaataattcataacttgtaaatttcaaacttcaaaaaattcatactgtaccttaaaaattaaaaaaaaattcaaaatacaccaattcacttggaaacccagcaggtcaccaattcactcagactagttcaaatgatcgaatcactggatcacaatggttacataagatttccgatccaacaaccaatttgaaccagttttatcaccggttcagatcgaaccagtctgagccagacttgatatcactgaagaaaagcgtggaaaatggtgtccaaataaatatcattttgcttttatccaagtgtctggaaattaatttgcccttcattaccttttactttcatctgcttgcactaagcaaacaataactgagtgcatatgatacagcacaaaaccatgcgaaaggtaatgtagctcaaccgtcatatttccgccttatgggaacctttcgatcttccttctcacccttctcaccgtgttttcttttgagtgatccactcatagcagccttagcttttgcccattccttcaaagatgcagcacttctcataaatgagcaagtttcgcctatttcaacattttcagtggatttttcccttggacttgtttcacctttttcctcacctactgaagcagaagcaatgtcattggcactggtatgctgactctttcctggtatagtctcccttgagttaaacccatcacagacaacattaacagtatccttagctacaccattatgcttacaatcattggaaatggcaggttccacaatgggctccgtggccattggctctgggaaagtaatgccaggaaaaatatttgaaatactaaatgaattgttattctgactaaccatttgtgtccaggattgtttttgcagccatgaagatcctcgacctgtcttattaggtgccactgccacattatgcttattattggtaacatcttcaatcacttgtttattggtaggttgagcttccacaagctcctctatcacgtgtggattcgtaggtttgctccctaggtgcccatcccattccatgttttcacggacgctgtttgtagatacgggtgtggattgatcgtcagatctttgttgactctcaccagagtccaactttggcaatatgagagaagcactgaaagaagtattgcctttgtcaccaagaagttctctccatgaagacttctgagaccatgaaactttttccccaaaatcatcttctagttcagtaggctgtgcaccagatcctacctcatctggaagcatctgcatattactcttgcttccaggggtagtagacacttccaatttgggaagtgattttctcttcttgttcttgtcatgattgctattactccttttttgcactggaggcatgctcttgttgggttcttccttagcaatttttgtcttattcaaccatgattcctgggtttccaagatcctttgaagttcctcgtcccctgttaaagctggtttatttttctttgtctccacgttgataatgagatcatcttcatctgttgcactatcttcacattcatcagaatgtaaagcatcaggtgattcaaaagaacccttctcctctccaagtttcttggcattggaaaccttttgttttcccaatagcttgttcatcacagcattcattatgctaatctcttcatcattcattgcaccactatcagctgccctattaatagaaaggttttc

SEQ ID NO: 16495 - DNA, 1168 bp, Glycine max
  Clone ID: PAT_MRT3847_114901C.1
cggcacgctcgaggacggacgggaggttcattgtatctgagtgtcaggtgtgtgagtgagtgaactcaattcaactcaacattcttcaatcaaatcagccatggcagcagaacccacccgccccgtaaaaatcatcgccgccgccgatgacttcggcactcctctcaaagacgccctcgtcgctcacttgcgcactctcaacatccaagtcgaagatctcggaacctcttcctactactccgccggagccgaggtcggtcgccgagtctcccaatcctcctcctccgacatccgtggcctcgtcgcctgcggcaccggcgccggcgtctccatcttcgccaacaaatatcccggcgtctacgccgccacgtgcctctccccctccgacgccgtcaacgcccgctccatcaacaactccaacgtcctcgccgtctccggcaagtacacgtcgccagaggccgcagtcgaggtcctggacgcgtggctgaacacgccgttcaagtccgcgtgcccggccaacgacgacaagccctggccgcaggagattcactcctttctcgaacactcgctcgtggagatgccggagatcggaaaagagggcgcgtttgacacgtgcgcggtgtgctgtctggtgaagaaccgggaactgaatccgatcgatttgattccgggcgggtcgatgaagattctaagggaaactccgacgtcggcgttcgtgaggttcaaggccgggagcgtggagcccgcacaccaccacacgtttgggcacgacttggttgtgatcgaagggaagaagagcgtttggaatctgacgaaggaacagaggtatgatctgacggttggggattatttattcactcccccaggggatgtgcatagggttaagtatcatgaggatactgaatttttcatcaagtgggatggccattgggatatgttctttgacgaggatctcgacactgctaaaaacgctattgataaggagttaggattagccaagtgaattactacttcagtttggatcatgtcatgtgtcatgccatgtattctgttcattaataagctcctttatatttgtcttttgtatccaattttaatgtctcatcacaattcgagtcctttgttctgtgtttggttaaattgaagcacggtttcatggtcatgaacg

SEQ ID NO: 16496 - DNA, 397 bp, Glycine max
  unsure (1)..(397): unsure at all n locations
  Clone ID: PAT_MRT3847_114902C.1
ccctttttgttttttttttttttttttttnnctggcgcccaccagaatacaacccttgccccgagaggttttttaatacaatgaggaactcacaacttctctttttttttaaaaaaaaaagttatgtctcgagtttatcttaaacttttgaaaggtttattttaaccctttaaaagacaagatattgttaaagcctttgacctccaatagattcaaacgattttttattgataacatacctgatttatgtgctgggtttaactttggttgcacttggttacctctcaacacatcaaaagaggacttgcccatttaatgaccccatgaaactttatttttcaatgattatatcaagttccagcacaaaccattggatgaactttacttttacaattgt

SEQ ID NO: 16497 - DNA, 406 bp, Glycine max
  Clone ID: PAT_MRT3847_114903C.1
agagatgcggctactctaaggtatatcaggggtgagcgtcggcagcgactctcgccttccgagccgactttggaggtcgagttagacccaaacaccagtgctagcactactactattaacactaatggtggcgctgggggtggtgatctggccgaaacgaacctttcaaggtcgaactcgacggtgcattacattgtggaagaacaggggaagggtgtggagaggtacacgttgcggccgcccgaagatgtctaagtgcacatctctggcaaccatgggaggagtgttcaacgtgccacgtgtgttcaagcggcgtgttgtgatgctagcgaagagagatacaagggacagatggtgaatggacaggtgcggatgatgtacaagagagaatgctcacaccgccatc

SEQ ID NO: 16498 - DNA, 300 bp, Glycine max
  Clone ID: PAT_MRT3847_114904C.1
gcaactcttgcctttatgtatcttcactgggaggagagagagagagagagagacagaagaggtgtcagactggcatatatgccgacgaccctttaggagctggatcttaaagaaagagagacccttgtgattgagctgccataagtttctctcgtcgcggtggcaactcccaagaaacaggtcgtatcacaaaagagtgcctcatttggaagttatggtgactatctacataaacacattgcttccaaatgtgtgtagtgatgaacttgaaggcagctgataaactggcttccggataat

SEQ ID NO: 16499 - DNA, 422 bp, Glycine max
  Clone ID: PAT_MRT3847_114905C.1
cattttgattgcaaaaagcatggtaatataattgtaatgggtggatatttactgtatatgcgagggatcaatatttagtaaatgttcttaggttccaagtgcaagaaatcgacttacgataattatgtgtgcatcagtaatgttaaaaaatgatttatacatgttagtcttattaaaatactaagggtatgaatgatgaaatctaatcctatatcttcttaattttattcaagtcgttattattgttttcatgatttacatatttccaacacactaaatttcgtatttttcttatttcagttatttacgtaaatccgatatttttactttaagttgtctttagttaatcaaaccaaaaccaatgacattgaattaaatttgtacataactattaaaatgataacctttatccgaatgaatta

SEQ ID NO: 16500 - DNA, 405 bp, Glycine max
  Clone ID: PAT_MRT3847_114906C.1
gaagatgatgttgctcatgcatgatcatcatcatcatcatcatatgtaacatatatatagctttcgtaaagactagtagtagaagtgtagcagatttcagtgcatgcatgcgcttgtgctcagtaacaaaaaattcgcgacaattactgtgggatgaaaatagggagcggtttgctaccgagcacttgcaggaagaatttgctttgtggtttattaatatattaatataacacattatggttacctacggtgatgaagcatctgaatttttttctcgtggcagcagaacagatgtcgctatatatcatgttgaagcttttgcataccttttcagtggagaaaatttaatccgcttcattaccataacgttatcctatatcaaggacacgggtaatcacaaatgac

SEQ ID NO: 16501 - DNA, 414 bp, Glycine max
  Clone ID: PAT_MRT3847_114907C.1
caggtagtaaggctggtgctgctgcctcctccaaaatcaccattctggaagacccttttgttcctgtgcagcactagtctcctcctccctgatgctgatgcggttcagccaatcatcccaaacccctcctcatcttcaacaacaggaacaatccctgctttcccagaacaagctgaagctgcaggctgccctctcaacctctcagatgaccactatgaagccataaagagtgcatgtggctccaacaaacctgatgatgatgacctccaccgtagcagatgctgtcctgtgctcgcagcgtggctctattctgcatactcagccactgctcttagtgcctcacagggccataccacatcctatgacatgcccttgttgcctgatgactcagaaacatgtgtgagtgacttgggg

SEQ ID NO: 16502 - DNA, 327 bp, Glycine max
  Clone ID: PAT_MRT3847_114908C.1
cttccttttttttttttttttgtctgctttttatttgtcatgaaaaaatagagcaaacgaattacatcaatccataaaaaggacatcctcgacaacatagcgatgccacacaggggcacaaatgaacgaattgaacgacaggagctcccacacacacactaatactggcaggggacacacgtcctgcacctggaaaatatctgggaagcgccgcaatgattttcatcaaagagacgctgcacaccggaggaagaccccgtgggaggcgctacctgtctgtgcaataatggccaacgatgtatacattctgcaccgactctaacccct

SEQ ID NO: 16503 - DNA, 274 bp, Glycine max
  Clone ID: PAT_MRT3847_114909C.1
agccccacactaaatgggaagagtatagctggttacccttagctcaaatgctcttcaaaatggagcacactgaggtgccacttacctactacactggatttctcgggatgccagtagcgactgtatttgcctgtctattcgaagtaggatgtttcaagaaaggacaaaatgttcaagtttcggctgtctctggcgcacaccagcaacttggtggccaatgtcgtcaactgaatggttgctatgtagctggaagtgcttgatctaaagagaaggc

SEQ ID NO: 16504 - DNA, 352 bp, Glycine max
  Clone ID: PAT_MRT3847_11490C.1
cttgtgtgccttggcaatgtttgaggacagtgtcaagaagttgaagagtccaaagacttcgcctggtcctgctttgagcaaggaccaggtgaattctgctttggacttgctcttcgactggttctatgaaacttgtggctctgtgtctttgtccatgctggagcaccggaagtttcaggcttttttgagccaggttggtttgcccaacaatctgaggagggagatttctggggagaggcttgatgctaggttcggggaggccaaggctgagtccgaggctaggattaaggatgccatgttttttcaattggccagtgatggctggaaagagggggattggcttaactttgac

SEQ ID NO: 16505 - DNA, 406 bp, Glycine max
  Clone ID: PAT_MRT3847_114910C.1
attttctttacttttatatgattgcttcacactttacaattctttattatattcatgaaaattaaaatcataatattgttccaaattccagtatccagttccttgcttttttttttggaaaaccagaatgtaaataataaaaagtaaaaacatttatattacactaaaaatgtaatttcaagcattaccaagcctttaaatcaattagtgtgtaattgtttcaacttattcattagttttcagtttgagttctattgtccatgatagtcttattcaaattgagcaggattatccctaattgaagacactatagtctttgtcaaaaaaaaaaaaaagatttcaagtctatttctttaatcagcattctcaatagaagaggctttttgggaaacccaaaaaaaaaaaa

SEQ ID NO: 16506 - DNA, 559 bp, Glycine max
  Clone ID: PAT_MRT3847_114911C.1
attaaacactgataaaggaactccttttatatcagtactggaggtgaggcactttgatcattccagttacagaacaaactctaaactcttatccctctataaacgttttgacattggctcaacaaccaatgaaatagtgaggttagttagttacttattagcaaagcctgtctgaacttataaatctgttacatatgtaagccattccacggatattaaaccaagtttaatttctatacaagtcatgtggatttaacttctgtttgtctagataagaattgaatctagctttacttgttttggtttttatgttgtttgatgacatgtagaaatgacaaagctgattattgtcgtttacactatccgtctaacttcatgattctacaccactcaatacttccttcaccgtcgactccttgaaccatactaaagatcacttgccaacatcacatttgaaaaaaaattagaggctgaatattgaaaatgattccctggaatttgaaattgaatagatggtaatcagtccactaggggaagtaagctcaagttctctatgcac

SEQ ID NO: 16507 - DNA, 280 bp, Glycine max
  Clone ID: PAT_MRT3847_114912C.1
cagatttggaccaaacaaaacttggttcctctggttcattgtgcatccaccctttctttcctgttacagatatgaagggggaagaaggtgagcaagggaacttagcagcccagggaaactagggagagtgtgaatttgcttgctgatgggtcttagcttgaagatgcagaaccaccatcctgtggctttgaggttgcatgatcaaatggggtctaagagaaagtacactttcattcaagctcatagagcttggcttccaaagtttctgctgctgtggatc

SEQ ID NO: 16508 - DNA, 273 bp, Glycine max
  Clone ID: PAT_MRT3847_114913C.1
gcctacgcgtacgtaccggtgggagaaaaaaacaaacgagggtatgacttagaatgccttaaacatgataatcttggtggtggagttctaattttacattgggaaaataataacatataacttcaacccttcttatagagggaacaagggccatgttttggagacattattctttcaagagcgggtccctatttcagagcgttcttgttggacttttctttctatatggcacttagaatttgagaacgccctcatgaatttgtacgagacacc

SEQ ID NO: 16509 - DNA, 305 bp, Glycine max
  unsure (1)..(305): unsure at all n locations
  Clone ID: PAT_MRT3847_114914C.1
ccggaatcgggcttttcttagcattcatcgggcttcaaagcaaccaaggaatcgggctcatcgggtacagcgcatccaccttannnngccctcggcgcctgtccaacctcctcacgtgcctcactcgcacccgtcttaacggcagctaacggcaccgttagtttactacccggcggaaccgtctcgggtgatattctctgtctganagacagaatggaaagcccgaccctctggctgggcctcgtgggctttattataatcgcgtactgcctcgcgaagaatattaaaggcgcgatgatatacgg

SEQ ID NO: 16510 - DNA, 460 bp, Glycine max
  Clone ID: PAT_MRT3847_114915C.1
cccctccttggttttaattggcctaggaggagaaccttccaccaccaggggaaggacaccccttaggatgtaaagcagcaatttgtcccaggccaggtcctccgttgggaattggggaaatcattgaggcaccaccaatccctcgtgatcctcgaattcgggttagatcctcttttctttgtaccagcgatgttacttttgggaaaatggaggggatacccagcatgttctttctatttgaaagagttaaaacattgttctaaatcactgactcccctttaccattttttattaacttacatactctttcttttcttaaaaggcttaaagcaacttctaatcgaattgttaaagatcttttttttttaattgcgtatgaagtcccctcctgcaatttgtccaaaaattttgggtcatgaggctgtaggggttgaggaaagcttaggagaggatgtaaccg

SEQ ID NO: 16511 - DNA, 357 bp, Glycine max
  Clone ID: PAT_MRT3847_114916C.1
tttttatgtcctgattccactactgcgaatgctgaacatcgcataggaaaatcacgctgtgcctaagggccccgttgattggaacatttcatatgaagtctaaaaaatgaatatgcgaacctaggggctatgcctcccggtcaaaaggacctcagcattgagaactggatgcgaggcaccaaactttgcatggtatatcaagcgcggcgcccttggattgtaattaccaaggggtttaattacgtgtgcgtcactaccgagagcctctgcctctctggacggagactggatgttcaatgggagcaactatgggaactacacaacgagtttgttctgctctacatgggactgaatgga

SEQ ID NO: 16512 - DNA, 1083 bp, Glycine max
  Clone ID: PAT_MRT3847_114917C.1
atttcacccgcctccaggcctgcgtcagctcggccccagtgctccccatccctcacttcccaggcctctcggtggcggcctcggtgctctatcactggacgtaggggcgtccccgtcgctgtggtgaataaacaaacatgagcatagttggatgaagcagcataaatgatttcccttggtgactacactggatgcatcctgaaacaccactgatccccaccaactgcctccaagatagatgtcaaactcgggaagagagtcttttccatcgtaatttccatatgcaaaccttgccctcactaaatatttcttgctacttacttgaggaacaacaagggtatagcagttcctggttccatccgggaagcttctaacattccagaactgcctgtcaagggaagccttgtatttagatgatatactgtggcttacaccactgtttgtgaagttgacatccgaagagtaatagatggaagtggtttcatctgtgtagtttggttcatcctcaagtccgcagtcaatactaatgaagcctgtaaaaggtggaagagcttaagttcaaagaacaataaatagtgtggtaggattcaggataatgaaatgacactaccgaacctgattgattctgtgctcgaacaatgataggaagagttaaagagagatgaaacatcagaaatagaaagtgtccttccatttctgaactgtgtaaatagtaaattgaaaattcgttatagacttgaagttggagcctcttgttttgttgttgggctagtaactagtagttacctccacgagattggagattgaagattggagataggagataacaagccaattcccagaatgattgtgcttgatcattcaatgatgatattcattttaatctttgtaagggttatggtatgttgaaatcaagtttggctgcttaccgaattctttttcaccctttctttattagaaattagaagcttccgagctgattagtcccagttgcatttacacgtctttgctttattattattattgtattggatgtatagacttgcatggagatttcgcaggaaaatttctattgttatgaca

SEQ ID NO: 16513 - DNA, 220 bp, Glycine max
  Clone ID: PAT_MRT3847_114918C.1
gaaggttaaagccctgggccctggatttataatttaacagagaatttcctagcaaatcaagtccaatttgatagggcttggtggctgcaattataacacgactacaagacgtgcatggcacaatgacaactagaaacatgtctttatccctaaatataaacccttgcctgaatactccacacataaggccctatttgaatttaaaaaaataaatgagtga

SEQ ID NO: 16514 - DNA, 261 bp, Glycine max
  unsure (1)..(261): unsure at all n locations
  Clone ID: PAT_MRT3847_114919C.1
gcgataagaacgacagaagggggcggaaccaaatgaaatgattgagaagagagagcgaagaaaaaaaagagagcccaaccaaacctttcccgaaacgggtcgnnnngcccttcttcggaaccctcccttctgcgccgctgctgctgctccggtctgcgtcagcgactctccggtaaccgaagaccactgccactccctcagaaacctccgatcttggatcttgaccagccaaaccatgcccgcctcaccccgatctggacc

SEQ ID NO: 16515 - DNA, 330 bp, Glycine max
  Clone ID: PAT_MRT3847_11491C.1
ttgggaggctggagatgtattacattcaaacactctactttacttttgggtacatgtattgtttcgtttagtttcatcccactcaacgtattttttttttttttcaccgttcactaatgtcttgttaatgtgtggaaagtctactagatattatcttattctaagtaagtttatgtggttcacattgttaagcatgttccactcaatgtattttacatatcccattaaatgactaataactgttaacttgctaatatttttttttttttcaaaatattgcagattaaatttgtagggtattttactattaatttgagaatttgttttttt

SEQ ID NO: 16516 - DNA, 450 bp, Glycine max
  Clone ID: PAT_MRT3847_114920C.1
accacgcgtccgctgagatagagctccagcacctttatcattcatctgcggtacgtgcctaggggatcctcgatacctatatcacatagaagacacatcaccccagaacccaaggattctgaataatacaactgcaattatgcttatcggctcagtccaaaacacgctacgagaaatgagttcgattcattagttaaacactctggctgttccggttcgtgctgtgtctgatcaggcgatatctgcgcaatgccattctcctctccgtgattacttcgacgttccaaaacggcgtcgttagtctgactactatcggttccgtctagcttgaagtccaaccgggaatacaggctcgcgtgcgaatggaccttacacggtaactgatatcacgacaaagcatcaagatttgcatgaggtcaagaccacgaccaccgttgaaaaagcttctgt

SEQ ID NO: 16517 - DNA, 641 bp, Glycine max
  Clone ID: PAT_MRT3847_114921C.1
cctcggaattcggctcgagcttcttgttcataagatttgtgccttccattctttacagccataagatttgcgatctcatattaactaaggagaaacatattaagctgcttcattatcataatgtttcaagtctccctaagtccatgagcctctaacattttcattcaaacacttatttctcaacatcttatctatattcacattccagatcaagtttatagtaattctaagtactcagctactcaagcaatgatggttgataaacaacggtacccgacaatagaacaaaagcttgctggccagcttcacttgagatccaactccaacctttccccacatgttggaacttgttacgaacgtctgaaaagaccagctctgtttcagcaacgattttcactaaaaaatcattcaaatgcagggttgctgtgccctctcgtgcctgcatggaaagccactagccatctgcattctgtagcttcagctgcttcaccagtgttggtcccatccccatcagagaaaaactttgcaagctttgccactgatttccgcgtggctgggccctctcctgccggctccgagacgccacctgccccctgcgttcgcttgctgctgctgcttcaccagcctggggccctgcccca

SEQ ID NO: 16518 - DNA, 649 bp, Glycine max
  Clone ID: PAT_MRT3847_114922C.1
tttttttttttttttttttttttttttttttttttttttttttttttttttttttttttttttttttttttttttttttgggcaaaaaaaaatggaaaaaaacttaaccctttccctttagttaaaaaaaaaaaagctaaactttcactcagggggggggcggggacttactcccttaaaaaggggccggggaagaaaaggagggcttttggaaacaaccccccctatgaaaatataaaccaaaagcagggcttttattgaacaaacctgccccagtctcatggtcattgaaaagtctttggggatttccactttggattcccattccccccaggcttttcccctacccaaaggaaaaaagccccacagaagggggaaaaaaaggggggggacagcttaacccccggggggggaagggggactatatttcccgccttcaaaaagggacaacttttttttttctcttccgaagagggtgggctttggcagaaaaaccccggagcccatgttctttttggggggaaccccgggcacttttttttcttttccgagaaaggttatctttggcgggagaacccccatatggaaggtctttcccaaaggaaccccgggcacttttttttttttttggaaaatgtttggctttggc

SEQ ID NO: 16519 - DNA, 578 bp, Glycine max
  Clone ID: PAT_MRT3847_114923C.1
ggctcgagcttcttgttcataagatttgtgcctaccatgctttagagccataagatttgcgatctcatattaactaaggagaaacatattaagctgcttcattatcataatgtttcaagtctccctaagtccatgagcctctaacattttcattcaaacacttatttctcaacatcttatctatattcacattccagatcaagattcggatgatcttcatggacgaatttctttgataaagtagttccctattgatcaagatagggtaagtttatagtaattctaagtactcagctactcaagcaatgatggttgataaacaacggtacccgacaatagaacaaaagcttgctggccagcttcacttgagatccaactccaacctttccccacatgttggaacttgttacgaacgtctgaaaagaccagctctgtttcagcaacgattttcactaaaaaatcattcaaatgcagggttgctgtgccctctcgtgcctgcatggaaagccactagccatctgcattctgtagcttcagctgcttcaccagtgttggtcccatccccatcagagaaaaac

SEQ ID NO: 16520 - DNA, 348 bp, Glycine max
  Clone ID: PAT_MRT3847_114924C.1
agcaaatgttagttttaaatgcataaccatatctgtctccttttcgtagggggtcctaatgaactggagcataataggaacagtcgtgacaccaaattttcgtccacttgtatctgaaaacaattatatggatcccctgctcctgtacaaaaaccacacgggcgtagggggaaacggcccctttttcataacatcgccaggcagtttgaaacccatccgttgttttaacaaaaggctctcttatcgctccaggtgtgttttcagcagggcccaatccccggtgtgtttaaagaaaagcttctctctcaatcaaacttcacagatttaccccccaggggccgccccgcc

SEQ ID NO: 16521 - DNA, 567 bp, Glycine max
  Clone ID: PAT_MRT3847_114925C.1
ggggggtggggggtgaaggtcaaaatctaaatatattccaagtttacatgtatgtattttaatgcttgacaaactgccaaaaatattcataacgatgctatgattgatgtgagaatacaaagaatggcaactaaaatttctaatggctaagcagataacaaaaaccttaattaaagttcaaaagaattacgtctttctatacctaactggtcattcatcctgctcacaaactatcccatgatttttaagacacaaactatccctccaacagatagtattgatcttgttgaaggcatatccttattaaaaacaccaactggaatgatgtttgtgttgctcttcaaaatattgagcaatctggtttctcatcttttcttcaatgctctgcctgtaactctttctggcagctgcatctttaaattcattatacttggaactgtcccctcccgcaacaagaactaagcagaaggaagatactgtacaacttaactgagtccttttttcaagtatcagtggagtcaatcatgtaaccccaatctataaaggtggcacggcaattcctgtggc

SEQ ID NO: 16522 - DNA, 292 bp, Glycine max
  Clone ID: PAT_MRT3847_114926C.1
ggccaaaaaaaaaattacctggtttaaagatttaaaacagaggggcttaagggcccttcatttcattaaaattttgcccgggggctaaccccccccttttaaaggttttttttgcggggggggggggccttaaccccccttgagaagaaaatgggggccggccttgtttcccggaaaaaaaaaatggttttttactgaaaaaaccttttcctgcaaaggggaaacttttcttgggccccctatttataggccccggtgggtgttttccctggggcttcgcgcttactaaaac

SEQ ID NO: 16523 - DNA, 1037 bp, Glycine max
  Clone ID: PAT_MRT3847_114927C.1
cttgcatgcctgcagtgtgggcacagaggcctataagtggttgaaggcctcattagtttgatataagcctaacaaaccacccccaccaaaaaaaaaaaaaaaaagaaaaagaaaaccacacaggaataagaaaatagccatgtttatttttggctgatttctgaaaatgatgcataagaaaaaggagctaccatggtttcagaggtgtttggtttaacatgtttgccatccatagtatagtagaataagaagcaatggccattgagaaattactgctatcaaacaaagaggtccagaataaaaatatattgggtgacggcatgatcatatttttttattaaaaaataaaggggaggaggaattaaacaccttcacaacatcattgacagaaggcattcacaatttcacatcacaaaaatatgattccaattctcaagcaaggaatcatgaaaaatttacagagtttacaagagaaaatttgtaatgtttagaagatggcaaaccaaccaagatgacatcccttcaagagcaaacaacacgccaccaacaggggcacggaaggcagcagcaattccagctgctgatccacatattattaaatctctccgatctcggtcattcttaaaaaactttaaccatttccatgttaacccatatctcttcgacccaccctgacctaacaatgcagccacacatgcacctgtatgcaccataggccccgccttcccaataagaagcgatgatgacactgctgtaatacttccaataatctgaacaagaagagtttgtacagtaaatattccaggtgcatccacaccattcaggtaagctttcacctcgggtatacctgaaccggtggcagtaggtgctatcaaagccgtgattgtgcacgcaaaaaccgtgagaaccaaatttgaaacaaaaaatactaaaaaggccatcagaaaccttctctccaacatcatgttggacgtgaccacaaacttgatgccagcgagattctcaaccgcgagattgttgcagaagccaacaaggcc

SEQ ID NO: 16524 - DNA, 379 bp, Glycine max
  Clone ID: PAT_MRT3847_114928C.1
ccccaaaaaaaaatcttctactttatataaaacctaaaaaattttaaaaaccaaaatttttaacagggtttttaacatttggacaaaaaaaaaaaaaaaggggccaaaccatacatgccccccaaaacccgaaaaaatcgccgggttccaggtttttcctaacaaaaaaggcccccaaaaaaggcccccctgcctggagggacccccagctaaggggagggcctttgaccatcatcttcgggggaattgtttggtctttttccaacaagccctgaaaggggttggggaaccatagggttcactggaacagggaatctatgggctaaacaaaccaggggtctctaatttataattccaacttttttgcccaccctataaa

SEQ ID NO: 16525 - DNA, 532 bp, Glycine max
  unsure (1)..(532): unsure at all n locations
  Clone ID: PAT_MRT3847_114929C.1
ggcacgaggcaaaggtagttcaaggaaaaccatttcttatgaagataaacctttcaactggagaagccgcgaccccatctataccaacaagcttggcaagcagtttgagactacccttgagagaaaccctcagctttttgatttggatgtccacctcagtgttgtggatatgaacgagggcgctctttttttgccacactccaattcaaaggccatagnggtactagtgattaatgaaggagaagcaaacatcgaacttgttggcattaaagaacaacaacaggggcaggaacaggaagagcaacctttggaagtgcggaaatatagagctgaagcgtccgaacaagatatatttgccatcgcagcaggccgtccagctggggtcaacgctacctcagatctgcacccctttgcttgggggatgaatgcccagaacaaccagaggaactttcttcgccgctcgaaagaccatgcgataagccatatccctagccaagcgcaggagcttggctgccctcgggccaacaaaaat

SEQ ID NO: 16526 - DNA, 408 bp, Glycine max
  Clone ID: PAT_MRT3847_11492C.1
aaaggggtaaaacagtgcggaaacaactggctattaaaatatatttaactggccattataatattcataaatccaacggtcaataaattattttttattacctcaccacccaacacaaatttgattcgttgaccatcctagcctacgcctactctaaattgttaatggagacacagtctccattgattctagaaacaaaggcgtaattagccaacttacatgttttggcttgtcctcctggcagcgggtcacatgatccctctatgcgacataacccaattcttcgcctcacgtggccaccacgtgaccatcattaccaccccttccaacgcccaaattcttcaccagtccaaaaacttgcgcgtccacacctttgagttcccttctcaagaagcaggcctccctgac

SEQ ID NO: 16527 - DNA, 449 bp, Glycine max
  Clone ID: PAT_MRT3847_114930C.1
ttttaagtgagtcgtgtttttacacgtgcatgtttaatatttgtttcagttgcgtgatgaatttactcactgatgaattacaaacaccattaatatatgttgcagtgaacaagaaaacacatcactaaattttttctttttcaatttaagtattttatttggtagaagatttaggtatctcacagctatatatttttacaaaagtttaactaaatgggtcccacgaataaccccacatccttataataatggttaattttaaaaactttcttttaatgaaaaaagtaattggttggcccaccatttcagatacaggcaacctaaatgtgttttttttttacgtgtaattaacaaaggtataatttttagctattacaataatatttaatattaaaaattaaaaaaaatgtgaatagcattaaaatttgtgttcaatttctttcatacgt

SEQ ID NO: 16528 - DNA, 301 bp, Glycine max
  unsure (1)..(301): unsure at all n locations
  Clone ID: PAT_MRT3847_114931C.1
catccatctntnccttctgnntgttggttctctntaaacagatantngcaaaagaagaatantnttgaatatntngntgggttnaatccctgggntgaaagcgttncagacatcacgggctatnctaaggagtgtctcgcctctcngcantcatgtgcccaactgtacgacggaggacngnttncgtatatgccaccaanccttcgccgcacgtgggcgtggtgctntgcctactganggtggtagccttccaacttgcactctanctggtggtggtctgctgtcttctaagcttcttctt

SEQ ID NO: 16529 - DNA, 282 bp, Glycine max
  Clone ID: PAT_MRT3847_114932C.1
cccacgcgtccgtgacaaactaaagttgtacttaataaaaaaaaaaaaaaaaaaaaaaaaaaaagaagaaaataaaaaaaaaaaaaaaaaaaaaaaaaaaaaaaaaaaaaaaaaaaaaaaaaaaaaaaaaaaaaaaaaaaaaatatcctcacttttaaaaaatccaaatttacttacccttacattcaacttaatatttattctatagagtaacctaaattaaattcactgtcaaacattttaaaactatttaactgaaaaaaccttgccttttcccaattt

SEQ ID NO: 16530 - DNA, 483 bp, Glycine max
  Clone ID: PAT_MRT3847_114933C.1
attcggctcgagagaataattatcttcttcaaaataaaataaaaaaaaataaaaaaaggaagcagataggaaagggttgaatccaaaaaaaaataaaaaatggcatttcttgacgtacggaaaaaaataatgggtagggtttggacttggacgatggcactgatgctttgcctgatggcagcatcggttaggagcgaggacccttatatttactacacatggaaagtgacatatggtaccattgcccctatgggtgttccccagcagggtatcctgatcaatggccagttccccggccctgaaatcaactccaccagcaacaacaatgttgtcatcaatgtcttcaacaacctcgacgagcccctcttgttcacatggcatggtgtccaacacaggaagaactcctggcaagatggtacattgggtgtccagtgccccattgccccaggaaccaattatacctatcactttcaggttaaggat

SEQ ID NO: 16531 - DNA, 370 bp, Glycine max
  Clone ID: PAT_MRT3847_114934C.1
cgttaaaccaataagattaaaccacttcatcaaactatactaacttatttctatcactacaaacgcgattactcgccaatcaccccaagcacatttatatcaaataatccattatatgtcaaccctaaacttctacaaattaatccataattctacacatcttgaaattacacaaagctctccgttcaacatcttctctctaactcctattcccatccttactctatcttacatcaccaactcaaactccttgaaattactctcaagaaaaattttaattcttactccacctttcataataaaaaatgtgtactcaacaaaacacattctttcatacacaacgaaatactccttcttaattgttttcaaa

SEQ ID NO: 16532 - DNA, 1157 bp, Glycine max
  Clone ID: PAT_MRT3847_114935C.1
accggacaacccacgcgtccgcccattcgtcccatctctcacatcatttcccactctcgcgtttcctttatcatatttatattctttggttattcaattcatattacgccatgtcccagttgaacggagcctactacggcccctccatcccgccgccgaaaacttcctaccaccgtcctgggcgcggcggaggcctcggctgctgctgcgggtgcctcttcagcctcatcttcaagctcatcctaaccgtgatcatcatcattggcatcgccgtgttccttttctggctcatagtccgtcccaacgtggtgaaattccacgtcaccgaggccaccctgacgcagttcaactacacccccaacaacacgctccactacgacctcgccctcaacatcacggtccgaaaccccaacaagaggctcggaatctactacgaccgcatcgaggcgcgtgcaatgttccacgacgcgaggtttgattcccagttcccggaaccattctaccagggccacaagagcaccaacgtgctgaacccggtgtttaagggtcagcaattggtgccactcaacgctgaccaatccgcggaactgaagaaggagaacgccactggggtgtacgagatcgatgtgaagatgtaccttagggtcaggttcaagttgggtgtcttcaagaccaagacgcttaagcccaaagtatcatgcgacttacgtgttcctttgaaaggaagcgccggtgctggtgtctttcagaccaccaagtgcgactgggatcgctgatggattcggattcacccgacccgacccgacccggttctgctttcacgtcatttctcccttttcttatttctttattggttagttttggacatagtcgtcgtactccttgtccttcagggttactgttcagagatatgattattttattataccgcatgtatgtatgcatgcatcatctaccttgactactgtattcccttctgtggacgggatttttgctgtattatttatatcacacattcacacttgttatttgttgataaataaatttcattttcattccgcttcttcaatacccttgtaacttgttccgtttctcaagttgccagcttgcgacgtaatataaatttacctcctgattacgcgtgctcaaaaaaaaaa

SEQ ID NO: 16533 - DNA, 299 bp, Glycine max
  Clone ID: PAT_MRT3847_114936C.1
ttgttgttagatataactaatttagtgtgatgagaatataagtctgtgtgttctccttcgctacaaatttggggcagggcaatgccatgcctacgagcagtgctctctccgtttcctcaccgactataaagtgcctattctgaacgtgctatgcgcagattatgggcatgttgtaggcgtacacatcaacactagagtatccaccactctataaacattccttaaaactgcgttggaatacatccagggcaaataataggcaataaactccaatcaaattctacaacaatcttacattt

SEQ ID NO: 16534 - DNA, 632 bp, Glycine max
  Clone ID: PAT_MRT3847_114937C.1
ggaggaagcattttctactattacactcagtggacttttacttcaatcaccatttattttgggcttggatctttgctctctatatatggatgttaccaacatcataagaaagcaacaggggataaggttggtaatgtggatggagatgcagagcaaggaatgtatgatgcttctgcactcccacaaagctctaatccatttgacccagagaaaagcttgggggatccagaagaagttcttgttcgccaacatgccggcatctggggctatacttttcaaataattttccagattaacgctggtgctgtcatgctcactgattgtgtattttggttcataattgttccatttctaaccatcaaagattacaacctaaattttttgatagtcattatgcactcaatcaatgcagttttccttataggtgatacagctttaaattgtctgagattcccttggtttcgaataggatacttttgcctgtggacaatcacatatgtactattccagtggattgtgcatgcttgcatttatctctggtataaagtctttaactctgttgttatacttaagttcattatactatcaagacatcttatacatctaatataattttcttctctggaaaaaca

SEQ ID NO: 16535 - DNA, 497 bp, Glycine max
  Clone ID: PAT_MRT3847_114938C.1
aagacgacagaagggcagtcaagctataaatatgacgggggcatataaatatatctgttagtaatgggtaacttgaattaataatattaataataagaaattaaaatatccaccaaataacatttttgtttatggagtgatacttaagcttcgatatatattgaagacagtgcaagataatttaattatcaaatgtgtgaagccgtgaaagaataacatttttgttttatataagttactattgtcacgatccgatactcttcttttactttgacctagatgacatcctttttttttttcttcttcttacaaacaactttttacttggacaattatcttctatcggcagtaacctaaggtagattgctcatgtcagtatgtcatgctcctctgtgtacgtaaagtcaacaacatgagaagttgagaaagcactttatttttatatggaaaatgattatattcggattactactatcactcaaaggatttaaaaaccc

SEQ ID NO: 16536 - DNA, 825 bp, Glycine max
  Clone ID: PAT_MRT3847_114939C.1
ttttttttggcagaaacatatttttttttttttttttttttggagtcaaaaccatacacatcacattgctatacatatcaaattaaaagggtaaaaataccttaaacaattaacaatgccatctactaagaataaatgctagaaaagtattacactgttttttcgttaaagtacagcaaattaataagcaagcacaatgcagcaaatctgatcctctaggttagtttcttgtggtcgttctagttctctttttggttggcacatggctagaaggaagagttttctgcttgaagttttgaaccatgttgtacacctttcttacactggttgtcagtcccatactagaaagcgcattgctgtaaacacacttccaagttgttttattgtctgggcttttgaacaaatcatctactcctttcaattgtaacactagcaattcaacatacaacttgaggcggatgtgactgaaaatgtgaacaaattccccaatatcttccctcaaaactatattgcaagtctttctgatgtcaattttgagatttttttccaagaagcgatccattgcttctcttctagctaatggaactgcttctccatccagtaagacagatggaaactcccagagaccggcaagcaatccttcttcaggccttttgacaagaataaacttgctgctagactggtttttatttaacgtttcagctccaactaactcaacaacacatacagcagaaaaatcacatctttgttttaaccttcacacccttaacaggataatctgtaactgctactgtactatcatgtttagcatttgatagcgcgtga

SEQ ID NO: 16537 - DNA, 468 bp, Glycine max
  Clone ID: PAT_MRT3847_11493C.1
aaaaaaaaaaagcggaaatgatgggatgggattacatccccattacaggtacaggacacaaaactttagccccaggttcataatttttagcatgaaggaacatacgtataccccttttacccaggacccacaaaggagcccttgggatttttattcccccaacccaagaaaaaaaaggaggggtgggaagccccccccccccaaaaggaagggcttatataaaataagaggccccaacccccggggtaaaaaaaaaatttccaaaaacctggtttccccaaccaaaggtggtaaaaacacttttaatcccactggtaccaccggaaggggggggggtccccttgggaacttggacaccaggggggaaccccgcgcccttgaagacttggccccctcctcccggggttttaaagggacccccaaggccattggtggttccggtgaaaccaaaaggggtggtaaggaaac

SEQ ID NO: 16538 - DNA, 432 bp, Glycine max
  Clone ID: PAT_MRT3847_114940C.1
cacttctataaccatcatcaccacaataatttacattatatgtcatctatctaaatgaatgtctatctcaatggggaactcagcttaaacactatctcaaataatttcacaccattactacatatactaattcttacaatattcatcattacactcgactattattaactattatgaccttcttatcctacctactaacataaacacctatcttattcttaaataccttgataagaacaacaatctgattctgacaatattatacaatcaatatcttgcaaaacttgcacaatttgcccactaccaagctcactttcaaaaaaatttgatgtatttagcttcaattgcttatgaccaaccttaaacaccaaccatgcctccacatatggcactacacccttacatgcaaccaagattatatatgcaacattc

SEQ ID NO: 16539 - DNA, 1195 bp, Glycine max
  unsure (1)..(1195): unsure at all n locations
  Clone ID: PAT_MRT3847_114941C.1
cggnaatcccgggtcgaccacgcgtccggccaaacattctaaggcatatttttttttttcactctcaaattaatgcacatgaacacctactctgaagccaccacatcacaaccaatgccacccaccatggatgaagatttggagaacaacacggaggattgcaacaatgcaatgactccgatggtgagaaagaagtcagaactagttgtggtcacaaataatgactctcgtttccaaatgcttagaaatttcatgaccaatttgcaagaggtcatcttcggtactaagcttgtggtgctttttccggcagtccctttggctgttgttgcaaatttttatagctttggaaggccttggatttttgctttcagcctacttggacttgctccgctagctgaacgtgttagcttcctgactgagcaaattgcatatttcaccggcccaacagttggagggcttctgaatgcaacatgtggaaatgcaaccgagatgatcatagcattattagcacttcaccagaacaaagttcatgttgtgaagttgtctttgctgggttccattctctcaaaccttctcttggttcttggcagttcactcctctgtggtggtttagccaatcttaagagagaacaaagatatgacagaaagcaggcagatgtaaactcactgcttttgttgctgggattattgtgccatttgctgccattgctattcaaatacgccttaggaggaggcaatcattctatagccactagcactcttcagttgtcaagagcaagcagcattgttatgcttctagcatatgttgcttacatcttctttgtcttgaaaacgaatactgaacctcgtctcaaggatcaattgcagagatggacatttttattcatggtggaaattatgtgcctttgactgaggctttgaacaacatcataaactacaaaaaaaatagagacttcaatgctttatataattctttcttcgtaataaagcttaacaatgacgttttgggtttgaaatcgcgcctatgctctttttctctgttttaattttctgtcttcccttcttaccctttatagatatgataattttccgtgtacttaattcatgatcgcaccactttcatgtactaatgaataagaatttctttttgtataggatgtaaaacatatttcttaataaatttgtctttgttaca

SEQ ID NO: 16540 - DNA, 1121 bp, Glycine max
  Clone ID: PAT_MRT3847_114942C.1
aattcggctcgagtggggttgttgtgccatttgctgccattgctgttcaaatacgccttaggaggaggcgatcattctatagccactagcactcttcagttgtcaagagcaagcagcgttgttatgcttctagcatacgctgcttacatcttcttccaattgaaaacccatcgtaaattgtttgatgcacaagaggtggacgaagatgaagagaaggcagttataggattttggagtgcatttacgtggttggtgggtatgacattggtcatatctctgctttctgaatatgttgtgggaactattgaggctgcttcagattcttggggcatttctgtaagcttcattagcataattttgctgccaattgttggaaatgccgcagaacatgctggttcaatcatatttgcttacaagaacaagttggacatatcgttgggtgttgccatgggatctgcaactcaaatttctatgtttgtggttccattaagtgtagttgttgcatggataatgggtataagaatggatttggacttcagtcttcttgaaactggatgtcttgcttttacaattataattacagcgttcactttacaggatggaacttcacactacatgaaaggagtgattcttactctatgttacattgtcattggagcatgtttttttgttctcaaaactcctctaattgggcaatctcctaaggccagttttggagctaaaaccatcctttgaagccatcaccacttaaatgattttgtttccgacactaagataaccaatgtcaccctatggataactgaacctcgtctcaaggatcaattgcagagatggatatttttattcatggtggagattgtgtgcctatgactgaggctttgggcaacatcataaactacaaaaaaaatagagacttcaatgctttatataattctttcttcgtaataaagcttaacaatgacgttttgggtttgaaatcgcgcctatgctctttttatctgttttaattttctgtcttcccttcttacgctttatagatatgataattttccgtgtacttaattcatgatcgcaccactttcatgtactaatgaataagaatttctttttgtataggatgt

SEQ ID NO: 16541 - DNA, 215 bp, Glycine max
  Clone ID: PAT_MRT3847_114943C.1
cgaaagctggaaattcggttcgagcccgaagtgttaaacgatttcctcttgctatagggggcggagctggggcaaaaatggctactcacaagaatatgccaaatgcagctctttcaatgcggagatgttaggttggagatctcttctttgaaacccataaaacaacttctcattacattaaatgtacaacatataacttcattgcatcctggaat

SEQ ID NO: 16542 - DNA, 901 bp, Glycine max
  Clone ID: PAT_MRT3847_114944C.1
ccactcaaagttaaaaccacaaaaatcacactccttaattatcccgtcaattcctccctttgagaagaaaagagaggccaaatggagtttaagggatccgtttttattaagcttctgctgctgctacacttcttctcggttctatgtgcttctcaggactttgatttcttctactttgttcagcagtggccaggatcatattgtgacacacagaagagttgttgctaccccacaaaagggaagcctgctgcagattttggcattcatggtctgtggcctaattacaatgatggcaaatacccatcttactgtgatcctaacaaccctttcgatccatctgggatttctgatctcactagtagtttagaaagtaattggcccacactggcatgcccaagtggggatgggatagaattctggacccatgaatgggacatacatggcacttgttcagagtcagtccttaagcaacacgattattttgaagcagctctcaaccttaaacaaaaagccaacctcctccaagctcttacaagtgcagggatacaagcagatggacaatcctacagcttgagcgaaatcaaaggggctatagagggtgcaattgggtttactccattcattgagtgcaatgtggactcatcaggaaacagccagctataccaagtttacttgtgtgtgaacacttctgggtcagacttcattgaatgccctgtgttccctaggggcaaatgtggctcagacattgagttcccatctttttagtttctaagacaatgtttataccaagttaataatttactgatatttgaatgtgtgatgttgttgtccttttcatatccaatagtagtgatcaactgaaagtgcttaattcaataaaatggtgtatacaattatagcc

SEQ ID NO: 16543 - DNA, 586 bp, Glycine max
  Clone ID: PAT_MRT3847_114945C.1
acagcatgcaattgggtatgtgacaggagatcagtactacggatcaaaggctagcataaacgtgtgggcaccccttgtggaaaacccatatgaattcagcttgtctcaaatgtgggtcatttctggttcatttggggatgatctcaacaccattgaggctggttggcagcccggagctatatggggacagctaccctagattctttacttattggacggtaagtaaatttattgaaggaaaggaggtggaaaagtatactacgtataattatttttgcttcaagtgtaagatacatagtaaaaaaagttttattcataagcattaacaatgatgatgatattaataataattgtcattatttgcagactgatgcatatcaagcaactgggtgttacaatttactatgctcaggctttgttcaaacaaacagtaaaattgcaattggagcagcaatctctccaacttcttcatatagtggtggacaatttgatattagcttactcatttggaaggatccaaagcatggtaattggtggcttgaatttggatcagggatcctagttggatactggccatccttcttgt

SEQ ID NO: 16544 - DNA, 405 bp, Glycine max
  Clone ID: PAT_MRT3847_114946C.1
gcaaaagcattcgtgtacacaagattcatgatggtacaatacatgcaacacccaaaacaaaattgacaaagccacaagaaatcattagtctctgaccaattttttggtactcaatctttttcagcccaccaaatattgaaattggacaatcatattaaaaaaatcaacacaagtctacttagtaatggagtttcaaatcacacatctcatagaagttttcttaaccaaggatgaacagctgaaatacagcaagcattttattcactgccgttgcacaacaaccaaacccccacacctgacttgacttggcgagtgtttggatttccagtggagagggctccaacgtacgttcagagaaataacccattttttatttttgccctgaatgtacatttagaggggcta

SEQ ID NO: 16545 - DNA, 374 bp, Glycine max
  Clone ID: PAT_MRT3847_114947C.1
gtttattgaggcttttttggatcaacggcatacagaggtttatttatgcccgtagagcttgtatctaccccgaaatcagacagtgggcaaccaacggtagctagaatgagcctgatgcatggtcagctgatccacaagaagcatatgggctagaaaagactgcaacagaggaatcatgcaagcactataacacggatcctggaattgagtgccgcattggcaggatacacaacatatactgccctttcgggacatggaaaggaggaagggagaacgctgccgcagcttgtcgctgaacgttatcactcactctgatagatgggaaatgcgtggggatcgacagcatacacgatcagttacctatattgatgaat

SEQ ID NO: 16546 - DNA, 1865 bp, Glycine max
  unsure (1)..(1865): unsure at all n locations
  Clone ID: PAT_MRT3847_114948C.1
acggctgcgagaagacgacagaagggatagtgttttcgtaacagttcaaataattaaaaagtaagcagacaaatggcgcccgataatgttcctaagatctggccatttcaacaacaaatgatgcctacctctcagctcccaagtagcacaataggttaatacaatgaacaagctttctgctaataattcagcaatgttctcttttgatgtcacaattcaagagaacatgaattggctattgatagtgagtacaattgacacatgggggttatgacggtagaccgacggggtcaacaccttctactacacaagtggatataactaaaactagaacagctaagaacagttagttaaagaaaaagtattagtatcaaataaaatgattcaatcctaattatacacacatcccatcctatattggtcataagatttctcctaattgattttgccatatatacatgataaactactaaaaatatctaagatattctaacagaaatatatgtatacaagcataaaagataagataaatatgaactcacatttgttctttacaagaaaacagaaatttcttgtaaatgcacatgactattttggttgaaatgaaattctcagtttgatgctccttgtaacaccttggctcaaggacttgtacaaactgatcaatcttattaatttagtaatcattctgatatcttacagccatagaaaattcaaaattcgctttgaacaattgcaaaacatgatatcttatctttcgtaatcgatatttaagcaattctttaaaaaaaacacttctcgatccaggaagcatagtactcagtccatatctaccagacatctttctccgcaacaccttgaagtgatatttcacatagataacttccccagaagaggatccttacttctgcttaataatcgggtcataggatccccactcaatagggcacgtaaaccgctataaacagtttatcatcttcacttgtttattcaacatcctgatcacccccaactggttcctcttcctctgcaatagggattccacaaaacgatccaatcgagctacaagcagatcctccaatctgacctcaagagaaccctcaagcccctcagtcagttcatacctatccagtgatgccccagcatgcagttcctataatctgcatggtatgtcaacagcagcaccatttgccttcttcagctcttctcccttcgttttaagaatgggtgttcgaaccatagaagcaacacccattcttctcaaacaaaaataaagcatagaagcaaatggaaaacatggtcctcatccttcgtctccaccactccgcaacaccagaacacccattcttctcaagcaactccttatagaacaaacccctgtccctcaccaaatccttctccgcaacgcaaagaagcaatctttcacaagctaccttccctagcttcggatccttacttgggttaacaatcgggacacaaaccgccacaaatcgtgcatcttcttcgcttgttcaggtcggtttgcttcacacccaaacgattcctctccccagaaaaagggatgcaccaaaacaaccccttcaagctataggagaataaaaagggaaaaacaaattaaattgaatgagacgcgcaccagatggagcaacacgaatatgccctcacaacccccacgacgacaacaatgacttcaatggtgagagagcgacggtgcaggagacactacgacggtggcggcgctgacagaggcggagtgacacgtacagacggagtcagagggcgtaaagagatcgatggaggcggagtgagagagggctaaggcgcaagtaataaaaagtaaaaaaaaaaagcnaagcaattattac

SEQ ID NO: 16547 - DNA, 289 bp, Glycine max
  Clone ID: PAT_MRT3847_114949C.1
aaaaagggaatttaacttttagattggttccatcgaaaaagattgaatagtatattgggaattacgtcaaaattttgtgcgtaattcagcaaatgaatccacaatttatttaataggcatagctatagattacttacagttcggcttggattgcttgccttttggggcttggactctttcaggagcgacgttatggccgatttggtcaccagtgtttatgccaggttgaccactgctttgaccgagtttgcctctttgttctctggcaagaccaggtacgctgtccttg

SEQ ID NO: 16548 - DNA, 281 bp, Glycine max
  Clone ID: PAT_MRT3847_11494C.1
ggctcgaggcctgcgggctttgagcaaactttgggctaatcgttctcaagaacttactaagggagtcatcaaacattagttatagccaacaacaccttaaacttatcatcaagtgtctatatcattatcaaaaccatgttccggctgctcgcatttttccagcactgagaagttgtaaagttggttatcatgtagaatgtaaaatagtacatctacgtgttttgaataactaataggaggaaatgaaagacattgatgccatcaagactaaagacaaaacg

SEQ ID NO: 16549 - DNA, 307 bp, Glycine max
  Clone ID: PAT_MRT3847_114950C.1
gtatcaaaattttaattggtcacttggatcaaaagaagaaaagggattcaacaggtcgaaaggcaaggaaaccccaaaagcactgcctatgtcctgactccataacatttccccttaaatccacataaaacgcaacacatagtatgggatcaaagaagcaaaaaacatagcatcaagtggggagccagcagcctttgctgatgatgtataagaagacctggtcggggcggaggtcacagatgcaggggttgtcgtcgttggaagcttccaaccatttgcccctatcaatcaaattccgttttgtagc

SEQ ID NO: 16550 - DNA, 1752 bp, Glycine max
  Clone ID: PAT_MRT3847_114951C.1
gagtaacggaatgaatcgaagctgaaacgcttcatcaccggattctcgctctcaactcagataccaactcggagtttcggactcattcgcctccgattcaaaaccctaactcggaccctcaaactcaatcgatttcatacaacatggcttcggatgctgatatggaggactatggatttgagtactcagatgaggagcaagaggagcaggatgttgatattgagaatcaatattacaattcaaaaggtttggtcgaaagtgatccagaaggtgcacttgctggttttgctgaggtagtgcgcatggaacagagagaaggcagaatggggatttaaagctctaaaacaaactgtgaagctctattatagacttggaaggtataaagagatgatggaagcctacagggagatgttgacttatatgattaagtcggcagtgactcgtaactaagtgaaaaatgcataaacacgcattatggactatgtcaaacctctggttcagctagtcagaactttggccttctgcaggaattctatcagacaacactgaaagcccttgaagaagcaaagaatgagagattatggtttaagacaaatcttaagctttgtaagatcttctttgatattggggaatatgggcggatgagtaagatattgaaggaacttcacaaatcttgtcaaagggaagatggtacagatgatcacaagaaaggaacccaacttttggaggtttatgcaatagaaattcaaatgtacacagagatgaagcacaacaaaaaactcaagcaactttaccagaaagcactcactattaagtcagcaattccccatccgaggataatgggaataatccatgaatgtggagggaaaatgcatatggcagagcgccagtgggctgaagcagctacagatttttttgaagcttttaagaattatgatgaagctgggaatcatagtcgtatccaatgcttgaagtaccttgttcttggcaacatgttgatggagtctgaagtaaatccgtttgatgggcaggaggctaagccatacaagaatgaccctgaaattttggcaatgacaaatttgatagcagcctatcagcggaatgaaatattggaatttgagaaaatcttgaagagtaacagaagaaccatcatggatgatccatttatcagaaactacatatgaggatctgctaaagaacatcagaactcaagtcttgctgaagctcatcaaaccatatacaaggatcaggattccatttatatccaaggaacttaatgtgcctgagcatgatgttgagcaattactggtatcacttattttggataacagaattcaaggacacattgatcaagtcaaccggctcttagaacgatctgataggtcgaaaggaatgaaaaagtatactgccgtagacaaatggaacacacaacttaaatctctttaccaaactatcagcaacagagttggttaaaccgtggtgtctgacgggagagttatctgttttattgtccccgctgcagttttgttatgtgaattaatgtatctattatggagagttagggatgtgtattgcaccaatagtgaaccaaagcgagacccaacttgtgattcatgttctattttataaaatataattgtttgaaacattcacgattgattcaaaaaaaaaaaaatgcttgcataggaaagactgcaaataattctccctttgtttgccttttcctaacaatatatgtttgcccttcataat

SEQ ID NO: 16551 - DNA, 347 bp, Glycine max
  Clone ID: PAT_MRT3847_114952C.1
gaactacatcgcttccgcttcctcttaactgtcgtacactcatatccttttatctccagtgcaacaataagctcacatcataaaaattcacctatgcaatcctaatctcatttctacacttgatcccattaaatctatatcaaatcaagcagggcatgacccgtctcgcctaatactacattcctctctacgacttctagaagcacaaggtccaataccatgttcatccgctcgattataacacataccctaaatacacaaattacgtctagtctcgtacccacaagataatttacaagcgaaaatctgatgtatttctctaactctttgatgatatcactgctaat

SEQ ID NO: 16552 - DNA, 588 bp, Glycine max
  Clone ID: PAT_MRT3847_114953C.1
aaagatcaccgtgagctggagcaggagttgtgaaagactattgaatggattaattggctactataatatatgcggctcgattcgtagaatgcgaaaccgggtgtagcttgttgagcacccgaaccgagaaggataggtgctgtagtcggaggatcttactcgctcccgatatccgaatcacgagaatcccggtgccccagaaaaagtcgctgaggatacgggacgcgaacgagaggatgatgctggctctgaccatactccttggtcatgacgaagaacgccgcctcagctccgaggttcgggggggccctctcaagtgtgaccacctccttaggaactgttttcgggctggacccgcccaaggagtacaactagaagaccatacaatgcagatctacaatttactcctcgtggcgcatggcccgttaatgtgtcccgacggcaacgcaacacagatcaaggagcggtagctacgacgctgacaattgtaccgtcaaagttgcttcttttttctcatccctcgttccttactggtcctctccgtgccttcaccatcttctttttgctactcacttaccgtcattccct

SEQ ID NO: 16553 - DNA, 290 bp, Glycine max
  Clone ID: PAT_MRT3847_114954C.1
tttaaagcacctcgcaaacgtttaagtgcagaaatggatcccacgactctaatacgaatcttcaaatccataaacataaacatgttctgtaaagacgcactgcataacgtatacatcatacatcaagcaaagatacaattacataaattgagtcaatctctgcatcagatgctacatttcatttcatatcttgcagtgctccacattgaggaaaccctcttcatcatcgagatgtcacatatcttcgaatgtctgtccctcaatctgatgcgcagatttcaatgtttcca

SEQ ID NO: 16554 - DNA, 391 bp, Glycine max
  unsure (1)..(391): unsure at all n locations
  Clone ID: PAT_MRT3847_114955C.1
acggctgcgagaagacgacagaaggggggaatgaagtgggtgctcccaatatcacttgctagtaacacttattccttctgcttagtttaaagagaccagttttattatgctcgagtgaagaaagagagagagaaaagagagagtttggtttgcttgttttgttggtgtgagaaagaaaaaccttgctgtagctaaacaacaaaaaccaagtcttcattggtaacaagaagattattatttttatatgatttgtttatttatcacccaatgattgactttgcctagctgctgctgctacgagagaagatactgctggtggtggtgctagcaatagcaagtttaaagttcaaacctttttcaagtaatttataagttgagaaaaaaaaannna

SEQ ID NO: 16555 - DNA, 575 bp, Glycine max
  Clone ID: PAT_MRT3847_114956C.1
cgcagtgcccacgtgaaaagtatatagcccatgtcaaagtgcagcagcagttaacttagaaaggtatcttacagtgcaaataatggagattaatgaaatattcagtcctactttccaagcatttgcgtttggcactgcaaataaagctacaagtgtagacatgactgtggaagtcacgttgtaaaagaggactattgtcacttcatccgggaacacttttagaacatcagcctgtaaaatgaatatatatagaaaagtacacgaaatagttaattatataaaaagagtaaatatgtaaaattctttacattatataatatgtaaaaattaaattcatgagaagttagtttctgtttcacaaaataatttttattttcacaaataattataaaaatatcaccttatttcttatttttgaagtttgatgtatataaaataactgacatctgttttcaccatacaaatttatgaaaatagaaaataaagtaaaataatgtgatattttgccaattatttgtaaaatcataaaatgagataaagcttgaatgtactttataataaaattcctcgagccc

SEQ ID NO: 16556 - DNA, 252 bp, Glycine max
  Clone ID: PAT_MRT3847_114957C.1
catccacgcgtacttaatctcttaattctcttggtttatattacatactatatttttattacatttcacacatttttacatctttcactccatcttacttgggggatttttaacaggtaagacctatcacacactctacaaaaaaactacctcaattttaccccaccatatttcacaatacactttatcaccactcatattattttttaatactctatacacataactatcttcatttttaaaatcaatccc

SEQ ID NO: 16557 - DNA, 371 bp, Glycine max
  Clone ID: PAT_MRT3847_114958C.1
cgaggaaggcctggcttggtttggttgtttttaacacgcccgtgaagtgttgaggatttaagaccgtacagaacattgttttacctaaatggcagtgtaagcgaatgagcattctgtgtacaaataatcgataaactatctagctcaaaggtgggaacacaacttggtatctacctattgaaaatactcataggccacaggattttgaaaggcctgagtgcatattaaacaatgactgtccatcttttctgaatttattccagatttaattgaaggattgcaaacaatggtgatcatcattgacatgcccatcgggtgatacaccaggtcctaccacttgatgaacaaagtactgctcgcacactggacat

SEQ ID NO: 16558 - DNA, 758 bp, Glycine max
  Clone ID: PAT_MRT3847_114959C.1
taatatttaaacctcatccttgagtgtttgtcctacatctgtcgtgcccataggccatttctagggtctgatttatgcgcggcccacggtgattataaattttttttttttttttttttggcaagctatttatttcggctccagatagtattcagctgctcaagtttgagaaacaaagtgttctgctacaagacgccttagaatcttgccagttgcagtcttgggcaaagaatcagtgaagaagacctttttagggactttgaaggctgcaaggttcttcttgctaaatctctgcacctctgcctcatcaatgtttgatccttcttttgggatgattgcacaatttatctgttcgccatatttgtcatctggtactccgaatgcaactgcctgagcaatgtctggatgagatagaaggacagcttcaacctctattggtgatattttctcccctccacggttaataagctccttgatgcgaccaacaaggcgcaaatccccatccgaatctaaaaacccagattcaccagcgttcttcctcttgctaggtaattgtcaaataaattcttggtatccttatagtacctattccctttttttattattttatttgacaacttttttcttatttgaaaatttgaaattgttttaaacaaggaaaaaaaaatataaccagacaaaaataagtgtcgttattacaaggaaaagagtatgctctatgcctctatgtgaagactgaaaaaaaaaattcctcgtgc

SEQ ID NO: 16559 - DNA, 498 bp, Glycine max
  Clone ID: PAT_MRT3847_11495C.1
ggctcgagggccgccctttttttttttttttttaacccaaatgaaatacactttcaatgatacaaaccaaaaagattaaattacaaagcattttgtaacataaaaacaaacaaacacacagcgtttacatcacatgatgtaagattgtagggacactcaatttattatgatcagtacaaagacataaggatgactacaatggaaattttgacccagcagcacatgcaccataattaggctttaaattacatatttatcacaacaccaatcatatttatcacacgattcttatcctttcgacttctaaagattcccattggcagacatttgagatttacgaaatctcctctgtttggatagtcgttccgcaaacctcttcaaggcttctccattttgtttcatgagagttaacaggttcgtgaacgccagtctgcaagttaatctttgaaactggtttctttaacaatgactccccaactttcacgagatcattcaaat

SEQ ID NO: 16560 - DNA, 1023 bp, Glycine max
  unsure (1)..(1023): unsure at all n locations
  Clone ID: PAT_MRT3847_114960C.1
gtgattagataaccaataccggtgatattattatatttggcaataccaatttcagaaggtgttattagttgatgcataatgtaaatgatggagtaatatggagttggaaatggaaaaaaaaaaaaaaaaaaataaaatgttggggggggagaaggagatttttatgccatcaacaaaggaaaaaaaatcgcgcggcgcctctagtggcgtcgcgttgaagaatttggttccttgccttgtggaggctctggggagtgaggactgggccaccaataatggcgcggcggaggcgttgaataanctcgcgagcgtggagaaggacctcttgccggagttcaagggtggatgcttgaaggttttcgagaatcggcgatttgataaggtaaagttggttcgggaggttatgaatgagatgttggaggcatggaagcagattcctgatgtatcggatgaattctctccacctcctcaatcgcagttgtcttcaaaggagaatgcatgtgatgggcgctatcctcctgtctctcaaaattcatgtagtccgggttctgtaatgagtaaattgaggaagaagtcgagccaagttagcaaatcaactccaccagatacatctgctgttaggaatgctaaaaggagtgcattaagtggcgatcggatgagttcaggtgttctgcagaaactgaaccataaccattgggatgttcgaattgctgtgtcaaatgtttctgattgtggtgaacgtcagcagaaggatgaagatgttttggaaagaagaaaaaaggatagaagcagattttttaagccggaaacaaaacgggctctattcgataaaaattctgatgacaagatgcataaatttggtgggtccaaagctggatctcgtgtggttccttgttctgaagagagtcaagactcagatcctgtctgtaatgtaactaaggatctacataggaatgacaaagagagtgaggaattatctttgattcgtgctcattagttcanattgagaagcagcagtctagt

SEQ ID NO: 16561 - DNA, 199 bp, Glycine max
  Clone ID: PAT_MRT3847_114961C.1
gctcccctcgagctcagatctgcgagatctacttctgcttgtgtgtgattcagacttggcaacatcggatctggtctcagccatagagatgtcgcgtagtctggtggtccacttcggcgtgtgcttgtggtcgttggcgactctagtctatgaggccctggtggtaagctgtttgagtgggcagccctacgcgctccat

SEQ ID NO: 16562 - DNA, 352 bp, Glycine max
  Clone ID: PAT_MRT3847_114962C.1
gcgctcctttttttttctttatattactttttttgttatttttgattatgcataacacataacgggggaacattaatacatcacacattacataaaccagtttccaatacagtcacaataaaaccaggactttaaccctaaaccctaagcctacgaatttattgtaaaataataaccttaaatacacactaccgtgtctttaaactttaaccctaagtttttttgcccataagtctacgagctaacagaaagcccctgctccaaaagattaccctatcatcaggagtcgctccaaggctggcttctatcaaagagccccacgaggcatgcctcactggcatcctaaagaact

SEQ ID NO: 16563 - DNA, 466 bp, Glycine max
  Clone ID: PAT_MRT3847_114963C.1
agaggaaactggctattatattaaaatgtacataaaccatgactcgtggtaaaagacatacgactgtagcgctgtttactaaggctagtaatgtacccatttcgggaagatggacgaaaactttccatatgctacgactaggactctttgtggatattggatagatgccttctgcaccaattgaactgctaaaccagcttaacttagtttgggcgactaacaccgctatgaagcgtcaagctctctggacagaacctatactttcctactatggcagcattctaatgctgaacaactatatcaccaatagttctgacattcacttcttgcctctcgtgggatccaagccgcttcatcactatagtgacacccacctgtgtccaacttgaagcttagaatgagctagaccaaacacgctggtcttgtggaggacgatcctaccaactgatgagcctctaatatgacc

SEQ ID NO: 16564 - DNA, 152 bp, Glycine max
  Clone ID: PAT_MRT3847_114964C.1
gaatgcggctcgagaggagctgatatgtgatgttccttatttcgtttacaaatttaagtttttaactataactcccattttcggttatgattatttttctctatacgagaagggtactctccaatttgttttaaacagtcagaactttgatt

SEQ ID NO: 16565 - DNA, 298 bp, Glycine max
  Clone ID: PAT_MRT3847_114965C.1
tatttttccagagatcatgaggaaccatccttattatgctccatggattcttctcactgtgagttattttggtggcaatgggaagcacccggatcgtgttcttgtgccttctgtggcaagggttaataaccctggtggtggtggtagagttcataataggaatagtaaagatgcataacttgtgttcttgttctatggtgtggaaccaatcttcttctctcaaggagtgggttacgtaccactcttttcttggagaggagcgtaggtttatctataaactctccattcaagatttttt

SEQ ID NO: 16566 - DNA, 198 bp, Glycine max
  unsure (1)..(198): unsure at all n locations
  Clone ID: PAT_MRT3847_114966C.1
cggtccggnnaattcccggngtcgacccacgcgtccgcaaagtaacagtgtcactcttcactcttcactcttcactcattcactcactgtgttgtgagttgtgtgagcaccaacatggtgtctctgactccgttatgtttcttttttaccgtgttgatcgctggggggtcagtgatccggtgtgccgcgggtgcagat

SEQ ID NO: 16567 - DNA, 281 bp, Glycine max
  unsure (1)..(281): unsure at all n locations
  Clone ID: PAT_MRT3847_114967C.1
aaaaaaaaaaggctatttcacttatttatacaaaacaacctggaatgggtcaaggcataaaaaaaccaggaacccttccggccaagacaataaacctggaacaaacaattcagtttaacagacaactttgggctttcctaaggcctactacccaaagggtttgggaaaaaaagctaaaaatttttgggggggggggggccaaacccaatccaacctttgaacttttntaaagggccttaggggaaacccccccaaaaatggggaaaaaggatttggggccc

SEQ ID NO: 16568 - DNA, 585 bp, Glycine max
  Clone ID: PAT_MRT3847_114968C.1
acctgagcgttcagttcacagtgtagggtccatggctctgggggctgcgcgagcctccctttccccctctctgcgattcaaaggagaaaaacaaaagaatcattcaaatgaaatgggggcaggacgagcctccctttctctctgtgtgtatgggttgggagagggagcagaaccatgcgttcagacgcggcgttggaagccatagccaaagcttcagaagacagagttcccaacatagttctctacaactacccttccttttctggagcattctccgctctctttgctcacctcttccacactcgccacaatctcccttcccttatattacccttctctgcagttccccttctcgctctcagggttgaagatttgtgctttgaaggccttgagacgtgttacctacttgactttattcctccaaaggaattcctttccgacctttctcgtaaatcaaaatgcaagattattgggtttgatcatcggaaattggtacttagacatattccccctgccaatgattgccccgataatattatgattaatgtaaaccttgagaagagcagctccagtgctgtttatgag

SEQ ID NO: 16569 - DNA, 342 bp, Glycine max
  Clone ID: PAT_MRT3847_114969C.1
gattcttgagatccaaacacaggggggtttgctatacacaagtccgaaacatttttcgagtttactcatccaacattatttcctttcttagaggcacatcttgagcatggtcaggtctagaaaccccattatttgaaaacaccctatattacagtctttttgtagaaccaaccaaaactcaccatcaaaactttctccttaccctatcttagtcttgcctatcaaacttagcacacagctgaaagggccttaacaatccttacactagtttcatatgggatacgattgattttaatgccaccacatccacttatgtgtcaataaagtctatcagcttcactt

SEQ ID NO: 16570 - DNA, 959 bp, Glycine max
  Clone ID: PAT_MRT3847_11496C.1
ttccgcccacgcgtccgacggctgcagaagacgacaggacacggctacaaaaacattgaaagaaatagaaaaagcaaaactggtttctcgcatttcctccgaaacaaaccgtttcgctcgtttctcggatctgcaatggaagccccacccaaaggcgctgctggaagaagaggtgacaggaagaagtccgtttccaaatccatcaaagctggcctccaattccccgtcagccgcgtcgccaggtacttgaagaaaggccgttactctcgccgccttggcaccggcgctcccatttatctcgccgccgttctcgaatatctcgccgcagaagtgttggagctggccgggaacgctgcacgtgacaacaagaagaataggattaaccctaggcacgtgttgctggcggtgaggaatgatgatgagctggggaaactgcttcaaggtgtgactattgctagcggtggagtgttgccgaacattaacccggttttgttgcctaagaagagtaccactgcgccttctgagaagtcctctactcctaagtcccccaaatctcctaagaagaaatagaagtttcattttgtaaaggcttatcgtttttttatttttattttttgggggtaggggttggtaacattaccatatatatatatatagttcttaggttaggtgaaatatgatggtgtaatttagcgccaggtgttcgcttttttgctttttttggtcaccccatcgatggctgaatatgatgttaaatgtagtgggttgccaattcgtgtatggaagaagcctttttcatttacttgccggttttatttattaatttattatctaacttgctgcgtttgtatcctgctaaatttattgtttaagcctttaagtggtggcttacttgcaatgtaagggatatgaccaattgtcaattgtatggatttctatcattaaaaattattctgggt

SEQ ID NO: 16571 - DNA, 434 bp, Glycine max
  Clone ID: PAT_MRT3847_114970C.1
ggctcgagatgatttgtggaaccatatgctactcctgacttaactctgcctacttgatatgaccatgctacaagactcctgcagctgcggctcactgagcggctactccatatggataaattggcatgatgaagatgcgcatgcgaatacagagaatgatatggaaaaagataccgaccgacggctacattctgaaatcatggaaatattactgtctgaatacataattctttgccaaagacctgttacttaatgtcgtgaaaccgcttattgatatcctcttgagggtttctagaactgggggacatattgccttgatgcccaggaatcaatgatcaactgacgtcactattactgatcttattatgatattatgtctggattcgatcgaacaattgtgactcaaattactcaggttataaacatacgggtca

SEQ ID NO: 16572 - DNA, 367 bp, Glycine max
  Clone ID: PAT_MRT3847_114971C.1
tttcatgcgggggtgggaaagaatgcaatctgtctacttaaacaaaaataaaactgatagggacatatagaacctagctcactctgtcgagaataaatcattatgcaatgaacaacttgcatgcaggacatacgtggggaatgaatatggaattaattccatgcatagctattttctggatgatggatagacacacacggaagaattaaggtatccatccaaaaaaaaaagggatgggtgggtgtctccccccgccgattcactacctagcaatgaaagggacattaatgggcctttgtcaagaaaaaatatatcaaacctactggcagatcaaacgagtgcacacactcaggaagtaattaataaa

SEQ ID NO: 16573 - DNA, 741 bp, Glycine max
  Clone ID: PAT_MRT3847_114972C.1
catgattgacattggaagcaagctgcgggatacaatcaaatcttttggctgtgtgcagggaattctgatctcaaattgtccacggctatgcagcgaaattcttgacaagttgaaccacccttttctacctgcattatctatatgcttccttccaggtttgtaactcgaatactactttaaaataagtaacagaatgattagtattgatcaattagaataactggtaggaacattaggatctctttagcgatgacagagttccaatatgtcacatcacaacctttttatcatagatatccttgttttatagataatgatttcacaaattatattgtcttgagctggactattgcctttatttcctattacatttaattctgaagctaaagagtagcaaggattttcacgtggctcctttactatttaatttactaaatttgttaaatatttcaaacctgcagaccaaaactcacgtttgtttgattactaattattgtcctggaggagaattattcctgcttcttgaccggcaaccaactaaggttctaaaggaagatgccgtgagattttatgcagctgaggtagtgatcgcattggagtaccttcattgtcaagggataatatatcgagatttgaagccagaaaatgtgttactcaagagcaacgggcatgtgtctctaacagattttgatttgtcatgtttaacatttagcaagccacagcttataatttcagctcccc

SEQ ID NO: 16574 - DNA, 174 bp, Glycine max
  Clone ID: PAT_MRT3847_114973C.1
cgttttgactgtatgagttgattttactaatgactctgcaagccatgtgtcacaataaagtttatttactagtttatcttgcttatcatagttagagcagtttgtagagcgagaaagtaatcatggccctttgaaaatttgtcctgtcccaaaatgggattgtccttcactgaa

SEQ ID NO: 16575 - DNA, 499 bp, Glycine max
  Clone ID: PAT_MRT3847_114974C.1
attattacctttttttttttttttttttttttttttttttttttttttttttttttttttttttttttttttttttttttttttttttttttttttttataaaaggttttttttttggtttttaattttttttttttttattatttttagtgtttgcataagagaaaaaaaaaaattggggtggcttggaaacaacacaagaaacaaaaaaagcagggggggggggggaaaaaccccccccccccaaaaccgccaaatgaaacgctaaaagcattgacccaaaaatcggacaaaaaaaaaaaaaagaaccaatgggtgcagcctctttggtaggggcaataatgacacaaacaaaaaccctaataagcctcgcaaaaagcccctcattagcattcttattcgaagacttctttcaaggaacgatttcaagaaagccaacaatcttcaaaatcttaaaaaaaccggtaacaaaaagggcatcgtggggacaagaggttcc

SEQ ID NO: 16576 - DNA, 310 bp, Glycine max
  Clone ID: PAT_MRT3847_114975C.1
ttattgtatcccatactgtgaaaaccacttcattagacacatgaacattactcacacttgtaacgagaatggagaaacaagacatctctcactacaggacaagaatgttgaaccacaacctgaatttaaaaaatacattaacaacagtcgtgaaagaatttgttaacggtgagtaactaccaaaaaacaaatcccagggagccaagctgagaatggttagacattccaaccaaagaaagaaaattggcttgggcaaaaactaaaaatccaattatgggagctgtacatttgtacatataacatataaaga

SEQ ID NO: 16577 - DNA, 475 bp, Glycine max
  unsure (1)..(475): unsure at all n locations
  Clone ID: PAT_MRT3847_114976C.1
tacggctgcgagaagacgacagaagggaatgcaaaaggcgacactctccttcctacgtggcatgtcacgccaatgccagtggcggcttcaccattctcgctagtggctatggcgggttaagctctcttgctagtggctatgacagattccacccaaataacagaccccctccgttaatacttttaaaacagaccccaatccgtaaataatttttaaaactggtcccctacagtaaatttgccgtaaggagtgtctctggtgcagcaaaatttgtagattaattttaatgattgatgttatacacttacaaatattaatttttgtacaatacaaatatttttatattattaattaatcattaattagaaattattttatgtatgacttttaaattaattattacaaaaattaataattgaattataactattttatattagaaatatattctaattaaattctaacanaatattac

SEQ ID NO: 16578 - DNA, 302 bp, Glycine max
  unsure (1)..(302): unsure at all n locations
  Clone ID: PAT_MRT3847_114977C.1
tctagatcgcgagcggccgcccgcgattctagaacctcaccagttttgcgaccacctttgttcccctttggggaaagtacttcctcttttaagtactagctcccataaataaagcttaaaaattatctctcttataagggtagtgctacacattaaaaccttanaagagagataatttttaaggttttaatgtgtagccctacccttataagagggctagttattgtgctagaggaataacggcttgtgcttcaatgaggtggtttttgaggggcgggcgtacataggcgttcgcgacactg

SEQ ID NO: 16579 - DNA, 254 bp, Glycine max
  Clone ID: PAT_MRT3847_114978C.1
tgacgacctatcggacaacaattcaaggggctgtaagtgcgtcatctttcgtcaatatgatccttatgtgcattaagacgtgctgaaatttgacaacggaggttagtcccataatcattatacctttggaatctaacgacagccttctcctgtctgccaggatatgaccattggttgcacaatgtgtacagattgcattacctatgctcattctactgtacattacacaacagcatttgtcactcttacatcat

SEQ ID NO: 16580 - DNA, 724 bp, Glycine max
  unsure (1)..(724): unsure at all n locations
  Clone ID: PAT_MRT3847_114979C.1
ggataggatggtgggtggtgtatctgtggcggtggagtcgcagagttgcccacgttggtgtgtggatgctctgcccaccacccctagtatgagtgttttgtgtctcaagaggaagcacttgctgagcctcaccacttccttcgttcagagtcacagtgttaatacaattttcaacaagcattgcagacacaaggagaagactaagagactcactattgtcaatgagctcggtggtcaatatgaggacacttttcatgatgtcaaaaagcaaatactcaattatttcacatacaaggctgtgaggactgttcttcaacagttgtatgagatgaacccacctcaatataggtggttctataatttcgttgcaacaaacgacccagcagatgggaaacattttatacgatccctcgcaaaggagcaacatcaacttgctgaaagagtgatgataacgcggcttcacctttatggcaaatggatcaagaaatgtaatcacgctgagatatatcaagaaatatctgatgaaaacttggagttgatgagggaacggctcatggaaactgtaatatggccttcagatgacacaaacacagaaaaaatcggctgataagttaggactnttcgatctcttcttttcccttcagtcttttaatcttgcctctccctagtctatctaggtttaatttttggtttcaatggcaatctgtaaattgtgtatatctct

SEQ ID NO: 16581 - DNA, 386 bp, Glycine max
  Clone ID: PAT_MRT3847_11497C.1
ccgccctccgccgccgccgccgccgccgccgccgccactttgtcccctaaagtgccgccaacgcaatcccgtcaaccctccgctgcctgttgaccctataatatagtctcctactcctgcacgccaccggcctctactacctcttcatcatctaattaattaatcagaagcagtggagaaactaaactaaagttaattagaaaactaaaagttaatgtgaatgaagatataatgtgttagcaaaaaaaaatgttttatagcttcttttttgtttttttacaaaaagggtgtttttggagaggggaacttttgtagtttgtagtagtagtagtggtacttcttttcaatcgtcaatgcgtatttgattatttgcgaaaaaaaaaaaa

SEQ ID NO: 16582 - DNA, 319 bp, Glycine max
  Clone ID: PAT_MRT3847_114980C.1
caacatttttgttcaaacaccccacgagcttctccagcattttcaatcctcttctcttttatcctcatcgctctgcaccaaaacctccccactcctcaattatttatttatctctcccactttttctcacacacattttctcaaacacatggtgtcctcactccttcacttcactctagcttaaataacccaacaaagttcgcttcaaacctcaaccatggccctcgaaacgctcctcgtgaaggtcaaaaccgccatatcaaacagcatcgactcggtcccgccgaagctcctgaagaagaagccttctttcaaagcg

SEQ ID NO: 16583 - DNA, 321 bp, Glycine max
  Clone ID: PAT_MRT3847_114981C.1
agctcggaattcggctcgagtctgctcctcgggttttgaaatttagtgcggcgacctataggagtttcatggtagactcgtcttgtatatggtaacttctattatgtcagacatggcgagcactggtcgttgaatccggatgcctcttgtgatcgtctgagaagttgtcatcaaggatatagaccaggaaatacctgctactgacgattgttatccttgcagctgggtaagaataaagctttctgaatcactggcctagtgatctcgatagtggcactgtataatgtgaatgtatatgaggagacggtctaaccacctcca

SEQ ID NO: 16584 - DNA, 527 bp, Glycine max
  Clone ID: PAT_MRT3847_114982C.1
agaaaaccagagagaacattcggtttagcctcatcatataaaatatatatggtcggaaagaacacctacaagttcaccaaaaaacgggggaaacctataataaaattcacataaaaacaatcagaattgaggtatagggaaggaaacatagagaaaattttagccatcaaagaataagatgccaggggtcgggcacaagtcccttgccaagagtgatgggaccccttttagtgaagcaggtaccttctgcccctagaggggcttaaccacttcccatgggaagtgagggacatctctgccaaagttggcaaatgcaggattcttcaagaacctgccatttccacccgttttgagatcaaggttgaagggatatatgccccgcccgaaagtaaaactttccttaacaatgctgaggatagccttggcagggatctttccaggggcataagtgtttgccaacacagtcatgggctcaggctcaccaatggtcttggaaacttgaacaattgccctgctatcaagtccat

SEQ ID NO: 16585 - DNA, 164 bp, Glycine max
  Clone ID: PAT_MRT3847_114983C.1
aaaaagaattttaactttgattttagagaaactaaaaatgcaagtccgttgtttaacaaataaacaagaaattgtgtccccacccctctaaaaaaaagaagaaagaaacttaacctagggcaattacttgattgtaattgggggttacacaacagtaaaaacaa

SEQ ID NO: 16586 - DNA, 1597 bp, Glycine max
  Clone ID: PAT_MRT3847_114984C.1
aattcggctcgaggctcatcgtttgggtcagacaaaagatgttactgtttaccgacttatatgtaaagagacagttgaagagaagattcttcttagagctagtcagaaaagtactgtgcagaaccttgtcatgactggtggttctgtcggtggagatcttttagctcctgaggatgttgtatcattgcttctagatgatgttcaattggaacagaaattaaaggaaatccctcttcaggtaaaggataagcaaaagaaaaaacaacctatgaggggtattcgggtaaatgaagacggtgatgcatcaatggaagatctaacaagctctgtagcccagggtacctcagataatgatctttccatggatccagagggttcaaagtctagtaataaaaagagaaaagctttctcagataagccaacttcaaggccaatgaattcccaaaagatgagtgaatttagtactacgcctatggacgatgaattggatgttgttgatccagtgggtcagaaacccaagagacccaagaggataaagaagaatgtgaatgaaaagtttgaagatgcttttactgggattgctgccctgatcccagagcagacccaatttccacctccaccaagcgattttagtgccgggggttctaaagcagaatcaggccaagacaactgaagacatagtgattcttaaccactacaaaaactttggagttactattctcagccctatggattgactttttttgtggagactgctaagttggctctctggtttatcaacagtttctagttccctatttcttggttatcctctcactgcaaatagtggctgcaaagacaggagaagctgtatatcctagattgtatatagtagtccttaatgatagatattagattctcctcccttccacagtttgggggggcgggggctttgtagtttgtacagattgagccatccttacttgagtcgattttttatgttccacaagcaatatttataacaaatgatgagtaatatacggtagtcttgctactcgtatttcgtccgtcgcgtgtcagtctgctgcatgataattagcaccccattatcaatatatgatttgagatcactgctgaccaagtttaagaataacttgttcaattcatccggatcataaaggggtggtggaattcatcaaagttagaagctggtggtggagtatcatgtcttattatgagtggaggtcaaattctgaaatgtttatcttattgtaacactaggtctgcaatttgatgtaaagggcaaggttactttttttactcccatcatttaataagtattgatttataaaaacgaatgacttgttcaaatccgatcatgctgtgagtgctagtaatccattaaagctttttgaagtaatttttatcgtggtatttattgaaagctttgatgatgtctggtgggggtgatgctggaccttctgatggtgaccagattatctatcactgcacaattcggactttggatggagtacttgtggaatctaccagatcagattattgaggcaagggcatcccaataagacatgttttgggcaaaagcaagatgttattggga

SEQ ID NO: 16587 - DNA, 1564 bp, Glycine max
  unsure (1)..(1564): unsure at all n locations
  Clone ID: PAT_MRT3847_114985C.1
ccacgcgtccgcggacgcgtgggcaaaagtgaacctctgcgaccgcgagttacattgagaagacgaagcctgagtgtcctcaattttgattccatgcattgtgtttaaattaacaggtgggaagcggaacaaaaggggtttaggtcaaggttgtgacagggaagagaatcaatggaagacggtgagattgaagagggatcaattggcggtgtagaggaagaggagcaatctccagaaccgcacaagtcggaggaatctccctacgaaatgttgcgcaacagcaaggcttccgtggagagcatcgtcgccgatatgctctccattaaaaaagagggtaaacccaagcaactccttcgagatctcgttactcaaatgttcctacatttcatcaccctccgtcaggctaatcgcagtattttgctggaggaagaccgcgtgaaaaccgaaacggagcgtgccaaggcgccggtggatttcaccacgctgcagcttcacaacctcatgtacgagaaaagccactacgttaaggcgatcaaggcctgcaatgacttcaagtccaaatatcctgacattgaccttgttcctgaggaggactttttccgcgacgctcctcaagatatccaggactccgtcttgtcgaacgatgccgcgcacaatctcatgctcagaaggctcaatttcgagctattccagcgcaaagaactctgtaaacttcatgagaaattggaacagcaaaagaaaatccttttggagactattgcaaacagaaagaaattcctgaccagtctcccttcacatctgaagtctcttaagaaagcctctttgcctgtacaaaaccagctaggacttcatcatacaaagaaattaaagcagcatcattcagcagagttgcttcctccaggtctttatgtgatttactcacagctgttggctcaaaaggaggcctttggggaacccattgatctggagattataggaagcctgaaggatgctcaagctgcggttcctcagcaagctcacaaggacactgacattgcggataaatggagacacaaagacccccagatgatgctcctgatgaagagaaacctgtcagacgcggagattattaaaaccttggctagaagttaggagagagtgagaagggattgtaggataaacacaagggaggcttttgttgctgcatctctgtgtttnnngagacatgtttggatttgattctcattttatttggaagcgtatatgttgtgcttacctgttaaatgagtgtcatcatatcaattttgtgaatcttttaaataagcatcttgtgtcataagataagctaaataacctgtaaacaagttcttccaaacacatcctgaaaatgaaatagagatgaaacaaataaagcagaaagaaataggaatggataaaagaaatagagtgaaaaaaggtacattggttggctgaaaagaaataagaaggaaagtgtcagagaaatttctctgtttgtttggatgagtggaagagtaaatagaaataaatcaaataaaaagtgtttttaataatattttattttttt

SEQ ID NO: 16588 - DNA, 567 bp, Glycine max
  unsure (1)..(567): unsure at all n locations
  Clone ID: PAT_MRT3847_114986C.1
cagaagtttacgatctttcacttttccagttcttgccttcattttgctttattctaagcttccccacaaggagcttcgctttatcataagttcagttccaatatttaacttgtctgcttcaattgcttctaatagaatttacaacaataagaaaaagatggtttggaacttgcttttcctcattttgttgggattacttttaatgagtcttgctggcaccgtcacaagtttcatggcatcatattggaactatcctagtgggcatgcgttaaaaaaattgcatggaattggctttcataatgatacagatgaacggtgggtgcacattgatacattttcagccatgaacgggatatctcgcttttgtgaaagtgatttcccatggaggtatattttacttctttctttgcagnttgctaatgatgcatcaagttggtaattgcatggatgcaaacaaacctttccttgactaaatctcatattttgtggaccaatgaaagcatgccttcctcaagctttatctatgattcagtatccacaggaagggttcaggtctctaatttcatt

SEQ ID NO: 16589 - DNA, 329 bp, Glycine max
  Clone ID: PAT_MRT3847_114987C.1
gtgcttaatcggatggcgggtaaactgactttaacccagggcacttctcgggcgtgttaaaagaatgcgcctttctataaggggaggagctgcggcactgatcgttagtgtaattgattatgcctaaagctgatctttcactgtggatatatattgttcaagaactagtctatgtagcaaataacaacacttgtccttacattaggaagctcggtctctttgttcatcgaattcgtaaatatggctgaggacaccatcaattttgaggctccttctcacaaggtagtgctgtttggagagaatcaggaaaaagctggattgaagttttt

SEQ ID NO: 16590 - DNA, 2187 bp, Glycine max
  unsure (1)..(2187): unsure at all n locations
  Clone ID: PAT_MRT3847_114988C.1
attcggctcgagaaaagctggaattttagagcttgataagattattggattcaagctctctcctgattgcttagaagtgcgggcgaggatgtttattgctcttaaggattatggcagtgccataaaagatatcagggcattgttaactttggaaccaaattatataacttcaaatgaaaagatctcagggaaatacttggttcatctccttagccatgtggtacagcaaaagagtcaggctgaatgctggatgcaattatacgaacaatggtcttctgtagatgatgttggttctttggctattatacatcagatgctggagaatgagcctggaaagagcctgctggagtttcgtcagtctctactccttttgaggttaaactgtcaaaaggctgcaatgcgcagtttgaggatggccagaaaccattctagctcactgcaagaaagattaatttatgaaggatggattctatatgatactggctatcgggatgaagcgctggctagggttgataggtcaattacaattcagagatcatttgaagcctattttctaaaagcatatgtgttagcagatacaagtatggatccggaatctgcttcttatgttattgaacttctggaagaagcacttaaatgtccttcataatgtcttcgcaatggacaagttgttcaaaacttcactcgagcactgtgacagtgcaatgagctatattctgccgctgcttgccatagtaccgcactacctagctggacatgggtagctcggggagtatttatgtagattgtggtaatcttgatcttgcagaggcatgctatgagaatgcccttgcaattaggcacacaagagctcatcaaggtctagcacgggtttatcatcagaaaaatcaacgaaaagctgcatatgatgagatgaccaagctaattgaaaaggcagagagcaatgcctcagcatatgagaaacgatcagaatactgtgaccgtgagatggcaaaggttgaccttgatgtagcaacccaactggatcctttgaaaacatatccgtatagatacagggcagcagtgatgatggatgagcaaaaggaatctgaagctgttgatgagctcaccaaggccataaatttcaaacctgacttgcaaatgcttcatctccgagcagcattttatgaggcaatagtgaactatcatcagctcttcaagattgtcaggcagctctatgcttagaccctaaccatacagacacacttgatctgtatcaaagggcacggaaactaagcttttaatcataaatgacatgcacattaaatggctaaaatgtggagatcttgattaggaaattgctggggcatcccaactttgttaagacacaagaagaggacatggataatcctactgttgaaacaatgccaagaccccccaagaagcaatacttggatgattcgaggaaaagatggagtcatgtgtttcacatgatcagataggaagatgattcaggtgtacatcagaagatgttcagaatgagaatagtaactccattgatataatatagattcttgtgagccttgtgcacataattgatctcacactattcacacatttgtacagtgacagggttatgatttatagagtgattggcactttgtttcctacattagcacttaaagagtgtcaggcggctctttgcttagacccaaaccatgcaggcacacttgatgtatatcgaaggatacaaagattgaacttttaatcttaaagtatatctgcattagaaagataaaatgtggagatcttggttggacaatggggagttcccaaatgactttttttacctcagaaatttcatgacgatcatctaagaacaaaggtagaatgggatgattcaggtgtaaagcataagaatttcagacttgtagctctccatcggtttgatatgtattctcgtgagccatatttatagaatttgtctcacattagttaaacatcctcttgtacagttagtgttataaagagattcagacagcttgtttcctacaatatagaaatcattttcctgcttttatttgacaaataaggaagaaagcataaacaatcactttttccttctttgaaagtagtagaccttgcaactagaaattcacatgtccgttttagaaagaatatgacataccanatgggtgagtgtagact

SEQ ID NO: 16591 - DNA, 132 bp, Glycine max
  Clone ID: PAT_MRT3847_114989C.1
tgtgttttttcgacactgtcataaccttaactggcaaaaaagacaacacattacaatggcgaagtatacaagattcacggcctctcaccatgcactggaggtactaacgattaacacctcggtacctccaaa

SEQ ID NO: 16592 - DNA, 213 bp, Glycine max
  Clone ID: PAT_MRT3847_11498C.1
aaaccagggaattaccttttacctttcattttcctcaaattccaggtcctttaattccggcccggtttaaaatggcggccggaaattaccaaaaccgccaattcctggctcccaccttcaaaccttaaaacccagatttgtatccagggttctttaccagtccagaaaatttatatctacctctgaattccttattagctaaaataccttatg

SEQ ID NO: 16593 - DNA, 612 bp, Glycine max
  unsure (1)..(612): unsure at all n locations
  Clone ID: PAT_MRT3847_114990C.1
ccacgcgtccgctttttattacgttttctaatttattgcattttatttcttcttttctctctctgtcatttggtactccattgttttctctcccccgtttggtattccatcatcttatcgttctctcccctttctctcttatttctctccattttttattttcatttttccaaattagggcttcgttttcgcatgtaagaaataagggcttcgttttcggcttggtttgcaagtatgatggtatttcaagccacaaggttcgacctttttgttcataaaaaacgttgtttgttgttcgttttcagcatggtttgtaggtatgatggtatttcaagccacaaggttcgacctttttgttcataaacgttgtttgttgttcgttttcggcttggtttgtaggtatgatggtatttcaagccacaaggttcgacctttttgttcataaacgttgtttgttgttcgttttcagcttagtttgcaggtatgatggtatttcaagccaaaaggttcgacctttttgtattntatcatgagttntgtggtttgtatacaaagcttttcgatttttcttgagtgggtttgtggtatgtatcattttgggcgggggtttgt

SEQ ID NO: 16594 - DNA, 246 bp, Glycine max
  Clone ID: PAT_MRT3847_114991C.1
caggacagcataaggacaccctcctgtgacttttgccattgctgcatgcgagacacagaatgttaatgtatctggtttgccatgttgtgggttgtctgatggaagtagcacaactgcaaaaggcatgtggagtaaaatggtgaaggatgggcaattttaccaggagaatttcaattctggacctagcatgccctcatcgcctggagagacactatgtgctgctgttgcagcttccatgtgggttga

SEQ ID NO: 16595 - DNA, 306 bp, Glycine max
  Clone ID: PAT_MRT3847_114992C.1
ctagctcaccacccttctttcttcctttttttttttattcgaaaaatacgccaagagttataccggggcctggggatgtctagaccattcctatatatacaagttccttaccaatattttcatacatattacctatatttattatatattcagcatcaaacaccattttattaacacccttatctcgaaactgataattctttcaatacttttacactgctacataaagctttccaaatcccatatgtatacaaattcctaggtatattaccaatggatttatttcccttttaactaagcatttta

SEQ ID NO: 16596 - DNA, 137 bp, Glycine max
  Clone ID: PAT_MRT3847_114993C.1
aaaaaaaggaaaactttgggcccaactttattcaaggttggctaagggagaaaaaccatttttcaccctgaagggggcaaaaaacccaaaatttaaagagggagggcccggttcctttacttttgggttcttttaaa

SEQ ID NO: 16597 - DNA, 446 bp, Glycine max
  Clone ID: PAT_MRT3847_114994C.1
tggtttcgtgtttacgcacacacactttacacatgaatgacgacaatggaaggacgtgcggaaattcctaaaaatgcagggctttcatagcacgaggctcatgcctgatttcttttgttgcatgcccatactgacataccaaagatcttccatcaagacatgtcatgcataggatcccgcttgctcagaagatctgactatatcctttaaaacataaccagcttccttaacattatgcccagcattttcaaaatgttccgaatttcctaggaaaatgataagaactgctgaatggactggatcgccaatacagaaactcaagggcccagaagattgatttgaccactcatcaactacacatttcaaaaccactgttgggaccacacacctcatattgcaagagcaattactaggaatgtgggtacgcttttgtccactcacatgca

SEQ ID NO: 16598 - DNA, 407 bp, Glycine max
  Clone ID: PAT_MRT3847_114995C.1
gtctttccaactgcactagatacattcacacataacataactttcctgctaaacaagtggtacgcgattacactatcagagctcttttggctttcaatcatacaactcaactctgatgctgtagcaaagcctaggttctatggcttcctaggagcccatttgagaaaacacccacaaagatacttcaaaatagctgattctagaaatgtgctctgacataatgcttatgggtctgagcctatgcatgtacttcgcaagcttaagcttgatcggagccattgctacttattggacatatagaggaaagagtaaagggactattttagctcatggtgaaactgctatatcactgattgatgatgattctgatagagcaactctggattggtcgcctcctcacaaatgtg

SEQ ID NO: 16599 - DNA, 299 bp, Glycine max
  Clone ID: PAT_MRT3847_114996C.1
ttgttcgcgtggggtctacctcgaacagcactggagccctggtgcacaggtcagcggagactatggtcgatggacacaacagagggacctgagacaagaagatcagaccggcaggacattccgcgcatgaggagttgccgattgtgcaatcgcatgatcatacacaagttctccacgacctgagattaggtggtctcggaagacactgctaatctacatattctcctctatgctaactgcgtgcagtaaatagaggccgtataagtgtgatggttagactcccgggatactttacgact

SEQ ID NO: 16600 - DNA, 604 bp, Glycine max
  Clone ID: PAT_MRT3847_114997C.1
tgctgaccctgaggaaatgggtttaaaagatcttgttaagccccatgtgtatgacatacttacaccgcttgcttgcgccattgtttcatctcacggaaatgatcatgtcaactcctatgttctggctgactccagcctctttgtttatggctacaataccatcatcctgacctgtgttactaccaaactactgcttgctatcccgcccatattgaaagttgctgaagtgctttccctcaatgtaagatctgtgaattacaccgctcgaacctacatctttcccggcgctcatgcctatccccatctcaactattctgacgaagttgctattcttgatggatactatggtaagattatggcaggaagcaatgcttatattatgtgtggtcaatactcagctcctaactggtatgtctactctgcttctgcagattctgctactccgagctacaatgctgacactctaaagaagagcatgactggtctgtacagagagcaagcacctgcttccgacaataagccagctgcttcagctgtcataatgactgttaattatggcaatataagaaaccttccatatgctgagagttgtgactctgactac

SEQ ID NO: 16601 - DNA, 462 bp, Glycine max
  unsure (1)..(462): unsure at all n locations
  Clone ID: PAT_MRT3847_114998C.1
tcaattatgtcctttaatctcaacacacctatctagttgtcagttataattgatagaaagtgtcatctaaaagaaaacagaaatggacagttggcaccataagtagctagtctattctaactccactaatctctaatgctgggtttactccactattggggtctcctcatcacttccaattttgtgattctgctctatgggtgctttagggattttgcaatccaacttgtctctttaggaagatgcaggacattttctggagaaatagttaccttgtttggacaaggcaacctcaatactcaggaagtattttaaattgagttgctaatttctcccttggactttgacaattttagcatcatcatcacttgcaataatcatataatttacatagactagaaatggtatgactntaccttcgtgtgaatgttntatatggaccttggttttgactgtatctta

SEQ ID NO: 16602 - DNA, 370 bp, Glycine max
  Clone ID: PAT_MRT3847_114999C.1
aattcggctcgagatcagaggtaggtagggtcgctccatgcttcatcttctccattcctattacatcatgcttttcttcattcattcattcaacaaccttcatcgctttccccatagctgccaatggaagcggcggcgacggcaacggcgactgttctcacacccccgtcggctccgcccaggccgtcggttttcctcggaagaccctccgcactcgcattccgttccaatcttcgcttctccactaagttgagcacttcagtgtcgttctccaagcaaggtcacgcgagacacagagttggaagtaaaaggggttttgtagttagagctgcatcatttacaccagagtcatctgaaccaagttccaaga

SEQ ID NO: 16603 - DNA, 634 bp, Glycine max
  unsure (1)..(634): unsure at all n locations
  Clone ID: PAT_MRT3847_11499C.1
cggactcgtgggtgtaaaccaggactgggagaaggacttcccaaaggacccctccgggagttttgatcagttcaagaattttatcaggtcaaattatgagatgtgcaaatgggtaggcctgtcacttgtttctgtacagggactctctttattattggcaatgatactcaaagcactagggccacgtcactattatgacagtgatgatgaatatgctcctgacagggtgccactcttgaagaatgctccacctcattatgttgttgatccaggatatgcacatggaaatgatacatggaggagacaagagaaatagggtaaggccaatgctttcaactgaaccttgacgtttggagccatggaaggtaggagaggtagtcctttcggatgccagttggcttagaaaaaggacttgtatgctggagatggattagctattggattaatgggtatgggagaaacaagtgcttattgtgacccttgcatctgttacaccaatttcatacagttatgagcaaaatattttttttttatttcttttttggtgaatgaacgtatgtatcattatgattcctgtctgtatatagtaaataaaatcctcttcatgatagannnnnnnnnnnnnnnnnnnnnn

SEQ ID NO: 16604 - DNA, 480 bp, Glycine max
  Clone ID: PAT_MRT3847_1149C.1
tactagtcagtcggcctgccctttttttttatttttatgttgacatatatttgaaatccacttgattttaaaagtacagggtaattatgtaaaacaattcattttacaaaccatataacctgaaatatatattatttacccaaattacaaaaaaaaaaaaaataccttaatcttgtgggaaattcttacactgacctaatgggacaagaaacaacaagtttctaggggattaccagggaatttattttgccttctaacatatctactactctaatcatagttatgtctatcctttaaaaaggatcgaacgcaccataagcccactacagatattctgtttactatcaaattattttccggtgccattacctaattatgtctcaaatattcacccttctctatcctgttgtggatccaatgtgggaagtatatttcacttgtgtgacttgcttccgcattaaattattttctccctcccac

SEQ ID NO: 16605 - DNA, 1078 bp, Glycine max
  Clone ID: PAT_MRT3847_114C.1
caggccaatgagactgcagtttatttgactattttatggtaggggaagaggctgagtgttgctgtgaaggccctgatgtcagtaatgggggtggtggattctgccaggacaggagagggtggcaggtaggttagctgcatcccttcacgagaatttgaatcctcaccaaaaggggcaccatcctcttccagttcatacttcccatatccaacaacatgaacgctgagcattttacttccaggtcctctgtgagccttgaaccagctgaccaggtctgactttgagaaagacttcagggcttcaatctcatgggcaaggcggtcaaagagatactgctgtgtcaccacttcattccagttcctgtccacctcctccccaaggtgggtgtcctcacactctttcaacttgatcagtgctgtgacctgagtattgaatgcatcttctgtgaggttctcaatcttctcctcaaagctggaaagaaattcctctatcttcttgtcaacagtttcggagttgtatttggttgcctgagtcccaacagttacagaaaatcctagaattccagatgtgttcctacaggttgggtagacatggtacccaagggtctgcttggtgcgaaggaagtcaaagcagggctcttccatgtgcatcacaagcagctccataagagtatattctctcagactcctcgtacctgactggtagtacacagtgacttcagagttggcatcccctttgttcagagctctcactttgcacaggtggtggccgctcggcagctccaccacctggaactgcacaggcatctcccgctccaggggcgcgaagttcagtttgtcaacaacatattttaggaaatccatcgattccgtgcttgtgacattcccttggaccaggccctcaacaaaaagctgggatttgaattccttgacaaagtttagcagagaatcaagggaaaggccatccatcaaagcttggtacttgtcaatcatagaccagcgggaatattccagaattaaaagccgcacatctttggccagagtctcgggcttgatgaggatgttgaagtaggtcttct

SEQ ID NO: 16606 - DNA, 294 bp, Glycine max
  unsure (1)..(294): unsure at all n locations
  Clone ID: PAT_MRT3847_115000C.1
ggttgtttctcattgggctgattccccanacaagattgatncaggcaatagaatcttgtcntgtgcaattgcattgngtaagtntgtgtatatataccattcgggatcaagangggantcattataactatntgtgaantgtnacataatcaanaccntatttgttgtgattgatatcgtgcaatatncncgtnattaccataatatatagagtcatatgatgtggtaaattgttgcacaccttcaggttantctatcttaaagntacatttcttaaaattctaatctagcatg

SEQ ID NO: 16607 - DNA, 498 bp, Glycine max
  Clone ID: PAT_MRT3847_115001C.1
gaaagatggtagcaggaagatttgtaaatgcttattcaagaaatgactggatgcttggagttgcttgctttccgtgccagtctactttctcaaggattagctggaatccaacccgtcgatgtttctgggatccaaaatgttgacgtgacagatcacatagagggccattcttcatatttgtgggctacagaacaggtcctagatgaacttgaattagatacgtattatcccgtttataacaatatcccaaagaaacatacagtgtcgctgtcaagtgaatcgggttctcctacaatatcccagagataaggatcttttcactaaaatgcttgtgttgaatgaacgccttgtattgtatttgtatatggattactgtatagctttctagccacatgagcatcatccattactaaaaccaaaattctccattttcaatttgctatactataatgaaaagaaatctttgtaaattttttaattatcaatatactttcagaa

SEQ ID NO: 16608 - DNA, 114 bp, Glycine max
  Clone ID: PAT_MRT3847_115002C.1
gcgacatcaacacacatggcaagagcgtcttctgcaatctctagtggtggctcaatggctggccctatgaccagctcatgatgcgcatgctcaccagctaatgcgtcagctaca

SEQ ID NO: 16609 - DNA, 373 bp, Glycine max
  Clone ID: PAT_MRT3847_115003C.1
ctccaaacaaattcagtgttccacaaggagaaatatcaactgctgttgatgctgatcgggctgcttgatcagatgttataaataaaggacacactgtcaacacttccacaccaagcttgtactaatcaaaatgggtttaatctcatttactaactaagggcccaacacacatccttgaatacagaatgattattatcaagggactagcttggcagcttctgcttgtttgtcaggctatcaaggtccaagaagcacccatggtacacagctgtctgtcccttctgatgtgtccttactttctgatcgacaacccaaacatggcgccgacgttggttatcttatcagttctcctgggaaagatcttacatctcaa

SEQ ID NO: 16610 - DNA, 360 bp, Glycine max
  Clone ID: PAT_MRT3847_115004C.1
attgttatggagattgagtttaagtgcaaagttgaatgtggtaaattgcgagatacacgtaaacatgagatgattgattgtgacataatgagatgtgaaattgtgaacatgagttttagttgtaaataagtttgtgattaacacttgatgtgactaattgtattgtgagctgtgaattatacaataactcgaccagtatttatattgagaaaagtgtttatgcgcagtgttaaagagaaagtgtagcttcttagttaggaaataatgttaaatggtaacgcaatatgttaaacgtgtttgaaacacgagtgtgaggtcatggatattatattatttatgagcagtgtctgcttgcaaata

SEQ ID NO: 16611 - DNA, 729 bp, Glycine max
  unsure (1)..(729): unsure at all n locations
  Clone ID: PAT_MRT3847_115005C.1
aatgaacaaaatcaatcttctagtaagtcatttccaaaactatgttttgttttggttaactttctggaatgctagctactctcataggttttcgtgacttgtcttagagtgtaactttgatcttcggttgtgcttttgataattctttgtccttatttgtatgcaacaacatagtgagtgaacaccacaaagcaaaatgaggcaaagaaatcgctagatctaattctcattttcacaaactctaacttcattctctaatctattaagctccacttttaccagatttaaactgtgtaacaggtttatgagctggtttgtgtcaagggttggcctcatcaaatgcacttgccttcgtgaccacttatgagatcttcccttcgttgaatgatttagacaccaccaataactatctttcaaattgaaaaaatagaaggttatttaggtaaatttaaataaagcaaagggaaggggtaaaccaaaattagaggattgtaaatagtaatagccttttttcaattaaaatgcttttgggtaacgagcttgttggattcaattaatatcttacaaatgggtcacatatcatcttgttgttaagtgacaggcaaaccccctttttactaataataaatagagctgttaaaattgacttggcttcacggtttgttttgatggccaattangttaggtcagatcagattgtaaaaagttaacttttaaaaaagatgactg

SEQ ID NO: 16612 - DNA, 619 bp, Glycine max
  Clone ID: PAT_MRT3847_115006C.1
gacggctgcgagaagacgacagaaggggggatgtgttagaaaacaaaaccctaacacgttcaattctgaaaaaaaaataaatcacaatccctttcttttcctctctgatctgcaaacacatttcaagagaacgtttttgttgttgcgcccaatcggtgttgcatttttcttttgcagagaggaggggaagtctttatttgtgagatttttcttaggaagatgaaaaacacggagaggattgcaaatttggccgtagcaggtttaactttagccccgcttattgtgaaagtagattcaaatgtaaatgttatcttgactgcttgcctcaccgtgtatgtgggatgttatcgttctgtcaaaccaacaccacctactgagacaatgtccaatgaacatgcaatgcgtttcccctttgttgggagtgcaatgttattatcacttttcttgctcttcaagtttctatctaaggatttggtcaatgctgtgttgactggttacttctttttactagggattgtcgctctatcggcaacattattatcatctgtcaaacgttttttgccaaagcattggaatgaggaccccatagtctggcgttttccatatttttcgtctttga

SEQ ID NO: 16613 - DNA, 437 bp, Glycine max
  Clone ID: PAT_MRT3847_115007C.1
ggggcaaaacactggaattttggggggattataaaaaaaccattatacggaaaagggagtgggggactacattggaggcagcatcattttaaaaaaagaaagatgggaaacggtttttttaatggattcacatgcggaaaaatttcaaaaattacaggcaggggggactttcatttaacaaacccagggcaaaagggtcctaacttggactttttgggctagggggaattaaacgggaaaacttctcaaagaaaatctgaaaaatctttaaaacaaaggggagccactttcatgagggttacaaaaaaagccaggcactcggaaatttcctgaaaaaccaattccaatctaagagaggggaaatatagaccaaagataacccaattggttttccaaccccttaccttccaacctgaggcactgggaaaagcaaatat

SEQ ID NO: 16614 - DNA, 509 bp, Glycine max
  Clone ID: PAT_MRT3847_115008C.1
tctcactggactgcggccggccttggttcttttcttttccactgaggatcccttcaccctctgtgtgaacgaggtggttcaaaagttacacatgactatgctagaaaacacttgcccaatgtgctaacgcacaagttctgcgttttttctcgccgcattcctcaatcgaggcttgtcccgtcaccaccctcgtggactgagtgtcctgtcgaccctagggaaagttgcgtgcctccaggttctttacttgggaacatttactcatctcatcctgatgttccggagggcatcatcgtatgtaacttaccatcttttcacgaggctaaagcctgttaccaactttgcatgtatcttcattaacttgaagagtctactttatatcactactttgccacctattggtgctgtaaagagaagggtggatatgccccatggtgaacagccatgactataatgggctttgagcgcatcaggtggatcatcgtatgatacccagttcttgcctgcct

SEQ ID NO: 16615 - DNA, 264 bp, Glycine max
  Clone ID: PAT_MRT3847_115009C.1
cagctcactatacgcggccgctggctgcttataagagacttattggggtgggaagcgcaaggaaaaatagtgtcatttccttatgaaagccctcctcccaaggacgctttttatttctcagataatgtcgcagagataagaatcccctttacccgtccttctgtgtaaccgatgacaaagacgcgcacacgcttctattcgaggaagcttaattactccctcactctcacctggggggtaggctacgccgtatgctccagcccc

SEQ ID NO: 16616 - DNA, 232 bp, Glycine max
  Clone ID: PAT_MRT3847_11500C.1
aaaagacttacgtcccaaaatattttggtccatacatgatacatcacctaaaatgaaaaatatttatttagatttccttaagggcctagctcataaaaagcataattctttgaagggggtgtttgcggttgaggcacccttgccacagaaaccctaggggttattacacacatgccatgccctctgcagaggttggaataaccctattcttcccatttgtgcccccacgaat

SEQ ID NO: 16617 - DNA, 840 bp, Glycine max
  Clone ID: PAT_MRT3847_115010C.1
atcaaaaaacaattttttaaccttatatgtgaatgtaacacacaaatgtgaaattttgtactgattacattatctagttgatgatatcaaccgaagcaaaataatagcttggcatgaataattaattggctttgactgggctttccttacaaaaaatttgcaccgaaaaaaaacttagtatttcctcaaaacataaccctatcagcaaattaaaaaagccaatttaaatttttttacagaatgatgatgacagtgcttttccctcccaagaaaagcctttggatgaaatgtttcatttgaaacgaactatattccttccacagatgacatttagtagacaccctcgacgtggttttttcttcttctcatgtttttgtggaggctcgatgaccaccttgatagcagcatcaaaaactgacttcacattctgctgagtctttgagctgcactctatataatacgtagctccgaccagtttacgcaattcctcaccttgctcagaagtcacaggcgccagaccaggatgatcagccaaatagtgcttgtcttctcgaagatccaatttggtgccaactagcaccactgggacaccaggagcaaaatgctgcagttcaggaacccacttcttcaacacattttcgtagcttgcatggctaactaaagagaaagccaagacaaagacatctgcccccctgtagctcaatggcctcagcctgttgtaatcctcttgcccagcagtgtcccagaggcctaaattgacagttgtgttttcaacaaccacatttgcactgaaattatcaaacaccgttggaatatagtccgtggggaatttgttgcttg

SEQ ID NO: 16618 - DNA, 2052 bp, Glycine max
  Clone ID: PAT_MRT3847_115011C.1
gcggcgcgcccgtgccgttttggagattcattacattaccctcttatatataacttgttacttagatttttcttcttctttttttatctctcaacggagagacagaaaaaaagaaagaacgagagagtgattaattagagggacatgagaacaaggagaggtgcgtgttatcctggtgtagtctcaaggatgtgctccaatgtgagggttacgaagaaaaaaagcaaggatctgcacatgcatatgcatgttcctgccggagactccattatttatagccggaaaaagcagaagaaaacgccggaaaaactcgccgccggtcgttacgattttttcgagtccttgccggatgacctcgtaatctccatcttctgcaagcttagttccaccgccactaaaccttccgatttcgtcaatgttttaatcacgtccaaaagattaaacagattagcacttcattcgcttgtattatccaaagcctcgccgagaactttcactattaaagcaaaatattggtgcgattcggcacacaaattcctcaaacactgtgccgatgccggaaacgttgaagcttgctatactttaggtatgattcggttctactgtttgcaaaaccgagggagcggcgcgtcgtttatggcgaaggcggcgattaactctcacgcgcgggctctgtatgcgctggccgtgattcagttcaacggcagcgggggcacgaagagcgacaaggacctacgcgccggcgtggcgctatgcgccagagcggcgtttctcggccacgtcgacgcgctgcgcgagctcggccactgcctgcaggacggttacggcgtgcggcagaacatcgccgagggacggcggttcctcgtgcaggccaacgcgcgtgagctcgccgccgtgctgtccaccggcgccgccgcgcgtaccttgctgagttggaatcttcagccgcagcagctccggcaggggtccgggtgtccgcttctcagcgatttcggatgcaacgtgccggcgccggatgtgatggcggagtggttcgtcgcgcggggcggttcgccgggaccggggctgagactctgttctcacgcggggctctgttctaacgcggggtgcgggaggcccgagacgaggaagcacgagtttcgaaggtgttctgtgtgcggcgaggtgaattattgctcacgcgcgtgccaagcgcttgattggaagttccggcacaaagcggagtgcgcccccgtggagcgatggctcgacgaggacggcgaagatgtcggtaacgacgacggtgacggagaggtcgaggttgttatggtagatagttagacaatttttacaacagtaacggcaacggaagtcgctttggacggaaaatgaatctatttttggcgaagagaaattacttgtcgtgatttattcgccgtctcaaaaaggtagagagaatatggcttcttttcgttttttccttgtatagtttgaaaattctcccgaaaaaaaaaaaagacgaggggagattatttttctttttttttttgttgcaatttcggagtttaacgttaattagaaattagaaattcaatgctaagaggttactagttactaatttttgttattaatttaatcgatttgaacgtaattagtagctttgaagttttcttttattatatgagtagcttttattaaaacttgagattcacttaaatatattttacgtttttttttaatttaaatgtagtactatactcccctcttatattattataatatatattttacagtttaatagttactctattttgtttggatttgagattttagcggatacgacaaaattaaatgtgatttggtgagctgtgatttgtctctattgatttaatgcggcgccatcgcataaggttgaaaaatgaatagttgtgaaaataaatctaatcagttcacggacatcagattttgctttcatacaattttacctctcccctcacatgcatgagatgattacagagggttgattgattctatgcgatccaacaacttgttagtggcgtaaagaaaatatta

SEQ ID NO: 16619 - DNA, 468 bp, Glycine max
  Clone ID: PAT_MRT3847_115012C.1
aaaaaaagcaaggatctgcacatgcatatgcatgttcctgccggagactccattatttatagccggaaaaagcagaagaaaacgccggaaaaactcgccgccggtcgttacgattttttcgagtccttgccggatgacctcgtaatctccatcttctgcaagcttagttccaccgccactaaaccttccgatttcgtcaatgttttaatcacgtgcgtagtttctcaacccttgttcttctccttcttacattttttttttgaacggttttttattttggtttttgtgcaaaaacaacaggtctaaaagattaaacagattagcacttcattcgcttgtattatccaaagcctcgccgagaactttcactattaaagcaaaatattggtgcgattcggcacacaaattcctcaaacactgtgccgatgccggaaacattgaagcttgctatactttaggcatgattcg

SEQ ID NO: 16620 - DNA, 319 bp, Glycine max
  Clone ID: PAT_MRT3847_115013C.1
atacctgcgatcggtgataaaagaatttctgcgaatgctcccaccagcaccactgctactgtcacgaaaggccaaaacggacgagcaagtctgggactacacggtaccacaggggacacagatcctcatcagctagagggccataggaaggaaccccgccatatcggaagacgcacaaatgctctcaccagaatagatcttggactatgacatagacgacaaggatcaccacttcaagctcacgccgatcggaagcggaagacgaattagccctggctccaccctaggcgttaggatgctgcacaacatgctcggtacc

SEQ ID NO: 16621 - DNA, 823 bp, Glycine max
  Clone ID: PAT_MRT3847_115014C.1
aaaacgcactttacatcaccatagtttaattacgctcgttcgaattttcttgtccgcgccagacatggctgatacccaaccgcgaccaaacgacgccgttccttcgaaggagcgcctcggcacacgatgctgtcactgcctctgccaaactttctggatccttttggttctcataatcaccatcgtcatgcttgcgattcttgtcttgtacatcatcatcacaccacgctccttcaggttcaccctgattgacgcgaacctcacacaatttgattacaccgccaacaacagcactctctactacgacctcgttctcaacatcaccgcgcacaaccccaacaagaggctcaagatctactacgacgtcgttcgggcccacgcgctttaccggcgcgtggagttctccgccgccgacgtcaacatgccctggaacggctaccttcaggacaagaagggcacgaacttcttcggcgctgttttctcgggacaacgtgtgatggggctgaatagagaccaaatcgcggaagataaaaaagatgggatgttccctattgaccttaagattcattttactatgaggttcaggcttgatgattttcagttaggtcactactatcccagaggcacgtgtgagctcaaggtacctttgacttctaataatggaaataaggtggcttcttttcaccctgccatgtgcgaaatcgacttctgaatctctaagtacatattttgatcttgtctactgaattcgtgaatgtaaatttgtaattcatgatactatattttagaggcagatgattttttttagaataatagcaaaaaa

SEQ ID NO: 16622 - DNA, 397 bp, Glycine max
  Clone ID: PAT_MRT3847_115015C.1
acggctgcagaagacgacagaagggattccaatatgtcggagcatcaatgtgatggaatggaaatgttcaaaggtataataccaaacaaaaaatgtatattgtatggaacataatacgttgaacaccggaaccacatacaataattaatagtagtagtatgatatttcaggcaaatttttattatatattccatactttacattaaatcatttaagaatttttttacggaatttgattctttttcttttttggtggtgaactgcatgtctgtgttgttttttccaacaatgtttttgggatatggattatagtaagcacatatctttaattgtacatggtgatttctagaaagcgttcttccattcagcatagggattgggaggattggttacaaat

SEQ ID NO: 16623 - DNA, 1169 bp, Glycine max
  Clone ID: PAT_MRT3847_115016C.1
ggctcgagcaaaaggccttcgttgaggaggtcatggagcttgtggagctcactccgttaagtggagcacttagtgggtgataccatgagaaatgcatggactgacgactgagcaacacacaaagattgactatagctgttgaataggtcgcccaatccttttatagtctttatggatgaacccacttctggattggatgcccgggctgcagcaattgtgatgagaactgtgaggaatatagtgaatactgggcgaacaattgtgtgcacgatccatcagcctagcatagacatatttgaatcctttgatgaattcggctcgaggaaaaggggaggagagctcatttatgctggtccacttggccctaaatcttgtgaacttattagttatttcgaggcaatcgaaggagttccaaagatcaggtctggatataaccctgctacgtggatgctggaggctacttcttcagttgaagaaaacagactgggagtggactttgcagaaatctaccgaaaatcaagtttatatcaatataacctagagttggttgaaaggttgagcaagcctagtggtaattcaaaagaattgcattttccaacaaagtattgccggtcatcttttgagcagttcctaacttgtctatggaagcaaaatctttgttactggcgtaaccctcagtacactgctgttcgctttttttacactgtcataatctcattgatgctcgggtcgatatgctggagatttggtgctaaaaggtccttctctattcatttttcttttcttctatggatctttaatttcaagtaacattctgtttcaaatgtttcaaatttgggaagctatgcactttccatttattttcattattaggtacatctctgcaatgctctcctgcaatgtctaaccaggccataaatgtgtaaacatatattaagaaacccctgctagacatgagcaattgacagactttatcatcttgttgaataagttttggttagaacaccgtgaagattagtttacaaagtttaagttttaatgtaaccggtattttttttttctaaatcaccaaaagagaggcccatatagttggccaagtgctattcaagatgtctggatattcatggcatggttagaactcagtccggcaactatatactaaaattggg

SEQ ID NO: 16624 - DNA, 621 bp, Glycine max
  Clone ID: PAT_MRT3847_115017C.1
caagaaaaacgttgtaacctctcactagtctatctaaggattggggtgtgaaaaaaaaaaaaagccggttcaatcgaattagtttatttttataaaatcaatagtttaaaaattagtttgaaaactaaattaaaaatgacttcaatcttaaaataagttaaaaactaattcaatttagaattggttttttaaaatcagtttgatttcaaactaatttttaaattaatttaattatttagatataaaactaaatgaaacaaattcaatttagttttttacctcacacccctacctatcgtaatggcacatacacgtgtgattatttaattaccagttagtatctactagtgcttatttttggctcttaatttgtttggggcttgtaaagaaagaagaaaagaaagctacgagtctatcttttggtacagcgtttgtatgtaaccgaaaaggcacctttttctggttacaacttaggattttaaactagattggttagtgtcgtagcgtgatgaaataccatcgttttgttctcttcctcttgctccctcgtgtagcctcaaatgctttatcaaaatgtatgtatttattaattagttgtattctgacttttcctttctcgct

SEQ ID NO: 16625 - DNA, 377 bp, Glycine max
  Clone ID: PAT_MRT3847_115018C.1
gggaggagtttcttcgtggatcttaccctcttgtttgcatatattcacattcttctgtctccgcgtcatctccttctgaactaagaaatggggttgtctttcaccaagctttttatccggctctttgctaacaacgacatatgtattcacatggtaggtcatgatgcggctggtaagattatgatcttgtacaagctcaacctgggatacattgtcacaagtattctcacaattggattcatgtgtgtacactgtgcattatgagaatattatctttacagtatgggatgttggtggccacgataagatgcgtcctttatggatacactacttccacaacactcacggtgctatccctggtggtggatatcatttat

SEQ ID NO: 16626 - DNA, 657 bp, Glycine max
  unsure (1)..(657): unsure at all n locations
  Clone ID: PAT_MRT3847_115019C.1
cttctgggtaaaaagaaataaattggtgggaatcaattaattcaggactgtatatataataattcatcaattctcttgccaaatgaatagtaggcatcatcatcatgacagagtcgtactattattttatgattttatcatgccagaatcagttttctatctatcatttgctatgggagtattgcattattggctcgatcaactgtttgttcaaagttcataccaatgaaagtacagtaaattaatgatataaagaattttaaggtcatatatgtccgtcagctctcttccaaaaatgttgtttctgtgatcctttcccttcattcttcttcaatttctcgcaaacgcactccattatataatagaattttttcgcaaaaaaaatggaaaatttgtaattcttatttttcttcttctccttgactaggaatgtaaaattcttagacagagcattagaagtttctctcgtgttgcacccaaatcccacgtttatcaggaaacatgtgtgcttttgcttanaaaggaaagtttccctcaggaaaaaaaatcttaagcttgatggccatttatttaatttatgcttaaattataaaatctaacagncattaggtagccaaactacgattacttaatctaggttttctttttcaatatcat

SEQ ID NO: 16627 - DNA, 435 bp, Glycine max
  Clone ID: PAT_MRT3847_11501C.1
gacaaaaaaataaaaccctaatagaagccaatatgagaaccttaaaactcactaaaaaaggcgggtacaaggttttttttttttttaaaacaagggaaaaagctcaaaacgaaccgaaaatgtaccaaattttcatgaaagtcaattaagctccttgttggtttgcttttttgggtgaatatgggggactttttggcgtttaaagtttcctttgaaatttaagaggttaaatccggtcagcccccaaagctcgctcaaccggggaagcccgggccccccattcccctaaaatatccctaaggctttcattctcttatacatactgaaaggaggtcttgcgaacatgttggatctttgaggcccttaaagccctcaaagaccgggccacccttacctcagattgcacttgggtaatcttggcaaacaaggttcgga

SEQ ID NO: 16628 - DNA, 241 bp, Glycine max
  Clone ID: PAT_MRT3847_115020C.1
agagaaaaaacctgcagagaagaagcccgaagcggataatgctcctgcggagaaaacaacagcctagaagaatatcccgaaggacgcaacctccggcgaaaagaagaagaagatgacaaagaatagcatggagacgtacaagatctacatcttcaaggtcgctcaacagttcaccctacgtctgtatctccacaaggccagggtgatcatgcaaagtttaatgaacgagattttcgagaaa

SEQ ID NO: 16629 - DNA, 185 bp, Glycine max
  Clone ID: PAT_MRT3847_115021C.1
ctcaagagcagtgttattgttcgctatgtgtgtgcttccggcgatggttgtggccattcggccagcaaagaaccctttttgcgtgaacggtcgtgtctactgagacccttgccgtgctcgttttgagacttcagctaccacctacattgctggtgctgagattatgttgcaatgcaggagcaggg

SEQ ID NO: 16630 - DNA, 502 bp, Glycine max
  Clone ID: PAT_MRT3847_115022C.1
gattttgtttgttgtttgttcacagacacagaacatgaattgcaaatcgaactacctatgccggctatgcgagctaggcacatacatgctgcagaagacttagcgggatgatcgtccctctcttcgtgcttacaatgtgagcgagatcgtattgttggaacgccgatacatcatccgcgctgcttgcgtatggaaagctatctacgcgccctcatcatcgtcgccgacgcgcagagcaccttcgccaccgagtcccttggaccaaaacccatcgagctcgatgttggtctcgggaatgcgagcgtgtgtgtagagcaaccaggcaccaaagacgggcttggccaagatgtcgaggacagcgtaagcgatgatctcttggtcgaccgacatgtgacgagctccatcagcgaagccccaaacgatagggtaggccgtccaaatgagcagagtgaaaccaccaatggcaaggaagaagcttccgaccttgctggacttggcctga

SEQ ID NO: 16631 - DNA, 163 bp, Glycine max
  Clone ID: PAT_MRT3847_115023C.1
gcaacacaaagcagcacctctgtttgataggcttgtgtttgataagacaaaactagctctaggtggacgtgttcgcatcctgttatccggagctgctcctttgcctaggcatgtggaagagtttatgagggtcactagtggatctacattatcacaaggtttt

SEQ ID NO: 16632 - DNA, 199 bp, Glycine max
  Clone ID: PAT_MRT3847_115024C.1
catccacattagatgcttcaccagtagatgaatacctttggcttgtagagagctctgcccatcacgcaaaagtattcatgcacattacatgctggaccagtggtgccaaaggatcacatagaagaccactcatacacagatgtggaatttgaggtggatcagacatagggggtggatttgtgagaagataagtactaca

SEQ ID NO: 16633 - DNA, 268 bp, Glycine max
  Clone ID: PAT_MRT3847_115025C.1
aaccaaactgggcttttacttcacaaatttaaaccaatcatgagttaccttacctagggggcccatggtaccggggaggaagctaaccttcaaaccaccttttaaataacaagggaaaagccctaccccacaaattttattatggggatggcctatttatgggccgaaccccaaaatggcaaccttaggtgggaaccacgaaaattaaagcctttggttaccacatttttaagggtaccaccatttttttcttccaaataccttggtt

SEQ ID NO: 16634 - DNA, 350 bp, Glycine max
  Clone ID: PAT_MRT3847_115026C.1
aatgaatactaacatttttactttataaaattatataagaaactacaatagaatccttctaatactttccatcatatcctctttctccataacaatacaattaaggcttaattacacaaattaacataggacaaaattctcttccacttccattacgaaattgttctcactctattgctctctagcactctaacactcttctaagctgcacaaaaactctttagtcacgagggtagttttggaattccacgtaggacaaaacaatacgacaaaaagaactttagtagaattactaaaccagtccctggatatttcgcgaaatgacaaagaagccccttaactcggccacg

SEQ ID NO: 16635 - DNA, 128 bp, Glycine max
  Clone ID: PAT_MRT3847_115027C.1
cttaactaaattaatgtaaaaagaccagatccatattctagccatttaggcgtcacaagatctttatataatgaaagggacaagaaatcatcaacgtaatctgtttgcttttatcaattataatctta

SEQ ID NO: 16636 - DNA, 462 bp, Glycine max
  Clone ID: PAT_MRT3847_115028C.1
tcctaaatccaatgttagctagctagctcttttaagccgtgttctcgccctatataaaccaccttctctatcacacgcttgcgtgggcggacgcgtgggattttttcacaaccacctctttcaattctctcctctcttattccaaattcaaattagaggaaaaagggtcaaataataattaagtgtaatatggatacgatcagtgttcaggcgatgagaagcttatcagatagtgactcattatcatctgcaacatatgcaagtgaagaagatatgaaaattaagaaaggtccatggactgaggaagaagattctgttctgatcaactacgtcaacttccaaggcgaaggtcaatggaactccctcgctcgctctgcatgtctaaagcgaacgggcaaaagctgcagactgacatggctgaactatttgctaccaaatgttctacgtgggaacattaccctt

SEQ ID NO: 16637 - DNA, 421 bp, Glycine max
  Clone ID: PAT_MRT3847_115029C.1
cccacgcgtccgcggacgcttgggcggacgcttgggcgatataactagaaacagtctgatgggaattaaggtacttgctttcgtcgttgctacaattttgttagcatgtcaatgccatgcgtacgatatgttcactgtccgaatgaacactggctatggcgcccctactccgtgaagtgaaatgtcgcacgttggaagcttgctgtggaagcacacaacatcttctgctttgagactaatcctgaaaagtgcgatgcatcatcaaatgaatacatccatggcaaacaatatacatcatactttcaaacagttaaccaacaagcttacttttatgccatagacctcgaaattcattctaaggacacatttgtgtttagtatatattgcaccgtactctctaatatcacatactacgaaaaac

SEQ ID NO: 16638 - DNA, 303 bp, Glycine max
  Clone ID: PAT_MRT3847_11502C.1
ctccacttcactttcacctcttccgcttcttaccctacctttttcttatctcaaccttaaatttcccattagggctaagcaatctcgttagtacaaccttttctcttatacagtcaatttttatgtctggatcacacgatcaaattcctactagcttctatccttttgctaatccaaatgctcatgactctggtgctgagtcaaacgagtatgtgcatattcccgttcaccaacgaaatggcatgaaaagcctgacaaccgttcacggattcaaaaaagaattcacctataacataaatactt

SEQ ID NO: 16639 - DNA, 301 bp, Glycine max
  Clone ID: PAT_MRT3847_115030C.1
attatcatacccttcaagatgaaaccgtacctacgtctaatattcctattattccttatccttctcgaccactccatttcggcgagtgctgctataaatattactggcctgagaatcaaaatctacataagttctactcaagcaccctcagtatcctcctctcggcagataaactgaagaacgtgaatagacccctgcaggccttggattttttgcttggcgatgtatcgtctggacgcctcaccattttcaagacttttgtcttaaactaagaacgattatcttcaactttgaccctatg

SEQ ID NO: 16640 - DNA, 313 bp, Glycine max
  unsure (1)..(313): unsure at all n locations
  Clone ID: PAT_MRT3847_115031C.1
gtgtgtgtatatatatatatatatatgtgtgtgtgttttgctaatgtagacacccttattttttagtatgagtgcgttagtaactagagtttattttaaagacttaaatatatttttggtccatgcaatttaacgcttttttcatttttgtccctgcaaaaaaattcgttttagtccttgcaaatgtgtgttttgtttccctgctttaaagngnnnnagataatgnnnntttcactgggcagagggtttttttattgttcaaagcactatctaaaacactttaagaacaaaaaaaacaaaacacacattttgc

SEQ ID NO: 16641 - DNA, 1209 bp, Glycine max
  Clone ID: PAT_MRT3847_115032C.1
gagatgaaatcgtgatctagttaaacatttttttgttcgtttttttagtttagatatttggtataatccaagtcaaaccgagtaaactcatttaaggggcttaatgactatttttttttctctgttcacaaaattcaaatgtatgacttcacccgaagacaactaaagcttgccactagctaggaccaacagacgttggccttgtcaaaatattttcagctcgagatttgtatatccagcatgagctttgtgtcggtcgaaaagatcttgaagtgcttcaacaaactgactatgtactttggcaacctgctccattgttggttctggatttttctctagctcaattggtctacccacgacgatatacaatggatttttgaatggtataggagatccataaataccccagaaaaataatggaattatcttcaaaaaccttgcaagattttgcattaaccttcctggaggcttccaccacttgtaggcttttgtctggccaaagcagaaaactggaacaaggggtaggcccatttgcaatgctatgcggacaaatcctcttctttgcttaagaaaggcaatctcacaaccaggctccataaaaaatgtttctcgaactccaccaggtactaaaatgcaactgtaaccagcttccaacgaggaaatgaaattttgctttgtcactggcgtaaatcctaaccatgtccatatgtgtctcaaaaatggtatatagaatacggcgctgctagcaagaaattttgtttttgcaagaggcatgaagccagtgctgtcaccaagtgcaacaatgccaattggaaaaaccgagtgtggttcatacccaaaaacataagcttgatcaggacgaaaggcttttgcttcttctacgtgaagcgttatgggaaaataggagcaaatgtgcttgcatatgtatttggacaatttatgaccaaaaatgctgttctcgtccacagggatgagcacgaacaccaagagcaaaccgaacaccaagagtcctttggagagaggaaggaagactgtggcccagagtatcaacgcaaggttgaaatgaattgctccaagatacaacaccaatgcaggaaccgtcttgaacacattgcgtgattcagagaactcttctactccattgaacactttccccatgctttgttcgctctagtgtgggtagttggttgacatggaatttatgtacgc

SEQ ID NO: 16642 - DNA, 600 bp, Glycine max
  Clone ID: PAT_MRT3847_115033C.1
aaaaaacaaaaggttcccccttttaataaaaaaaaaaaccccccccccccaaccaacccagggggacaaaaataccagggttaaaaaaccccaaaaaattcccggtccccccaaaacctttaaacccccgttaacccccccttatttaaaaaaaaaaaaaaaaaaaggggtacccccccccttttaaaaaaataaaaacccctgggaggaaaactaaggcccctgggaacccccccccgttttttaaggaaaaaaaaaggggtaaaggggggaaacccccccccctggggcagggggacccccaaaaaaaatttcccccaccccctaatggtccccaaaaacaaaaaaaaaagggcgggaaaaaacccggtttttttggggggcccgggcaaattccccacccaactaaaccccctaaaaagttgggtcccaaaaaacggggcccaaaaaaacgggacccccggcccccacccccggggggacccttctttttttaaaaaaaggcccatttctccccacgggaaatggaaacccgcccttaacgacccttaaaaccggttttttttaaggcccgccgcccttttttcccccgggcccctt

SEQ ID NO: 16643 - DNA, 584 bp, Glycine max
  Clone ID: PAT_MRT3847_115034C.1
ggtgagcacttactattctgtgagcaatggctttaacactagacaaaaaatctgttggtacctttttcatgcttttcttgacatgcatatgtcgtgcctcgtcacgcactctctctgagtcttccattgccacacagcatgaagagtggatggccatgcacgaccgtgtttacgctgacagtgcagagaaggacaggcgccagcagatattcaaggagaatttggagttcatagagaaacacaacaacgaaggaaaaaagaggtacaatttaagcctaaacagttttgctgatttgactaacgaagaattcgttgcttctcacacgggagctctctataagccaccaactcaactagggtcgttcaagattaaccacagtcttggcttccataagatgagtgtcggtgacattgaggcaagcttggattggagaaagagaggagctgttaatgatattaagaaccaaggcagatgtgggagttgctgggcattttcagctgtggcagctggtgagggaatcaaccaaataaaaaatggccagttggtttcattgtctgagcaaaatttggtggattgtgccaac

SEQ ID NO: 16644 - DNA, 458 bp, Glycine max
  unsure (1)..(458): unsure at all n locations
  Clone ID: PAT_MRT3847_115035C.1
tcgcacccacgcgcccgttctgctgtggacaccctccgnggggggggccggccgatctgtcctcctatgaccggctggcgccgagactatcctctctggtaatggactacctcggacagagcccattgacccctggggccatgcttactataccggtccctacactcaacgatcgactgaagacactgagaacaatgttcgcggcggggtgggaggagttcccccgcaccatataacccgtcgacctccatatgttcggctgacatcccgaactccctttcccgtagccctgaccgagcctcccctgcaaactgagttctggcagcaaccaccgtccaacggctcaacgcgtgactcgctgtggtctgcctcctcgcgattctatcaccaacttgctccgctgttatctcatccacagctgctgttgcgcctcgcgagcaaactccctctaccctctt

SEQ ID NO: 16645 - DNA, 972 bp, Glycine max
  Clone ID: PAT_MRT3847_115036C.1
tcgcccacgcgtccgcccacgcgtccgcccacgcgtccgcccacgcgtccgacggctgcgaaagacgacagaagggggccgagcttaggagaatagaagaggagcaggaggcatcaccattgccacaatggttaaaggtcgccaaggagaacgtgtaagactctacgtcaggggttcaattcttggatacaagaggtccaagtcaaatcaatacccaagcacctccctaatccagattgagaatgtaaactctaaggaagaagttgcgtggtactgtgggaagcgcatggcttacatctacaaagcgaaggtaaagaagaacggaagccactatcgctgcatttggggtaaggtcaccaggcctcatggtaacagtggtatagttcgagctaagttcaagtccaatctgccacctaggtcaatgggtgcaagggttagagtattcatgtatccaagcaatatatgagattctcaggattcgtgtgtcgtggggctagtttgtcagagtatttgaaaggaatttgcattttgcgagttaaatttgtgtttttcttttttggtagctcttgagcagaatagtatctttgtttaggatgaagaatgaaccccgtgtttttctttattctcactgccatggttattaaggaggattgagtctcaattttataaacggatttttctcctcacttgttgcattttcccgtccccttaaaattcgaattgaagaattcgagctcgctgttctcgggataaaaaaattggaacttttcatctccatcttgaggaaatgtgtctattggattaattgttattggaatgaagttaaagggattaaattgtgatctcccggaaaagtcaatcctgtatgggatataaaatttgtgatgagcgtttaaagggaactgaaaaccctgttttgaggacatgtttttttttaaaaaaaaatgactttttgccctgcattttgacggg

SEQ ID NO: 16646 - DNA, 280 bp, Glycine max
  Clone ID: PAT_MRT3847_115037C.1
cccacgcgtccgtacggctgcgagaagacgacagaaggggttgtggccaagaattacgtgcctggtgttaggaggacgatagtctaagcatcttttctcacagggatttttgagtcactttcttgttatatttattatatccataatcggtttctgtaatcaataattaccttaattgaaaaatagcggccgttaattaatgaaaactgtccttcaattccacgtcagtcgtgtctccatggtctatatttctaccgacattcaaataacttgctcatgt

SEQ ID NO: 16647 - DNA, 178 bp, Glycine max
  Clone ID: PAT_MRT3847_115038C.1
agctcttgtcggtatatgataaatgagtttggtatttaactaatttatcaatgtgaataggtgatctaaagcgtagcggcactgtggcagtgaattgttgtacttaaagggatactcctttttccttgagatataaattgaatctcattacctataatgacaatcgacaaaaaataaa

SEQ ID NO: 16648 - DNA, 504 bp, Glycine max
  Clone ID: PAT_MRT3847_115039C.1
gagcttttgattgtcaatttctgtctgcatctcctcgtctcgtccttcatttgactttacagctccaactagttggttgtgctcctctttctccttttacattttaatttaaataaaaacttcaaaatgtccaacattggaatcaacggatttggccgtatcggacgtttggtcttgagagcatctttggaacgaggagctcaagttgttgccatcaatgatcccttcattggtctcgattatatgatctaccttttcaaatatgattccactcacggacgtttcaagggtgaagtgaaagcagaaggagacttcttggtcgtcaatggaaagaaaattcatgtcttctctgagcgtgacccaaaagccatcccatgggccaaagctggagctgaatatgttgttgaatccaccggtgtgttcaccacaattgacaaagcctccgcccatttggaaggaggagccaagaaagtcatcatctcagctcccagtgctgacgcgccc

SEQ ID NO: 16649 - DNA, 270 bp, Glycine max
  unsure (1)..(270): unsure at all n locations
  Clone ID: PAT_MRT3847_11503C.1
gccaaaaccttntttcgnagtctcngnttttcctaatgggctccggcaaaggcagagnagaagccggcggagaagaanccagcggcggngaaggcaccggcgtataagaagccgaaggggtatgaagaagatctcgaangaaggagggagcgnnnnnnnnnnnnnnnnnnnnnnnnnnagcttggagacctacaagatctacatcttcanggtcctcaagcaggttcancccgacattggtattccagcaaggccagggcatcatgaaca

SEQ ID NO: 16650 - DNA, 457 bp, Glycine max
  Clone ID: PAT_MRT3847_115040C.1
cacgcgcacgtccgctaggaattaggctcgagggtgctctagcaccaaataccaaggtttgtttggtagatagcacaaacaatggtggggcggggtgtatcacgcaaagggatcaaaagcccccaattgatattgagaatagaaaagaacttcgaggcctagatgttccgcactaggggcatgtgggctttcaaggccgaaaatggtggtcgccttaccttctcagaaccctaaaccacagacctgacacagccggtgaaaaaccaccccacttttaccctgctgaacatatcaagaagccccttgtcaacacgcacgaacgcaaacccgatcagcacagggctagcgttactccgggaacagagtagattcttctcggtggtagacttaacggaaagaagcgcagccctataaaacaccctccttctggattgtattttgacacaggaactttcaa

SEQ ID NO: 16651 - DNA, 674 bp, Glycine max
  Clone ID: PAT_MRT3847_115041C.1
ggctgcgagaagacgacagaaggggattttcgtcgggagtggtgagtgacgagccctagctccacatctggtctccctctctcaaaatctcacaactctcgtcgctgccaccgcagcaccgcacggaagcaaccacggagatgaagaagggagtccatccacagaagcaatggatatcctacgttactcaaacgggtaggttgatgcatgtgatgatgacaaagatacaccctgttgggaaagtttaccacttccgggctaagcgtcaaatggccgagagtttaggacagatcgctaagttcagacgccgcttcgggctagaaaattcagagggcaatgaaaaaaaatgacttgttcaatgagcataggggacttcggctttttattttgtgcaaattgctggaaaataactgacaaattggtgatactctcaagcaggtttttttttttaagcattcaatatctgtagtttaactgcagaagcgtttccttcttcagttcatattaagtgatgtctttggcagttgatatttgcttgtgtgtttatttagtgcaagttcgacctgaggttttttgtttgcacttctggatattactgaaatagaaactttgtgttgaaggatcaaatgactagtttgaattgaataatcatatcgagtgattttttatcgaag

SEQ ID NO: 16652 - DNA, 662 bp, Glycine max
  unsure (1)..(662): unsure at all n locations
  Clone ID: PAT_MRT3847_115042C.1
gggccggaattcccggctcgacccagcgtccggttgattgtttgggtcattgaggagagaaaataggccttttcagtagttgtgtctgtggtgcttcacttctctcactttaagtcctgttgaattgaagtttatattgttattttaaaccgttaaaaaaaaatcagttcttgtgtcttcttttttaggttttcatgattggtaggaggttttttctttatctaatcattcaggtcttggcttctcgctgctgaaaattagtgtatgatattgtcttgaactgtgaacttttgattgagaggggctgcaaagttgttcaatttttggaacaagatggctgaaaggagattgaatattaatgcccctctcatgtctgtgagacgctctgctgctacaccaccatccttgactgaagcaaagaagaagattctagagaaacgccacactcttccatactacaaatcagacacattctcggatcaggttacagaacctgttgcagtacctttcaattgngagcatatccctggaagacgcaagggtaatggtggatctgagcctcaacctcctaaaggcactttcatcacntcaagccccagacttccccccagnaaatctatcantgctaccannacaccattgnaaaaggaaaagtaggctgc

SEQ ID NO: 16653 - DNA, 290 bp, Glycine max
  unsure (1)..(290): unsure at all n locations
  Clone ID: PAT_MRT3847_115043C.1
ataaccgttcgaccgacgcgtccgnccagtcgttccatagattaaaagcactcaatagttaatgaaagcagctcaagcatattggggggggttacatctgggatggcggcatccancaccacanccatgtcaagcccaaccatatccttggtgcatgaccgactcagcactgaatgaacccgcctacctttcagccttagcaacaaccttacacattggatcctggtccgcgtcttctgactcacctaagctctctattttgcctacacttcctctcttaaagatgatga

SEQ ID NO: 16654 - DNA, 410 bp, Glycine max
  Clone ID: PAT_MRT3847_115044C.1
gccagtccgtgagactgtgagaggtcatattaccgggctttgacacttggcacataacggacgggaaccctaatttttttttttggttattggttcttccatgaattatttttaacaagcccttaaaggtattggcaaaaaggttaaaattttaataacaataataatttccaatggttcattaagggacacaccatgaattggaccgggaaacaacccggcctaatgaacaaaagttctggtatttttcttacgaagaaagggttaactttaaccccaagttaatcatggttcattggttcaacttttttccttccgagaggaaaaaaactctctgagaacattggtggcagtgcgaaagccactgtgcctttcttgaggtggttttggagatatttgtgtgggtctct

SEQ ID NO: 16655 - DNA, 1991 bp, Glycine max
  Clone ID: PAT_MRT3847_115045C.1
ggatgtattagttgttgcttatcttagtgctcctgttcaaggttgtttggatgaagcatgcagcatttacaatcgtatgattcagttgggtggttaccaaccccgtcttagcttacatagttccctcttcaaagctcttgtaagcaatccggggatcttgtcaaagaattaccttaagcaagctgagtttatatatcatcatttggttacaactggccttgatgtgcataaagaaatttatgggggcctaatttggctgcatagctatcaggattccatagataaagaaaggatagcagaattgagggaagcaatgctacgtgctggatttgaggaggacagagaggtactattatctatcttgagggcttgtgcaagggagggggaggtggatgaagctgaaaaaacttgggtcaaacttctcaagtttgaaagtgaacccccagctctggcttttgtgtataaaatggaggctcgagcaaaggttggcatgccgatgaagtcattggatatatttagggaaatgcagtcaaaactaggtagaacagatgttgccgcatataatcaaataatagagatactatgcaaagcacaagaatcagaattggcagaatcaatcatggaagattttgtcaggagtggtctgaagcctgttacgccatcatatgtttatttactaagcatgtacttcactttggaattacatgataaattggaagaggcattctaccagtgcttggagaaatgtcgtccaaattgtactttatacagtatatatctgaattctttggtgaaaataggtaatattgacaaggccgaggatatatttaaccaaatgaatcgtgatgcgactatcggtgttaatgctcgatcatgtaacatcatcttaagtggatacctctcttcgggaaaccacttaaaggcagagaaggtctatgactttatgtgtctaaaaaaagtatgaaattaaatccccattaatggaaaagcttgactatatcctgagcttgaaaaggaaagttgttaaaagaccaataagcctgaagttaagcaaagagcagagagaaatcctggttggggtgcttttaggtggtttgcagattgattctgatgaccaaaggaggaatcacattattcgttttgattttgatagaaattctggcagccattatgtcctgaagagtcatatatatcaccagttttatgagtggctgcatcctacttgtaagccaggtgacaatagtgaaaacataccggataagttttgcaccattgcaagctctcattttggcttttatgcagatcagttttggtcaaaaggtgaacccacaattccaaaactagtccatagatggttgtcaccatgtgttctggcatactggtacatgtatgggggccatcgaaattcatcaggggatattttgctgaaaataaagggaagtcgtgagggtgtggagaacattgtcagaaaatttaaagccatgtccatggattgcaaagtcaagaggaaaggaagggttttttggattggtattctgggaagcaattcaacttggttctggaaattggttgagccatatatcaaagaagatgaagagttttctgaagcaggcgatgagacaaaggagcaggatacggagaaaactgaagatattaacttcaatagtgattcagatgaatgaaaaagaatgataccacattgatgatcatgatttggagaaggtttttttagggagttttcctggccagatggtgcttttacacctgtttctaggacttgtttgatttccgtacttccacagatgcattttactatagtcactgctatggttgcaaaatgaaggctttcttgaatatttttgtatccatcctctgaaatattctagttgtatattcctaatatctgatgcatagaaaattagagtaagggcttaaaactttgttacactacacaaatgaattttattcaacatggttggagcattacatgg

SEQ ID NO: 16656 - DNA, 843 bp, Glycine max
  Clone ID: PAT_MRT3847_115046C.1
tccggctccggcggcacggcgaaagcgatagattgtgattacaactcgatttgcaaaacaaaagccatagtttgttacttctcttcgccttttgctttgcaattgtcaccaaacaattcttgcttagctctcacaagcaagcattatcaacaatgaagaaaattgtgttaaaggtggacttacatgatgacaggatcaagcgaaaagctatgaagacagcatctggcctttcgggggttcaatcagtttctgttgacattaatgacaagaaaatgaccttattgggggatgttgatccagtgagtgcagtgtcaaagctacgaaagtggtgtcacactgaaatagtctcagttggaccagcaaaagaggaaaaggagaaagagaaagtggagccagcaaaagaacctgttcctctcaagctctatgatgcctatcccttttattatcatatgacaccaccactgtatctgtatagttaaaattaataggttagatgttttgaagagaatcttatatagtggctgtgtcatctactaaattttagaatattattaggattattattcgcagagggtggtgtaacttttttgataaattcagacaagtttctagctacttgggtttttgatatatagtataatgtatacctttgtaatttcattggcttttccagcaacacacatcttgttagtatagtttgttggaagtaagagcatattaaggaatgtgaatgagtatgacacaagtttaatccaaaaaaaaaaaaaatcacgttttataatacttttttttcctgttaaatactacaataatataattatcgtagtcttaggaactagttta

SEQ ID NO: 16657 - DNA, 594 bp, Glycine max
  Clone ID: PAT_MRT3847_115047C.1
tacggctgcgagaagacgacagaaggggacaactacatttgcaaaacaaaagccatagtttgttacttctcttcgccttttgctttgcaattgtcaccaaacaattcttgcttagctctcacaagcaagcattatcaacaatgaaggtcagaactagactcatattttcctctccttcccctaagcaatgcatgaatcacattcttgagttttctgagctttgtattaactgttttctttcatgttttagatgtagaagcaattaattattggatcttaacagctcttcgatatttgttgtgtaacagaaaattgtgttaaaggtggacttacatgatgacaggatcaagcgaaaagctatgaagacagcatctggcctttcgggtaaatcaaaattttcaaccctactacaactttgctttgtttcaagaagccaaatacatatcatgctgcagcatcaaggaatcaatgatttcataacaaaattatgtttgtaattatcttgcaggggttcaatcagtttctgttgacattaatgacaagaaaatgaccttattgggggatgttgatccagtgagtgcagtgtcaaagcta

SEQ ID NO: 16658 - DNA, 361 bp, Glycine max
  Clone ID: PAT_MRT3847_115048C.1
tgctatttttaatcctatcatttgcaatcatgggctgtgtcatctaaaccttcttttaacaaaacaaaaaccatgttgaagaagcaatctgtcttgtccttgtcactagtaatgctaatttcatttatgtattcgacaaccaccttagcccaattatcaccagcttcagcccctctcaaaccgccccaacctgctcctaccataccagctgcggctcctcaacaaccattggttccctcattgccacagtcaccaagtgattccactcctgaaagtactccagcacttgacattgttggaatcctgaggaaggcaaagtcattcaacattctaatccgtctcatgaaaaccacccaattga

SEQ ID NO: 16659 - DNA, 474 bp, Glycine max
  Clone ID: PAT_MRT3847_115049C.1
actcgagccgctcgagcggctcgagcggctcgagcggctcgagacggctgcgagaagacgacagaagggaatttagttgatgtggcaataacatgactaaaatatgataacgatgagacaaaaaattaagcatttggtctttttacatatgatactgctttagaattagctgtgttaaaagtgaaagttttactcctttactacctttattaatacaaaatggttcatgaagttacatttttcttaactacaccagtaaacattgttaatgatagttcatatgggttgtaagcatcaacattaacaccaacaatctggttgggcgtctcttttgctaagaattgtgatgagcacctttctggatcttgcttaaatgtgctttcatgcttgaattgtgatgaacatttaaattcttcataattagtgattaacaattttagctagtagaagtttttttttattaatatagtaatg

SEQ ID NO: 16660 - DNA, 211 bp, Glycine max
  Clone ID: PAT_MRT3847_11504C.1
ttgcgaaagctcctgcaagtgccgcatctgctgaggatgctgcaacatgtacccaaacttgagctacactgatgcaaccaccaccgataccgttgtcatgggaggggcacctgttaaggttcatttcgatggtgctgaaatgggtgtgcccgctagcaactatggctgccaatgtggaccaaactgctgctgcaacccctgcacttgcaag

SEQ ID NO: 16661 - DNA, 340 bp, Glycine max
  Clone ID: PAT_MRT3847_115050C.1
agcgccgtcttcatcggcggcgactccgtcggcggcctcgagtctctcgtcgcccttcacgtctccggccacctcgtccccaaactcgtccaagttggcccctctgggtgtgataacaacatcattatcataataatcacaatcataataataattagttaatcaattaccagttacctccaccatcccaatcaagtcaaataccagccacaaatatattattatcattatttacttccagaaaaggaaaaaaaaactaattatataattttgggtcttctttctatgtgaaatggaatctcaattgatggagtttcaaaaaaaaaaaaaaaaaaaaaaa

SEQ ID NO: 16662 - DNA, 112 bp, Glycine max
  Clone ID: PAT_MRT3847_115051C.1
tctgggaagaaacgaattagaagagagtgttgttttgcgttgaagtatgactcactctcgcatgtctggcatcttaggaggcaataagggtctcctgatcatgggtactgtg

SEQ ID NO: 16663 - DNA, 176 bp, Glycine max
  Clone ID: PAT_MRT3847_115052C.1
aaaaacgaggaaccaaaggtgctttttaattcataatgaaaatagacaaagtggggcctttgtggggcaattgtgaatatggagcatgaaagagaaaacatgctgggggtttgtagctaagtttaaagaacacctttattaagatgaaagcaccctactaacggggaaaaagtggg

SEQ ID NO: 16664 - DNA, 300 bp, Glycine max
  Clone ID: PAT_MRT3847_115053C.1
gcagctagcacatccaacaagcggcgacagacaaagatttgtgagggtgactccgcgcctgataagagatggttaatatcgccacggcagcggcggaaggctatgcttcgcggccctgtggaccgtgtgcgtctgccaaggcaatgtctagcagcagaagctcactgacctgcagtggtggcaggaagtgcacagacagcccgctcgactcgtgccgacaggtcctggaccgggagttaaccggcagctgccggaagtggatgctttggcccgtttcccgtgagcaccgggctccggatg

SEQ ID NO: 16665 - DNA, 696 bp, Glycine max
  Clone ID: PAT_MRT3847_115054C.1
gcctttgattgcagtgaaagtaatcagataagaggctcaagatttcaaaatgaggatagaattggaaggataaatgataagagtgcttaaactattcttgatatgcatcatgcatgtaaggccttagaaatagaagtatccctttatggtcttaaaaattaggatgggagcattgattagtttgagagaactccaggattcatttttgctacatagagactacaaatggttgaaataaacgggctacgcttggctggaaatgacagaaacaaatacttgggtgtagaattatgccttcggtggtacttgatggaaatttgtaatattgtatgtgactttacgttcatcattcacttggaaattgtagtttttagtttgattattggtacgaggttcatgatgggtgctataaaatcttatgtttcacattttggattattttctagggccgttttgagatactttcattgtctggatcattcatgcctactgacaaccaaggatcaagaagcaggtcgggtgggatgagcgtttcattgtcaagtccagatggtcgtgttgtaggtggtgggagttgctggtctccttgtagctgccggtcctgtgcaggtaaacattcctctctcaacccttagaagctattctcaactcaattatgtatgtgatcgtgagcatggattgggtggggagggacta

SEQ ID NO: 16666 - DNA, 393 bp, Glycine max
  Clone ID: PAT_MRT3847_115055C.1
ctggtcgtcctttttttttttttttttttttttttcaatttttttttttgctatgtctagaatttttttgtataatcttacttacattaataagccgaacagtttggaaactgacaaccaaaacataatttccaccgagcagaacaaaaagcaagcacagacccacattgaatcaactgcacaaaacggatattcgcagaagccctacagcccaaaaatcaaacggtaaggccgagaggggaaccagttacaggagactggggctcaggaatctccaccaaacggacagctaggcaagaacagtccagaaactgaggcaacaacacgaaaagcccaccgagctacctcgacagggtggaaaactgatgcctccacaaaaggaacagaccccga

SEQ ID NO: 16667 - DNA, 758 bp, Glycine max
  Clone ID: PAT_MRT3847_115056C.1
taacttactatttttatgcggagtgttgtctataatttggctgtaattcgtagtaggatacaatgaaaactgtggagaaaagggtaagtatttgtatttgggtttgttggtaattgatgatgctaggaaaaacattttgggtgttcagaaattggaaatgatgctagtgtggttgcttgacttggaattatttgtttctagacaaaatgaatggcatcattcattggatgattggacagaaatggagattaaactatgcagacagatattggatgaaaaattttgcaacttcaatatcaataatcaacaaaacatttcaaaacttgaaattggtttagaaattcaagatgtttgtggagtgacagggaaaaagagagttgtcgttattgtaattcttgtgaattacatgctgcaactatgatttcctcatattattcttcacagaagcaattttctattgtggtgttggggtattcctttatctactagaccatgtaagaagacccttgctagtggatacagttgcaaacaatagtgatactctacccccacaattgggacagagagtctcttctgttgctaccctggtgcttagtcttgtaattccaatggtgactatgggtttggtctggccatggactggccctgcagcctccgcaactctcgccccataccttgttggtatagttgtccaatttgcatttgagcagtacgctcgatatcgaaagtctccttcatggtctgccattccattaatc

SEQ ID NO: 16668 - DNA, 645 bp, Glycine max
  Clone ID: PAT_MRT3847_115057C.1
ttttggtcagtttctccgccatcgcagtagcactcgcttttggtcagtttctccgccattgcagtagcactcatagcttcgctagggggcaaaaccaatcgtagtctttgaagtccaagggggcaaaaccaaggaaatttcagattggtgactgtgacagcacttggcttaattggtaatttcctcagccagcctcattttttgtagtttaaaatcttgggctttattcaattaattgcaaagtagaaacatcatatatatggattaaaattgtgcctactttgaaactgcctggacaacgtgtacttccaactcaatgtaatatctggccttcatccaaatgtttcgtcaacattattgaggaaatttagaacatatcattacaattataaaccttgtatggtgtgagtcatgaaattaattttgtgatttttatataagctttatacgtgtataattgaagtgtgtgtaaaatcctttatttgttatgatgatgtattgagattgaaattatgaggtgcatgtaattaaagcccttcatatgttggaattgctttgaagtagtgaagttcttcctctcactttaaaaaaaatcaaaaaaatgggaggccgcggattagtgtatacgatgacccgggatttaat

SEQ ID NO: 16669 - DNA, 199 bp, Glycine max
  Clone ID: PAT_MRT3847_115058C.1
gcaactcagctacggcatcttccattccactttgtgccgcgtcatctccgaaacttggctggcctgcctcaccacacacgaaacggtctgatacgacacactgctatactatgtgacatcgcgtaactggactgacatcacattcactaccctgactcgactctgttcccgacgctgccatgccgtaccgggaaaggct

SEQ ID NO: 16670 - DNA, 128 bp, Glycine max
  Clone ID: PAT_MRT3847_115059C.1
cgcctggcagaagaccaagagggggggttattgcccacatcatctactgactgccttgctggatcctatcctttcccgcggccctgtattgggagactacaacgtttgtcactctcacccacaaaact

SEQ ID NO: 16671 - DNA, 509 bp, Glycine max
  Clone ID: PAT_MRT3847_11505C.1
atggcaggcaacatcccattgattaaacattggccgcatcccaagatctaagggaatattgtagtaattctccatcaacttacattacaagatataaacttcctcatgtcgcaacctgattctagagtgccaactcctccttcaacaaaagacgcttgcttagcttcgggcctttaaagagccacactgtgggtcattgaaagcctatttgtctccacaaggttgagttgctcaaatgcaccgaatactccatgcacaccttttacccactatgagaaccaacttcaaggaaataatttaacctgacagactattcccttcctaacacctacccaatgctcttgcctggatggatcataattcttagggttcgagaaccaaacccaatacaaccttagcactcttttgaatggccttggtgtctacctccaccactttggtaaagaacgacttggcacgccactcatgctgtatcagagcgcttgtcctggcgaagttgctcacacctg

SEQ ID NO: 16672 - DNA, 273 bp, Glycine max
  Clone ID: PAT_MRT3847_115060C.1
ccaaacaaaattttactttttacaaaacaccccaaaaacccaccttaaaaaattttttcaattacccgggttaaaataaaatgcattctttcccacccctaataatcttattttgtttgacccaaaattttttccgctaaccataacttttttttttgccaaaaaaaaggaaacttttttccacccaattggccaccgatttatccctttttatttgaatcaaggcaacccttggatccattttttcctcccttaacatcataaaattttttt

SEQ ID NO: 16673 - DNA, 900 bp, Glycine max
  Clone ID: PAT_MRT3847_115061C.1
ccacgcgtccggcaaaacgcagtgctcgacactggtggcgacgcttctaaaatcctaaaaccctaaccctaacaaaaaaatccccaatcttcgcaagactcgatgaacgtggatcacgatcagcctccctcggcgacgaaggcccaggcgctgcagaccctaacggcgggtcctctatcgtcgtcggtggcgaagctcgctgcgtcctcgcggtgcatcccttccgacaaggacttccacttctaccgcaacttcgaggagttcaaggtccccgtcgaggaaatcgctcgggagtcgcggtcgatgctcgaggccttcggcgctgcggcagcgcatgcggcgttccctgacaacgacgtcgacgacgacgccgcatacgactggctggtaaacgcgaatgacgacgttttggagcggttcgacgcgtcggcggacgagttccggaaggttcggcaggaggaagaggagactgggcgtccggcgatgcatccgatggaggaagatgggtttcaattggtgacggggaagaagaagaaaggggggaaagggaatgtgactccggcagcgacgggttctgaggtggcggcagtggcgccaccgggagttacggtggcaactaaggataagaagacgatggggccgaagtcgaaggttccgtttcatataccaacgattaggaggccgcaggatgagtataatatagtggttaataatgcaaacatgccgtttgagcatgtttggttgcagaggagtgatgatgggttgagcttcattcatccactggaaaagctatctgttttgaattttgctgatacaaatcttggggatgttgtgcctgtgaagcctccctcgatagaaagcaccccttttaagctcgttgaggaagtcaaagatttaaag

SEQ ID NO: 16674 - DNA, 382 bp, Glycine max
  unsure (1)..(382): unsure at all n locations
  Clone ID: PAT_MRT3847_115062C.1
cggccttgaagcgacaaacgngcancaaacggcggggaggaattataagagaagacccgcgaaagccacgcncgaggtccataaagggccagggagaacaggggaggaacaaaaaaacgtgtagagtggacgaggaagaggggattcaaaaacaaatgggggacagaaaaaaggcgatgcaataacaccgagatccagtgcgccaagagctctcacaggggaccacagcagaccaaggaataggaaaaagcaaccatgttgattgggaccaaaacacatgcctgcggaaaaataggccgagacagacggagaaaatactggcaagagccagaatccaacagaggcaaaagcaagagggcatgccagaaaaaggggccacgag

SEQ ID NO: 16675 - DNA, 775 bp, Glycine max
  Clone ID: PAT_MRT3847_115063C.1
gtccggagttcccgggtcgaccacgcgtccggcctccttcgtttcgctttctccagttacatttttttttttctgttttttttttctcattccttctgtgtctctctctctctttctctctctgcctccccaaaaaagctcgtgtttttttgcaattgctactgttgagtttcacaaacattcaccaaacttattcgttctctcattacccatcaatatttattctgtcagcatgtctcagactaactgggaagctgataagatgttagatgtttacatccacgattacttagtgaagagggatttgaaggcttcagctcaggcttttcaagctgaaggcaaagtgtcctcggaccctgttgctattgatgcacctggaggatttctgttcgagtggtggtcggttttctgggacatatttattgctaggacaaatgagaagcactcagaggttgctgcatcttatatcgagacccagttaattaaggcgagagagcaacagcagcagcaacagcaacagcaacagcaacagcaacaagggcagcagcagccacaacctcagaagttgcaacatcaacaacagcagcagcaacaacaacacatgcagatgcaacaaatcctattacaaagggctcagcagcagcagcagcagcaacaacaacagcagcagcagcagcagcaaccacaacaacagcagcagcagcagcaaccacaacagcagcatcagcagcagcagcaaccacaacagcaggggagggatagggctcatctctta

SEQ ID NO: 16676 - DNA, 458 bp, Glycine max
  Clone ID: PAT_MRT3847_115064C.1
ctcgagccgattcggctcgagatttactcatgaagttgtgctgtataaaaattctgttattccttttcctgcatcgggaattttggattacaagtggtgttccaactaaaccggttttgctgtgccaacttaatagacaaaaggaaacaggaaatatggaaatgaaaagggaaatattataagaaaatgacgatgtaataactacaattcttagttaaactttatgtttaaggtatgtgcataatatgtaatttagatatatgtctacctaaatctcaaccattaattttatattagaaagtgtgtcatggtgggagaattgattttgtatatttgccaaacaagcacaccgtttaacttatttattgcaggtaaaccatttccaaataaatcttttggatgggtcgatgtgaaagatgttgctaatgctcatattctggcctatgaaattgcttcag

SEQ ID NO: 16677 - DNA, 189 bp, Glycine max
  Clone ID: PAT_MRT3847_115065C.1
cccacgcgtccgaggcttgcaaaaaaacaacagaaggggggttttttttttggtcttccggggcggggttaatttctttctttggccttttaattttcaacttccaatggcaagcttgtgggccccggaaaccggattaacgaacaacccccccatttacaacgggttcaatttttgttcaaaccccaa

SEQ ID NO: 16678 - DNA, 490 bp, Glycine max
  Clone ID: PAT_MRT3847_115066C.1
aacaaacagaaaaaaaaacgggggggctattattttcgggggaaaaaacaaagggtttttggggggggccaggaatatcaaccaacatgggggaggaaggccacaattatcaaaaaaaatcaaaaccccccctctgggacattttatgggatttttccccgggcattaaacatggaaaccacaaggcaaacccccccggtagcagggttttaaaaaccccccaccctggggggggaaggattcacccccatcatccaaaacattaaaaggccccggcctggaacccaaccggaccttttggttctcccaaaaacccacaggggggttaatccagtccccaaaattttaaaccttgaagtcttcacgggcaggagccccccaactttttttccaaacttaagaaaagtacatggggaggccggcctttaaaaaaagattttccaattcaaaagtcccaaacaagggggagttccaaataaaacgggggccc

SEQ ID NO: 16679 - DNA, 391 bp, Glycine max
  Clone ID: PAT_MRT3847_115067C.1
gatcgctgacgcagatgctaccattgactatcgtgccggcgccttggtgcatacttcattcactggtctcaaggccatggctggcttccctaccatgaggaccaacaatgacattacctccattgctagcaaccgaggtagagtgcagtgcatgcaggactggccaccatttggcaagaagatgtctgtgactctttcctacctgccagaccttgatgatgcacaattggcaaaggaagtacagtaccttcttatgaacggatggatactctggctaggaattcggagctgagcacggatttaacgtaccgagagcgcaacaggtcaccaggcatctaccatggacgctactggaccatgtgtactctgactatgactggttgcactgatg

SEQ ID NO: 16680 - DNA, 271 bp, Glycine max
  Clone ID: PAT_MRT3847_115068C.1
attattactacaaggggcactgggataattgtatttccaccaaccattgggccaagtgaacaaaattttacttacatgagttacataagttgatattagcaacataatggggattgcattgggtggtgaaatcagaaaggattagattgtggttaattacttagataaaaagacgatacaagtgtgtggacccttacattgagaccatactcagtctgcttggttgttacaattaatgtcacgactgggttaggggccatagactgttgcc

SEQ ID NO: 16681 - DNA, 252 bp, Glycine max
  Clone ID: PAT_MRT3847_115069C.1
cgctagcaaagggtggtttagggactgcttacaaagcggtgcttgatgatggtaatgtgggtgcggggaagagacttaaggacgctcagataacagggaagagggaatttggacagcacatggtattgttgggaatggtgatacataccaacgttgttagtctgacggcttactatttaacgcgcgaagagaagttgatggtctatgaatacatgccgaatgacaccttgatctggttccttaacggaaacc

SEQ ID NO: 16682 - DNA, 337 bp, Glycine max
  Clone ID: PAT_MRT3847_11506C.1
gcctcaccatcaatttgctgctcttatttttttaaagttgggagctgctgcagtcaatcttgttggtggagaccaacctgctgatgtttactcaggaattgctgccaggtaattatcactaatgtttctaaaactagacttttttttggtcagcaaagataatagattaaataaatatatagtaccagaggtactgaaatacagaaaggaagttgccatgggaatggttccgtaatcagacaaaatagtctgagaaggaaccactctatagaaaccgaagaaaacaaaactagtagctaatatggtctagattcctatccttgattaccatcgaaag

SEQ ID NO: 16683 - DNA, 124 bp, Glycine max
  Clone ID: PAT_MRT3847_115070C.1
tggagagacgaataggtttgcgttgatcagcactgatcttttacacactgccgtgcacactggcttcagagaagaactatcgaacccatgagggggataaaagtgcaaactcgaactgaatatc

SEQ ID NO: 16684 - DNA, 500 bp, Glycine max
  Clone ID: PAT_MRT3847_115071C.1
cagtaatgatcaatacatggaaactattaatgctattacaaattcaccatccttcactgtgcctaacactggggaggtgatggagaagtctgattcattgtcagtagttgattccaaaaggattgaagagcaagcttatcgtttgaagaatgacgttgactttcctccactttcccattgagtgccagtgaaggatggtgaatttgtaatagcattaacagtaatgatcaatacatggaaactattaagactttgcctacctttcagcaggtgctaccaaaggatggcgattttgtaagaatgtctttggtggagtccatggccattcaaattgccgtgatgatgcccccgagaaacatgcgtagtagttttcatcatgttgtgtagctcataatgataatattttcagtagacataggctttgttgaacctaatcctgtcaaaaatacgattcgaagtagaagaattagctacagtgaagattttatcgttgtacataa

SEQ ID NO: 16685 - DNA, 4176 bp, Glycine max
  Clone ID: PAT_MRT3847_115072C.1
gtgttgtccctgctgccaacaatatgccactagacggacgagagaactttcaagacaaatgtttggtgaactataagaaccaaaatctaaatggtacaaaactatgagaaccaaagcctgacgtccctgctcatcctcctctgccactggccgcgcgcgaaccgtagcaggagaaaagtgtatagagatataccgcatacctccctaatctgacttatcgtccttacagggaccttaggccaatgccaggtaggggaaggggtctagctcctggtactctttgacagctccagagacacaccccgtaacatcggtctttgcccttgtctctataagaggtgtacttgtccgcggaggttacctttcaacttgctctagaaggttatactggtcttggtagtactaaaatcagatcatctgagacctacttccctcacccttctgcatggggatcacattatgctagtgatttcgtgcattcatctgagaaacatgaatctgtacatgtgagccctcaacttcaagtagtgccaagaaatgaaactagcatttacccagagtcagtcatttctattcctaggggcactgtgcctaacactggggaggtgatggaggagtctgattcttagtcaactcttgtctccaaaaggattgaagagcaagcttatcgtttgaagaatgacgttgactttcctccactttcccattgagtgccagtgaaggatggtgaatttgtaatagaattaacaatagtgatcaatagatggatacttttaagactttatagacctttcagcaggtgctaccaaaggatggcgattttgtaagaagtaagaagtaagaacaatgtgcattcttctcaaaaatgaagatagcttccctcaactctgggtctcttctagagattgttgaacacataaaaacgagagtaccaaataagtagaaaagtgctgggagtaaccttagaaactaacgaactagactaaactagattgggtgttatgttatctttattctctcttttcttacttaagttggtcctttgtacaaaagtgcatgtatattctcgttactttttttggctcttacatccgtgtttatttttcattatttagggatgtatatatcaggtgatttcctgagggtggcttccttgctctctgctgtttgtgccctcggcctttttcccgggaatcaaaaccaaaatcaaggtaatttctatcgaatacgcagtgcttttaagtatggtgcccgtaaacttggctggattcttaggttaccagaagacagaatagctgaggagcttattaggttctttgcaaacactctggaaaggcatggaagcactcaggggaatgtagacaagtcatttttgagcttatctacagcttccggaaaggataggaaacctggaaatcaacataattttgaaagcagagatgaaagagaaagatatgtagtacaagatgcaggggagttctttgactcctctagggatggaaatgcagttacaagttttaaacttggtgaagattctaaggatattgcaacatctggggtcttggatcgcacaagcactaatggttggtcttattgttcaaatgagcaatttgaaaataatatttctgatagtgaacctgccctaaattctgttatcaatgatgagaaagagaagcaagttatggcaggcaattcacccagatcacataccgatgaaaagcatatggcagtctccgaagcttcaaagtcattgttggaccttactggggattatgacagtcacattgggaacttacaatatggtcatatgtgtaatggttatcctgtctctctcgttgtgcctagtcctcctaggtctccgaagtttccaaataggaatccatgggaaactgttcatcaatgtgtaccgattaatcacagtattcgttctcaggcaaactcaaattgtgtaatgggacaacaagtttacgtcataaatcatcctactctgccaatgacttcttttggttcagaagagaagagaaaagtacgaggaacaggcgcatacttcccgaatatgacttcccgtccttacagggacaataggccaataccaggaaggggaaggggtcaagcaccaggtactcatggacatctgcagagacacagccgtaacaatggctttgccctagctccacaagagacaaatttgtctgtggatggaacttttgaacatgctctagaaggatattctggttttggtagtaccaaaaccagatcatctgaaacctatttccctcaaccttctacatggggatcacattatgctaatggtttccttcattcatctgagaaacctgaatctggacctgcaagccctcagcttcgagtagtgccaagaaatgaaatgagcaattacccagagtcaggcatttctactcctagggacactgtgcctaacactgaggaggtgacagaggagaagtctgattcattgtcagcagttgattccaaaaggattgaagagcaagcttatcgtttgaagaatgatgatgactttcctccactttcccattgaatgccagtgaaggatggtgaatatgtaatagcattaacagtaatggtcatacatggaaactattatgactttgcctgcttttcatcaggtgctaccaaaggatggcgattttgtaagaagtaagaagtaagaacagtgtgcattcgtctcaaaaatgaagatagcttcccttaactctgggtctcttctagagattgttgaacacataaaaaatgagagtaccaactaagtagaaaagtgctgggagtagtcttagaaactaacgaactagactaaactagattgagtgttatgttatctttattctctcttttcttacttaagttggtcctttgtacaaaagtgcatgtatattctggttacttttttttttgtctcttacatccatgtttaattttcattatttagggatgtatatatcaggtgatttcctgaggttgagttatagttctgttctgctgttcgtagctttgatgtgtgaaaccaaaagtttagatatcttactggaatggatacccaaaattttctatcagttgcaagaagtatattttagagtacttttttgcaattcgggtgtgcgcccatgattttattcatggccttgcttgattggctcagaatcgaagagcggctttaatgtttgaaatgctttgactcgtatgatgacatgctactggggaaatatcagctattcacccacttcattactggctgtgttttgtttgcacccagttgaacaccgatatagcatgatagattgggtgtcgaatgcgccggtaaattgagatactagtgtggaataagataagatcacctggactaattaaagcttcacgtacatgcgaaaaggctgagtatctcttaaaaagaccaatacaggttggtttaaagaaaattaccctgaaagattgtaaaaaaaggtctaagaaaactttagtagaagcattacataagatctttaactattttttttttttccttgaatgcaatttttggtacagtacaatgacttgttttgattaatcaatttaatgtatctggaatttaaatgtttctagtgttaagtggaaaacagattgataacctttatgtaggcttcatgcatggatagtattttgcctagcaatgtgttgtctttcattttatataaattgagacgaagtagttttgttcaaaaaaaaaaaaaaaaaaaaaataaaaaatcatgacagcagtgtctttggtggagtccatggccattcaaattgccgtgatgatgcccccgagaaacatgcgtagtagttttcatcatgttgtgtagctcataatgataatattttcagtagccatagcctttgttgaacctaatcctgtcaaaaatacgattcgaagtagaagatttagctacagtgaacattttatcgttgtacataaggaacctgtcactgtcatgaagagggagccctggtagaatgtttcatcaggctggctagagttataggcaaagtttgatgcgaggacaaacccgagtagaactgctcaatgctactttgtactttatattgctttgttagcacaattaaaattcgtcattttcccaacttgcttttttagtacaattaaaattcgtcattttccca

SEQ ID NO: 16686 - DNA, 393 bp, Glycine max
  Clone ID: PAT_MRT3847_115073C.1
ccagacccacgcgtttgtttaagcgtccgattaacagaacactagaggtgaccattacagacagaagccacagaagaggaacaacaaaacacggaaccagaggctaacagagacccaaaagaagactcaaagagaggaactgatgatgcatacgcagaagacaatgtgaaggacaaccgggacacgatgcaaaaaaacgaccagaaaatgaaaagacttccaactgcgttgtcgaaataggaaaaggaagaaaggccaaaaaagaactagacaaaagaagtggagatattataggtggccaaaggataacatcagcacgtagtggaaccaaacaaccacgggtggaaattcaggcacaacacctgaggccgagcaaccaaaaaaaaataaggg

SEQ ID NO: 16687 - DNA, 489 bp, Glycine max
  Clone ID: PAT_MRT3847_115074C.1
ggctcgagctcgagccgaatcggctcgaggctgcaacaaccaactctctctctctctctgtttctgtttctgcaatggcgaagaagaaggagaagaaggtgaacgtctccggaaaacctaagcactctctcgacgtaaaccgcagcaatgacgcgaagaaggagtcgcgctccgccgccaccgtgcgccgcctcaagatgtacaacaccaggcccgtgcgcgaccggaagggaaaagtcgtatcccacgagcttcagtccaaggagcttcccagcacaagaatccaacccgatcgtcgatggttcgggaacacgcgtgttgtgaatcagaaagagcttgagtttttccgagaagagctacagagccgcatgtctagtaattacaatgtaattctgaaggagaagaaacttccgctttcgctactcaacgatcaccagaagcaagctagagttcacctgcttgatagagagccccttccagatgcgtttg

SEQ ID NO: 16688 - DNA, 317 bp, Glycine max
  Clone ID: PAT_MRT3847_115075C.1
atatctaaacacactcattgcacatagtaatgcgctgtagttaagtgaataaaatattacatactggatacaaatgcaaaaggaactcttaaccagatatttgagactcttaccagtcttaagaagtcgcgttagcataggattagtggcgatagaactcagaatttcattcttaacgccaaaaagaacagccagtaaagctactggaaaaggatcaactctagtaagaaaaacaataccattacctttcccaagtgctgtcctatcctgtcgggtttgacaaaagcaatgactatgttaatcaaataaaaatccaa

SEQ ID NO: 16689 - DNA, 370 bp, Glycine max
  Clone ID: PAT_MRT3847_115076C.1
ggctcgagaccacataatgcgcgatgtgcgtagagtggactggctttcctcataccaactcctcatcttcactgacatagagagcggaatatccgtccttataacattcggcttacagatcatccacacccatactgaagacatcatacggcacttcacaaccgcctagtaaggactattgtgaccttcctgtggctagctgctaaaatatgcttaacccatatctgaagacgtgatcgatgtgagactcctggctgggtcaatgctcaccctcttgaaggcgtcgctgtccaggttcctgctaaccaggtcgaacctggtccacttggccctgttgcttgtgggtgccccctacacgaaccaccgtcca

SEQ ID NO: 16690 - DNA, 248 bp, Glycine max
  unsure (1)..(248): unsure at all n locations
  Clone ID: PAT_MRT3847_115077C.1
cacaaaccatgaggtggttcattcacttcacattcgagaaccacacccttataatccctctctcttaaagtgtgtctaattgaatccttgttttcttcacctagctagttctctccacaaaaacataaaaanaggctttttcttagtggaagtcctcaaacaccatatagtagagcaatgaagggcagactgaaaggactcaatttattacccaaactcgatcgtcttcacanncacaagtagtaagt

SEQ ID NO: 16691 - DNA, 637 bp, Glycine max
  Clone ID: PAT_MRT3847_115078C.1
aaaaaaaaaaaatttttaaaatttaaaaaaaaaaaaaaaaaaaaaaaaaaaaaaaaaaaaaaaaaaaaaaaaaaaaaaaaaaaaaaaaaaaaaaaaaaaaaaaaaaaaaaaaaaaaaaaaaaaaaaaggggggccctttttaaagaaccaaattttactacccctggattccaaggaataatttttttttttgggccccttaaattaaattccttgcccgccttttaaaaacttggggactggaaaaaccttgggtttcccaaattaaatccctttgaaaaaaatccctttttcccaagttgggtaaaaaacaaaaaggcccccaccaatcccctttccaaaaatttgcccaccctaaatggaaaatggaaccccccttttaccggcccattaaccgcgggggttggggggtttaccccaagggtaaccgttaaatttgcaaggcccttagccccggttcttttggttttttccctttcttttttcccaagttcgccgggttttccccgaaaagtttaaaatgggggcttcctttaagggtcccaattaagggtttaacggcccttgaccccaaaaaaatttattaaggggatggtttaccttatgggccattccccttaaaaaacgttttttcccc

SEQ ID NO: 16692 - DNA, 332 bp, Glycine max
  Clone ID: PAT_MRT3847_115079C.1
ctccgtctcggggttcatgccatccacatactgacactaactcctacatgtccacagatgcgtttgcgctacaattacttgcctgttgggagactcacggcagatttgaagactgccggactatatccagcgaggaggtggcgtatatcatcccaagatctcggcatgtggactaagggaacgagctgagtaacctcctatcaccctggtgatcctcgcggccaatgtctccactgtcgaggcggtactcgaagtggcgcacaagaatgcttcactttacttccagatgcgatccgcgcgcgtgagtatcgctggtcccacatagctgacat

SEQ ID NO: 16693 - DNA, 750 bp, Glycine max
  Clone ID: PAT_MRT3847_11507C.1
atgttcaaaatatactttctgattaatttctctaattgctatggctcggtcactggtaatgatccaccctctaccaagcatttcacatattggcttcactgttatgagccttatggtgtgtgccattgcattgcttatgtgtgcttctcattcacgcaaatggcctaagtggatctcttgctatgccttcgtagaagaacctgtcatagaattcaacaatgaggctgtcatgaacacttgtgatgagcgacaagaagatggctcactttggcagaagaacattctaatgggtgggaagtgccagctccctgatttctctggtgtcataatatatgattctgatggcaatatagttaatcctgctagaacttctcctccattactaacctggaaataaggatttcgcgttcattatatttcttcttggtctcttatagtctcagtttcagcagtgataatcgattgttgcgtaaaactccaagttaaaccaacaccaaactttggcagtatgtcaagagtgtctcttttgtatccatgtatatatatggaaggtcttgccatcttaaatacatctcctcccaaaaaaaacaacacaaccgtccctaggtcctcgcgcgcccccaataactgtaaccattcaccctattcccccattatgacctacgaagccccccgcaactcctaccccatatctctccctgtatcccccccctctaaaaacccccccccccctccaaaaaacctcccccc

SEQ ID NO: 16694 - DNA, 349 bp, Glycine max
  Clone ID: PAT_MRT3847_115080C.1
tggcttggaacctttgggctgatttatgtgcttgcatggtcgtgagaagatgatagaaggggaggaaaaaaaaaactaaaagcggacaacggtcctggcactgtcccgtacagttacgaaagtatttatctttctaatcctctctacctctatcgttttaaaattactcctgtctctcccgaattccatttgtatccgtcttattgtctgtctcttgtcctcttaccgtcttccttctctcctcatcctttcctctctctttttccaacttacccaaagtccgctatccggaccggaacccatactcaaccccgggattagaagaagaaaaggcctcggttccgccgcg

SEQ ID NO: 16695 - DNA, 331 bp, Glycine max
  Clone ID: PAT_MRT3847_115081C.1
ggccaccatctcttaaaactgtcttgacagctaagacctaacctccctggtactacctacggacgggtggacgcggctgaacgcaaatgttggagtcttagtataccggctcacagcaattcatgctgttctagacagcaggcagtcccatcaaagtaaacaggatgctgtactcatcctcgttcccatcaataagcatcctacctgtgtgcatcataacaggagtcttttacatgaaagtacaggcacttacacgagcaggtcaacatgctccatagctaaaaaactgagatcgtcatgcaatattactgtgggcggcgaccacatttca

SEQ ID NO: 16696 - DNA, 444 bp, Glycine max
  unsure (1)..(444): unsure at all n locations
  Clone ID: PAT_MRT3847_115082C.1
ggaaaatccacgngnnttgggaaaaaccatccaattaaaattttcccacccacattgcctttctacctccctaccttaggctaaatacctaaccacctccgtggtcctccttcggaaggaannaaaannaatggaaaattatcctttttccctttgggatttcctgnngtggccccaccaatgggtncaattgggcanatggccgnngcccaacttttccatnnttcgcattaaaaaagccaaacccaaccttttctntaacgaccaaccaaccaaaattttcaatcccccaaacctttggaaagcctaagtccaagaagtggaagttgctaagcttaattcttgaccagatgccactggcaccccactgcatttcttcagcctctgtttcatgaccggccaagtntccaagtaaaaatggtnngtttctttcttcttcttttt

SEQ ID NO: 16697 - DNA, 565 bp, Glycine max
  unsure (1)..(565): unsure at all n locations
  Clone ID: PAT_MRT3847_115083C.1
ccacgcgtccgaatttgaatcctctgcagtttggggaaacaaatttgtttggaagatgcagactggtttccaacttgtcttgcttccactaaatctaaagaaattatttccatccatttgtcgcagtcctttacaagcaactctggtaggcttgtaacaattgtcgtgataaagattgttttcaatgagttgcatctttcaatttgaacgcttctcggtttggcaaaacagtctggattgctaagaggatataggtttctaaattgtcctgcttgatctgaatctagaaaaattatttcctcccatttgttgcagtcctttacaactagttgttgcaactttggtagacttgtaacagtagtcgcagagaagaatgttttcaatttgctgcaattctcgatgttaatgcttcctaggttgagggaaaattgtggaaaatgagctcttacattactatgctgntgtgcttcatctacatctgaagatattatatnctcgaagttgttatagtcacatgcagacaactcattcaactctggtaggcttgaaacaatggttgcacaaa

SEQ ID NO: 16698 - DNA, 510 bp, Glycine max
  Clone ID: PAT_MRT3847_115084C.1
cccggtcgacccagcgtccggtcaaacaacggctacagactctctcgcagtctacgagtctacaccagtagggcaacaatgcactggatgaagggcagtgctgccctaactggggcttgatctcggagtcaggcctcggccactagctaacggtgtcgactgacacgtgtaaaatggcatgtaataacggcctgcggggattaccccaaagctgcgggagctgcagaatcccctgccctgattaaggaaaactacgccgtctgcactgggaccttgcctcgctctacagcgtccgtcgctttggtgatgactacataagaccggaaatgcctgcagactgtctgggctgcaatgctgctgttcactcgccagcggctgacgaacctaccttaactgctgagggctttgaacttagagtcggtacaattgatgtggagcatttccttctctcttgcctgatgcttgaggacttgcaagaatccgatgacccttcgcagcgcttgagcatcg

SEQ ID NO: 16699 - DNA, 374 bp, Glycine max
  Clone ID: PAT_MRT3847_115085C.1
atactctttgtctgcatgctatttatcaagttcaatattgtatcatattcaatataggatgatttgagaggttattacaactagtgcaacatgaccaacccaatctaatattatttaaactgagacacttaattcaagtttaatcgatcactaccattctacttcattagtataaaatattgtaactgttaaaagtgtcaaatattaatcgttgttgttttgaccccaagaacaccaccaacaccaaaaacaccaccattttccaaaaacttcaccttcaccttcacctacacaatcttcaaaggcaaacccaccaaccgtatcgccgtcgttaccgataccgtcaccatcttgtcattcaaaatccctatctt

SEQ ID NO: 16700 - DNA, 1305 bp, Glycine max
  Clone ID: PAT_MRT3847_115086C.1
cccacgcgtccggtttttccgactgtggcccagtttgccagctattgtagaatatactggcacatatacatatgaaggaagtggctttaaggctactgcagcccagcagtatggtgcatctcctttcttaagtggactgaaatccttgtcttccaaaccattccacaaagtttgttcacatattatccgcacagtggcagggtttgagatgtgttatgctgccaaaacttggcatggtggcttcttgggcatgatgatttttggtgctagtgaagtgagtagaaatgtggacttaggtgatgagactacaaccatgctgtgcaagtttgtggttcgtgcatagccttgttaaaggcggcccaaccacgacccaagactccaaaatctgacaacgaagatgaagaggaggaagatgacaaaaataaagaaaagaaagatggcgaagatgagaaaaagaaggggccttcaactctatcgaaactaactgctgaggaagctgaacatcaagctcttcaagcagcagtactacaggagtggcatatgatctgcaaggatagaacaactgaagttaattaactattttcttttggtgtttttgatttttcttttttccatggctttccgagaaatgtacgagtgtattctttgtaattttttctcattttacatacacgaattaggtcgattcatctattaccaaggagatcggatcagaccttcagggttggttggatgaccttactgatggtggagcggaatatatgcctgaagatgaagtgaaggtagctgcagccgagaggcttcgcatatcaatggaaaggatagccttgttgaaggcagcccaaccacgacccaagactccaaaatctgatgacgaagatgaagaggaggaatatgacaataataaagaaaagaaagatggtgaagaagacgagaaaccaaaggggccatcaactctatcgaaactaactgctgaggaagctgaacatcaagctcttcaagcagcagtactacaggagtggcatatgatctgcaaggatcgaactactgaagttaattaactattttcttttggtcttttggtttttcttttccatggctttccgagaaatgtacgagtgtattctttgtaaaaaaattttctcattttacatatacgaattaggtagaagccaaaatttgcccgagaaacgtttgagtgtattttttgtgttgcctttcccacattttcagaaaattgctttgtacatgtaccgtgcggctattgatctgctattttatttttgagcatttgttggggatgtt

SEQ ID NO: 16701 - DNA, 401 bp, Glycine max
  Clone ID: PAT_MRT3847_115087C.1
gaacaaactatattatgccatgccggtgttttagagaaacttactagccttcttgacagttctctaagtcagcgagatgctagtctagagtccttagctgcaattattagagacaacccagcggccgtctctgaatttgtggaacttcatggtggaagagctttacattctgtagctgaattaactaaagacagatatcctcgaacaaggttactagcctgcttgtgcttgatttctgtgaagaattcttcgacatgctatctccaagatataggaatcaaaaccaaattggtatacattttgcttgagctccttgatgattctggtcaagttggagatgaagcttcttttgctttctcaagtttaattgcagagaaggaagatttgcagaagttagcttt

SEQ ID NO: 16702 - DNA, 172 bp, Glycine max
  Clone ID: PAT_MRT3847_115088C.1
aagctaggtactcaatattgttgatgtgagatatattttaagcagggtcatgatttacagctcaatcttgcaaatgagtgatgctccaacaagggaaattaatcagcagtcttagagtgagattaagcctggcatgagggcaaaggctccagatcctatcaaatctaaggac

SEQ ID NO: 16703 - DNA, 465 bp, Glycine max
  Clone ID: PAT_MRT3847_115089C.1
acgaggtcaaacatcactattgcgaagcttgatgattctctgaacgagcttctggagaagcctgctacctgtgttgaagatggcgaggatcacccctactgtatatcattagacgggggggattagacttgtctttgtgctttgcgcatgaagatgcaacatcccatctagagcttattgctgtggagggtttgtggagtgatcatacagtggacgccactatgttgtatcaggactatgatgcatttaataacatatagaagattctctgctgtctatattatttttccctttaataggcaaggagattcatatatcatcaatgggacaaaatggtgtacaggtggtgctatggacccaatatgtcctattgtgatagttatgcgcacgcctgatttccgtgctgtgaagcataaacagctgtctatgaccttagtgcctcgacttactcctgtcgttcacata

SEQ ID NO: 16704 - DNA, 344 bp, Glycine max
  unsure (1)..(344): unsure at all n locations
  Clone ID: PAT_MRT3847_11508C.1
ctctctctctctctgtattactatttttaancaatgaccaaaaccagggcatttagacaactttttatactcatatctaccattaatatgtttactgtataacttgaacttcaaactcttccaccctcttacccttaccatcacccttttcactctttcacaccatcacctcttcacccaccatcaaattctcctcacccacaccaccaccaccaccaccaccaccctccatcaccatcacctattccttcaccttctcaccacaattaccctactaccccttcccctactaatccttctactcaccaccatcaccatcaccctccttctccttttaatccacc

SEQ ID NO: 16705 - DNA, 286 bp, Glycine max
  Clone ID: PAT_MRT3847_115090C.1
gaagagaatgatgcggatttggaatcggaatcactgaaagcgttgcttaacatgagaagaaatgcaaaagagaaagagctagaggcattgctttctggggagcaagattcttggtcgtgctacattgagggtcaagctggtgctgggggtactgagagcatggactgggctgcaatggtcatgcagatgtataagtcatgggcacagcaacgtggatataaagtaactgtagtggatgaaatgcctggtgagattgcaggaatcaagcgagctaccatcaaagtag

SEQ ID NO: 16706 - DNA, 488 bp, Glycine max
  Clone ID: PAT_MRT3847_115091C.1
gtttaatactatgctgcacacggagccgcatggtcgaccaaagtgttctcatcagcaaaacagttggactctggtgcacatgaaggctgaggtaatattgtgtggggacaacaggggcactgagacaacaattattacttgcagagatccggacatatagattggttattagacaatagcaactcagttaagaaaattcctactggattacataaggtggcatctgcttacctagaagatgtacatggtaccatcttttatcactgctgaaatgaaagttgagcacaatctgaataagattcatcttgccgggttattctacgacggccgaaacagattgtggacttaacacgacaaaaattttgctttgacagcaaaggagaagatggtagtgttgaaaaacaaaggcataactgctgatgtgattgcaaagagagctcatgaatttgaaaaacatgttgctcacgaaagcctcaaggatcaaactt

SEQ ID NO: 16707 - DNA, 694 bp, Glycine max
  Clone ID: PAT_MRT3847_115092C.1
ttaatggtagtccaaatgtaaaaattgatcttgattgttctttgcaagactaaataaaatccagggtttaaggatttgtactttgtagttcatatcgaaggatcttgattttggccttattctatgctcatgtgcaacatatacaacgaggagtaatttaatcttacatgtttcaagagacaatgtccaacttctgaaacagacatattgacggtataataacaaaactgaaagttggtaacggggaaaaggtataagaaatctcaacaaggggattgaaatttattcatgcaaatttatggttcattctacctccataggccaatttgctctcatcagatcttcgacctgctttggttgccacgcttattttgcttgagttatggcaacagtcggaacttttggaaaacttgcgatcatgagagctaaacttcatcccaggatagactttagcatcatcctcatcagataagctttcatcatgcatagagccagagcccctaccctcaaattcccttgatcttgatttaacagcgcagggggttaagcatggatttagatcattcagtaataggtcgtcagattggtcatcagagctgaattcccaaaagttagaagcatcttcccgggcatgtgttggtgttcttggagaacttccataacctggaagacctgcttttgctgaatacttatc

SEQ ID NO: 16708 - DNA, 388 bp, Glycine max
  unsure (1)..(388): unsure at all n locations
  Clone ID: PAT_MRT3847_115093C.1
ggctcgaggagcaatgatatgggggtaccctttcttggtaatgttcctttagatccacagctttgtaaggcagctgaagaaggttcatcctgctttgctaagaaagattgtgttgttagtgctccagcactaaacaagattatagagcagttgattgaaactaatgggtggtcaatgttagtaagtaatggagtgtaggagatcttgctttatgatgatctttgtaaatcaaaatctaattttatctatgaacgctttgcacagaatttttctttaataacacattttgggacctgacttattggtattctgggcctctatgttatacgtattttgacgacgtagttactgataaatttacagtaaaataagttttcccaaaanaaaa

SEQ ID NO: 16709 - DNA, 1707 bp, Glycine max
  Clone ID: PAT_MRT3847_115094C.1
ccagcgtccgacgacgctgtgccttgtgtagttgcccaaccgcgtcaccacagaataatgaaccaaagaaccgtaaatgccgtcgacacaatttctctttagattcaagcttgtcgtaaaccaacgacgcaacatccgcgacacaatatgattccgtgacgcgtaaggcaccgcgattgcgatttttgcagagtccgcaatgcaacgccattgcaattgcattttcactaaaacccgctatgctatttgacagcactgccgcctttgcccatctttatttgtgacacgttctttcttcagatagttacacttttttcttcaactcaagagaagagcttccatggagaatgcagacatccctgagaatgccaacgagcattgcccaggtcctcagtctgaatctgctggaaaatctgatgcatgtgaagggtgcccgaatcaacaaatttgtgccactgcccccaaaggacctgaccctgatctggttgccattgcagaaagaatggctactgtgaaacataagatattggtcttgtcaggaaagggaggagttggcaagagcacgttctctgcccaactggcgtttgctttagctgcaagggattttcaggtgggtcttcttgacgttgatatttgtggtccaagcattccaaagatgcttggcctagaaggtcaagagatacatcagagcaaccttggttggtcccctgtctatgtagagtccaaccttggggtcatgtcaattgggttcatgcttcccaatccagatgaagctgttatatggagaggcccacgcaaaaatgcacttatcaagcagtttctaaaagatgtctactggggagaacttgattttctaattgttgatgctccaccaggaacctcagatgaacacatttcccttgttcaattccttgatgccactggagtagatggtgcaatcatagttactactcctcaacaaatctctcttattgatgtgagaaaagaagtgaatttttgcaagaaagttggcgtgaaagttcttggggttgtagagaatatgagtggcctgtgcctgcctatcacagatttcaagtttatgaagttgaccgataatggcgagcagaaagatgttacacagtgggtttgggaatacatgagagaaaaagcgccagaaatgctgaatttgcttgcttgcactgaagtgtttgatagtagtggtggtggagcagtgaaaatgagcaatgatatgggggtaccctttcttggtaatgttcctttagatccacagctttgtaaggcagctgaagaaggttcatcctgctttgctaagaaagattgtgttgttagtgctccagcattaaacaagattatagagcagttgattgaaactaatgggtggtcaatgttagtaagtaatggagtgtaggagatcttgctttatgatgatttttgtaaatcaaaatctaattttatctatgaacgctttgcacagaatttttctttaatacttaagccatgtagggttgagacattttgggacctcaggtattggttttctgggcctctatgttatacgtatttgacgacgtagttactaataatgcttatttctctatgtttttgagattatatttcttcaatacattggagtttgtagccatatgaacatttgccgttcgttgagttgcgacattttgggacctcaggtattggttttctgggcct

SEQ ID NO: 16710 - DNA, 139 bp, Glycine max
  unsure (1)..(139): unsure at all n locations
  Clone ID: PAT_MRT3847_115095C.1
gtccaattgannattttaaacaatgactgggataaacttcaaganttccnattattcgnncattgaataagtnaaccaatttaattggattggtccgaatggtcatccaacaaaaatggagtanctaactccccattnc

SEQ ID NO: 16711 - DNA, 563 bp, Glycine max
  Clone ID: PAT_MRT3847_115096C.1
cctcacggacctcgccgccattgatcctcatcttcacggacctcaggttttattttctattcaccctcctcaagctcaagcagtttgaagctttgaatatactatttcatattagtttgggaaattatgttttctggctctgctatttcatatgggacttgtgctggtgtgagaattctatgttctgtttgttttcttatccgtgttagaggagaattctatgtgctggtgtgagaattctacgtactgtttgttttccagaaatgctaaagcagtcgaatttgcagttaatcttaaattatatgttctgtttgttttcttatacatgaacctgataacatgggacttatgcttgtgtgagaattctgccacagcctttaagcccccaattttttccaatagtttctataaaatattataatctatatagcatgaattatgattgcagattgtcagattgctattttgatcggtagattggcagatttatattatgattgttaatgataactaattgtaatttgccatagccttaactgattgacagattactattattaagt

SEQ ID NO: 16712 - DNA, 312 bp, Glycine max
  Clone ID: PAT_MRT3847_115097C.1
caaggtcagtgatgtggagcttgatcaaatcagccttctcccaaatgctgattattagcttactagcttactcagcaaccggaataaggctgatttgatcaaggccagtgatgagcatcttgactgactcaccgccaagtgacaagatagacgatgaatctgctttgcaagtgaatacaccccaatacaaatgtgccccttgatacccttggagaacctgtatccagatactacagcgataatcacaaaagatcatgaagatgctcctcatgttaaaaaagttcatacaactgcagccgcatattgctctat

SEQ ID NO: 16713 - DNA, 389 bp, Glycine max
  unsure (1)..(389): unsure at all n locations
  Clone ID: PAT_MRT3847_115098C.1
aggcgtccgaacacgtccgagagggcctcagtagggtactctgcggcagcaccttgaaacgcgggaggttcatactatcttcgccggccttcaccggcctgcagccatgtcaacgaaaaccgttcgtgagccactggaggaaatcctggctctgataccatctgataaagatggtaaacctatcttctgtgtcgatcaactacttatctacttcaatgacacctgaattcatgtcactgaacagcttgagaaggaaactcttgtgcatatgattcgcaagatgattgttaaaggtgacatacatacttcagctgcctatcctactataactagctgacactgatgttgctgcatggatgcaaggaactgggcataactgctcttnatat

SEQ ID NO: 16714 - DNA, 297 bp, Glycine max
  Clone ID: PAT_MRT3847_115099C.1
gtcgcatgcacgcgtacgtaagctcggaattcggctcgagattggattgcccccaacttgtgaggctgaagactgttgaagacctttggatgctggaagactgttgccgagaagcaggggcaggactgggaagccctgagggtgaggggagggaagtggtgtgatcagagccccaggcatgactgtgatggtgaaactgttgccttaatgacatcctctaccttatgtaacttggtgccattttgaaacttgaatatagaaggtttccagagaggaaaaaaaaaggagaaaagaaac

SEQ ID NO: 16715 - DNA, 403 bp, Glycine max
  unsure (1)..(403): unsure at all n locations
  Clone ID: PAT_MRT3847_11509C.1
ttttttttttttttttttttttttttttttttttttttttttttttttttttttttttaaaataaactttaaagaaaacttcaggaccatcacccccccaggggttaaaaacaaagggaacaagcccccccctcgaaggggaattaggaaaaaacccccgggggggaaacccctccccaaaaaaaaatcccaaaaaaattcaaaaaaccccaatttttttttttttattttcattcccccccccttagaaaccaggggggggaacctgctcgggggggggggtgaaaaaaacacccttntaaacagggcccgggtttccacccccgatgaaaggcccggcccataaaatccaggggtgtggccaggtccagttcacaacagggggcccaaatgtcaagggggg

SEQ ID NO: 16716 - DNA, 288 bp, Glycine max
  Clone ID: PAT_MRT3847_1150C.1
cctgaacgtggggaagtggatcagacgctcctgggtgaatctccactctcagttcaacattgtgattgcttccttcgatagatgcggcggtgggacgatcagcttggcggggatggagatgaagcctgctatgaaactggcggagtctgagcgttcggattctgccactacgtgagcactcaagtcttggagggcaatgatagactcgatgcttgagagactggtcctcgcgttgcaggtgatggaaggggagatgcggtgcgctttccaaccattcccgacataaga

SEQ ID NO: 16717 - DNA, 391 bp, Glycine max
  Clone ID: PAT_MRT3847_115100C.1
ttttttttttttttttttttttttttttttttttttttttctagaggagtccaatttaaaggccattcaagaatgctattcgttttttttttttttttttggcaaaacaccttttgtatttttttaggggttttttaagattttttgctaacaataataaaccctgtcttactaaccttttggtttcaaagtcggcatgtttgtaatggggcttctgtttaatcccccccacatttggacaatgcttttactctgatacaaagttttttgggttaaggcttttaatttaagaaaattgaaacagtttttgatataagaattatcctttttggctgctgcatgtttgcttgggatttgttggttttgatttttttgcctatctctcgccccc

SEQ ID NO: 16718 - DNA, 422 bp, Glycine max
  Clone ID: PAT_MRT3847_115101C.1
gcgattttgacaatgtttattgcttgtacttagctatgactgtcttttatgcattccagcatgtgttttaattaatttatatcatgttcaaaacaacttataattaaaatcatggcaagagaggtttagaatccccctcccccctaaaatttaatctataatccaaaaatgcacttgttgtttcaaagctactaaagtctatttaatgattgtcttttcttctgtccctacacaataaaatacaccactttttctagtagaaggattagtgaacagttacataatgcaaaatgaattttggcagagaagaggtggcttgtgatgaggcagagcttggagaagaagaatttgcagaaaaaatgctcaatcaacagaagttacaggaaccaggtaaagtttaattaacttctgatgaattctat

SEQ ID NO: 16719 - DNA, 323 bp, Glycine max
  Clone ID: PAT_MRT3847_115102C.1
ggggggccggaaaaaaattattaattttggctatcccaaaaggggaagaaaaagggcaagcctgcttaatggttttttgcccaaaaaaaaaatggctattgaaccccaagctggggcctaaaaaaggaaggaatttcgggaaaaaggaacagtcttggctgcggggccggggaaaacccccccctctgggggaaccggggatggttctggggccccagggatttggggaaaaaggaggttccgtttcctgtcacggttggggggctgggcgacattgtgggcaggttgcccccctttggggggggcctatgaaggttggcccc

SEQ ID NO: 16720 - DNA, 358 bp, Glycine max
  Clone ID: PAT_MRT3847_115103C.1
gcaaaacaaaaatccttttcacatttgtctggaaattccttttaaaacctgaatttcacttcccacctttaccttttttggggggcgaccaatgccttgtcgcaccccatattcataaccgacccctaactggatcctttccaaaaaattctaggccttaaaaattcttaaagaggcccccttcaaaattctcggttaggtccacaccttattcgggtttgaattaagcaaattgttcggtatccttggagaattcccccaagcccgaacttgccctttgagattctctttagctttttccttagccctggtgccccttttcacccgaagccccaagcccaatttggggacccccccg

SEQ ID NO: 16721 - DNA, 321 bp, Glycine max
  Clone ID: PAT_MRT3847_115104C.1
aatatacaaaagttccaatctctatttctaaatcttatttaaagtccaattagctgtgcattttaattgtcatagaagcatactaacatactacttacaccatacatcataatatccccatctctataacaaaccaaccgtctctctatactatccactcaatctaactccttcattccacttcatagctcatgtatcgcatcacctatactcaatatcacttacagtcgcattcaacaatattactccaaaaaccctaactttacccaacttaaaagacaaacctcacacaccacattcatcaaaagccttcttaactaa

SEQ ID NO: 16722 - DNA, 238 bp, Glycine max
  Clone ID: PAT_MRT3847_115105C.1
aaggatgaagaaattttgggaggcgttttttacaaaatatagttttttaaaagtgcttaaaaacaccattgtaccatccctcctcttacacgacacatctatccaggggtctaagaaacaaaaaagcgtggcattcaattacaaaactaaaaggacccttgcctaatttaagcttgatagcccaaatagttccccgctagcaatctaaaacttgctagatatatttttgtttcttgaa

SEQ ID NO: 16723 - DNA, 216 bp, Glycine max
  unsure (1)..(216): unsure at all n locations
  Clone ID: PAT_MRT3847_115106C.1
cggaccgaatacccgttcgacccacgcgcacgtctcaataacnaaagcggaaccaggcaagggaatatttacagcanaagggcgacggcccacacaaacccaggaccaaacacgagaaaaacccagcccngacagaagaggaaaagacggaagcgaacagaaacagaggcaccccggccgaagcaccagcaaagcgagcccangaacccgaaaaac

SEQ ID NO: 16724 - DNA, 372 bp, Glycine max
  Clone ID: PAT_MRT3847_115107C.1
caagcccaggagagcatgcgtctttttaaaaaactaacccaccccactattttggtgcctacatgatacatcacccttgaggaaaaatattatttagatttccctaagtgcctagttaataggacccatagttctttgtaagcgttggtggcggccgaggccccattgccgcggaaaaccatagaggtttttctacacaagccatgccctctgcaaagcttgaaagaggcttcttgtccccctttctggccccacgacactttgatgatccataatggtgagaagccaagcctaataattgataagcctcttggaccatatccctctagtaacacaccatgggtcagcctttgctagctacatatgagaggg

SEQ ID NO: 16725 - DNA, 451 bp, Glycine max
  Clone ID: PAT_MRT3847_115108C.1
ggctcgagggcaaaattaagagtgcgatttgtgggagaatactgtctgccaaccacgtcttcaaaccaggggacacacattaaattgggaaaggaccatactccaatctttagtgacccatggatgtataggcacagggcatggtataggaagtggtgtgctagaacagccagttatagaaaaagtaacccttggccctgagtgtgtattagatctaaagaaatcacggaagtcagtaccgtgatatcgagtcataatgctcaacgacaagctgaataaaccggaatacttggtccaagtgctgatgaaggatatgactggaatgaccctggattatgcagttaatatcatgcaagatgtacactacaatggatagctggttgtgattatgagcctaccggcagttgctgaagatcactgcctgcatctaagatgccttggattgttcaat

SEQ ID NO: 16726 - DNA, 292 bp, Glycine max
  Clone ID: PAT_MRT3847_115109C.1
ctcgaagccaatggctcgagaaagccatcgccaccgttgctccacctttatgctgcaacctccccaggctgtttatacaggggcggatcgacaaacaatcagcggattttctctctttcagaatcatgggtcttaaaccatcactatgaggtggccccactgaggttttgtgcacctctgacaggagattggttggccagagatcttcaacgcaggagggcaggacatgaagctgaagcgcaaggagggattcaagcgagtgagatatagcgggcacaagcattgtcttggt

SEQ ID NO: 16727 - DNA, 336 bp, Glycine max
  unsure (1)..(336): unsure at all n locations
  Clone ID: PAT_MRT3847_11510C.1
ccanagcctgcttggagagccgaacaacgactcgccgctcaacactcaggcggcagcgctcctgggcganccaggnaaganttaggaagatngtggagaaaatctacaagcccgccgcatataggaagatgacancgccggtgaagatgtngggtcttcaaacactcatttcgcttggattnatcgacnagagatnatatttggatttttnggttcccagnctggtgctgtagcaggaaggnatatttgggtcgcctanagcgtggcgattctgtaanttgtctttnangtccgaaatttccagatttcattttccanaatcgttcgtccaaaaaa

SEQ ID NO: 16728 - DNA, 412 bp, Glycine max
  Clone ID: PAT_MRT3847_115110C.1
gcaaataatgcggaggcacgatatatattttctgtatgtggaattactgctattcacatcggggagacaattgctaataaagatatatgggaaaccactaccttctatctaggcggaacaaccaacagtgaaaatgtctatctccataaacacttcaccttttgtaagccttgagggaaagtttgtctctactatgaatttaagggacaggctctatcatgaacttgatcggaatcttgctatgaaagttgaaaatgatgaaacagcttatacatttgttgccattgagccaccaactttgcatattaccatacttatataaaacatgcgaagagaaggatcttaattcatggctgttccttccaaaggtatcaacatgatcgcagattaaaaactgttggaaccctatgac

SEQ ID NO: 16729 - DNA, 271 bp, Glycine max
  Clone ID: PAT_MRT3847_115111C.1
cagaacatctctcgacgccaagggggagaagcacatggagcgcattgctgctcatggagaatgcaaccaacgtcccatgacaggacacgccgaaaccgctgtcatgggcggcgggttatgggtattttttgaccgcggagcttatgttgcggtggggagatacacagggcaagcatggaacggctctctcgaggacagaaggccggctgccaacatggacccatacgtggccccttacatgcatgcagacacaaccatcctgcggaaccca

SEQ ID NO: 16730 - DNA, 271 bp, Glycine max
  Clone ID: PAT_MRT3847_115112C.1
gtgatttgaattttgaatatcttgggaggttgaagggtaaatttcattgcatttgctgaactttgcttcatggcattgacatggaatgctaagcaaatgtacggcagacagaatagtcctaaaatgtggcatgcagactggaaaatcacgaattcagatgtggaatgcagagatgcaaattccttaataaaaaaaccagatatactaaaatgagtggatctaaaaggaaaatctaggatggccagggatgaaacttaaaggacggaatagg

SEQ ID NO: 16731 - DNA, 1625 bp, Glycine max
  unsure (1)..(1625): unsure at all n locations
  Clone ID: PAT_MRT3847_115113C.1
ggggnnnnaaggggccagtcgatccgatacataacacgtttacgcaccgacgtagctcgaattcggtcagcggcattaacatccgctacctcggtcgcatcgccaagagaactcttgccacacctgtcgtcatggatctgtgcgtcagggagatggttgctcgcgccgccaagtacatctttgccggccacctccgaagcacagagaccttccatatctccaactccatcgcgcatttcctcaactgcttcatcggctcctctgcgaacggtggcgccgctgccatccaggcaccgcaacctctgcgacccaagctcaagaagaacggcaagtccaaggtgaaggagcccgttccttctgccgctcctttcactctcacgaggacagctctctggaacgagatcgtcgcgctggtcaaggagaaatttgcgtatgatttggcatttgattatgaggtttcacgtcccaccgttttccttcgctccttctgcttgaaggtcggcattcaagtcgccgcgcgagactacgatttcaccaaggtagacccgttcgtaccggccgatattttggatctgttccccgtcgtcaagcatattaacccgaggagtatggacggacaagatctgcaggaagctggcagatcattgactcttcaaggaagattgcatatggcacaggagctcctttccgaggctttggccatcgttcagcaggtccacggcccactgcaccctgattctgccacgtgtgagagtaatctggccatggtgctctacaactccaacgatctgcagatggcgatctctcatcaggctcgtgctgtcgtcatcaacgagagggtgcttggactcgaccaccaggacaccgctcatgcatatggtaacctcggtttgttctgccaccaggctaacaaaacgaaagaagctctcgccttcatgtcgcgcgcgatgtatttggcgaacctcgtcgccggcgaaactcacgccgagcacggcgctacatacaccaacatcggtctgatgctctccgaactcaacaagcccgatttggccatcggatacctccaagcggcgctcaaatcaaacgaagctattttcggcgacagcccggtgacggctggaacattgcatcacctcgccatggccaacagtaaatcattgaacttcaaggaggcaatgcaacagcagaagaggaattacgccatgctgagcgcaaccgtgggcgagaacgacaccaggacgaaggaatcccgtttgtggctgaaccgattcaccgcgtcggccgtcgcgaagcagaaggagctgaatcaaatcaacgcgatgctcccgaagaccgcgccgagacgacctgagcctgcgcctgcggccaccaccacccgtcttcttcccacgcaggcaactcccagcagcatgggcaacttgccgctctctgaggtccttcgatacatcaactccgacagtcgacgggaaaagcgaggaatcgtcaaactgtccacgtcggccggcaaaaaggacaagaagcgagaggaggccatcgaccaggaagagcccaccgtcgcctccacttcggcagcgccgaaagacaagagcggcaagaagaagaagaagaagtccaagaaggtcgcc

SEQ ID NO: 16732 - DNA, 480 bp, Glycine max
  Clone ID: PAT_MRT3847_115114C.1
ccctcttttccgcccacgcgttcggtcaagtttatacctagtgctagctccaatggcagcagggaagaaggggcacatcgtgatgatacctttcatggcacaaggccacatcatcccattcctcgcattagcaaggcaaatccaacagagaacaacaagcttcaccatcaccatagccaacacacccctcaacattcaatacctacgatcttcactttcttctcccaatgaaatccatcttgctgagttacccttcaactccacccaacacggtttgccacccaacatagagaacaccgagaagctccctctcactcacatagcaaaactctttctttcaacactcagcctcgaagctcctcttcgctccttgatatcacagatcacagaacaagagggtcaccctccactatgcattatatctgacgtgttccttggctgggttaacaacgttgcaaagactgtaggtattaggaacct

SEQ ID NO: 16733 - DNA, 360 bp, Glycine max
  Clone ID: PAT_MRT3847_115115C.1
tcgtggctttagagggatacttttactaccaacagagacatgagagatggtcttatactaagaaaacatctcttacttttaacattagtacagcttttcacatgtgtgaataaggttccttgttacctggactatgcactgttgcgttttatcatcagggcagagatgactatgcgtgatcactcaagaatggtgtacaaactctgtctcccctatttctgaatgagcatcctttatggatgcctctaccgggctcagatccgtagctacctctgctagtacgactcttactgctttttgtgggcacatgaaaaaacggggagggggaccgcgatcggggttagaaccaggtggatcttg

SEQ ID NO: 16734 - DNA, 589 bp, Glycine max
  Clone ID: PAT_MRT3847_115116C.1
ccgggactgtttgacccatttagaaaggggaaagatagaaactcttaatctctcacaagtctcacacttcttggttgtcatggaggcaccttctccgaggacctcgcgcaccttttccagtgaactggtttccatctccggtgaattggttttctccatagcgaagtagggggcaaagtcgagttcataatctctcctctcattccttgcttcaagttcacttcttctctgattctcttcttcgattttgtgatgttctctctcatttttcggttttcgttttaagttgatcaatgtgactagtgtagttgcttctgtatgtgtttctgggttgcttaatctgcttctgagtctcgcaccttctctggcaaaaggaacatcttcgggtggtttagtgcccccaatacagatgctaatgttattccaaccatgtctgagagtgatggaatcattctcaatgattattatgattgaaaattatatcaattacttttacttgcagttgtttttttgttagagttgtagttgccaatagattttatttggcaatgttgaacttaaatgttatgatgtattgaatttgattttg

SEQ ID NO: 16735 - DNA, 322 bp, Glycine max
  Clone ID: PAT_MRT3847_115117C.1
aaaaaacagaaaaatacttttcttccaaaaaccttggttaaatatttacataccattaaaggatttcccaaagcggcaacatttaaaaggaaattcaaaccaaattgccccttaaggtggacaatataggattcaaagaaccgattataaaaagggaaacccaagatttaacaatctcaatgcccaacacacttcccagaaaagaccgttctcttttccatttcatccaaagactcctgccctgattcaagggacacataggatttcatctgttcttcttgcatcacatcatctacacaatatgacattccaacacacacca

SEQ ID NO: 16736 - DNA, 550 bp, Glycine max
  Clone ID: PAT_MRT3847_115118C.1
ggctcgggcaacagtgcagatctaacccatagcccaaaacatcatcaaactgagggcaatctgagcttctccgcctttgccccccctgccttaatcttcaccgtcatagccataacctaccatcccccagacccatggctcgagtccacccctgccctaaccaacctcttcacccaatcacaaaatgccactttccgaatcgactcctcccctcccctcaccgaagccgtcatcgagaaatccgaacagcaaattgccaactccaccgctaactccaccgctgattccaccgactccaccgacgcggcgcttccttctacccccgcctgcgacggaaccataaactgctccaaccctcgcgttcgtattgctattcagagattcaacctccgcgcgttcaagtccattgccttcttcgactaccaaccgccggtgaacggctccgtcgccggcgagtgcgacgtcccttggcgctttcggaacatgcgcgaacgctcctggcgcaagtaccgtgactttcgccgcttcaagacgcagtcaccgacgactg

SEQ ID NO: 16737 - DNA, 919 bp, Glycine max
  Clone ID: PAT_MRT3847_115119C.1
gcgaacactctaacattagacttggcatcagattcagatcctccgtcgccatcagccctaacctgggggggctttctgtagcccatagactaacagcagcacctcaccttcagatctaaaaaaatgagcagcaacagtagcagaaccgaacccatagcccaaaacatcatcaaactcatcagcaatctctgcttctccgtctttgtcttctctgtcttaatcttcaccgtcatagccataacctaccatcccccagacccatggctcgagtccacccctgccctaaccaacctcttcacccaatcacaaaatgccactttccgaatcgactcctccgtcctcaaaaccggcgaagacctcgctccctcgccgcaagaccctcccctcccgtcgccgccaccctccgcctccgccgtcaccgaagccgtcatcgagaaatccgaacagcaaattgccaactccaccgctaactccaccgctgattccaccgactccaccgacgcggcgcttccttctccccccgcctgcgacggaaccataaactgctccaaccctcgcgttcgtattgctattcagagattcaacctccgcgcgttcaagtccattgccttcttcgactaccaaccgccggtgaacggctccgtcgccggcgagtgcgacgtcgcttggcgcttccggaacaagcgcgaacgctcctggcgcaagtaccgcgactttcgccgcttcaagatcgcagtcaccgacgactgcaggtacaaggtggtgcacgccggcggctggcactccggcgccaatgctcgccggaatatgacgcgctccggtgccgccaggggtggtaagacccttgccgccgcgggcttcaagccgcgatgatgagatcaatgacacgattccgactttgggatcggagactaatttt

SEQ ID NO: 16738 - DNA, 453 bp, Glycine max
  Clone ID: PAT_MRT3847_11511C.1
cgtcatttttgtttatctatccgacagcgtcgcaaatccaccagccgttatggctcccttcagcggggatgaaacagctccggctttcgggatcctcggagccgcatctggcctcgttttctccagtatgggagctgcctatggcacacctaatagtggtgagggcgtggcttccatggcagtgatgagacctgagctggagatgcaatctattggccctgtggtcatggagggagtttggggtatctatggccgaatgattgctgtcatcatcagaaccgctattgatgcaagagccctagcttattacctgggcgatggttgtgcacatctctcctctggacatgcctgcggattgggtggcctctctgctcgcgtgggtatgggtattgaccgtgatgctggagttcgagccaatgcacagcatccaaaactatttgttggaatgaatct

SEQ ID NO: 16739 - DNA, 1511 bp, Glycine max
  Clone ID: PAT_MRT3847_115120C.1
catccaaaacgaatataagctatacaaaccaataacctcgttaaatccacattaatcaaaattctaaaattttatgtctaattaacttttctcttttctaattggaccgtaacaatggtaaataattcttagttgtttccactgctgctcccggtagcatcaccaccatttgacattcttggatcttcatctttaattgtttcttccaatttgatggtttgaagattagttgtaaggttattgtatcttgatccaatgggagatgttgaacctcgctgagtagaggacaaccatcttttccactcgttaagtctccttagcttgtcaccttgcacttccacgatagcagaagtcctgatcgaatcgagtatctactgcacggtggggcatcaacttctaacgcccgggaggctccttcttcgcccctggtttcttccacgctgttagttgattttggagcttcaagattcatctgtgtggtccctctcggagtttttgccccagaattagatcctcgctgcgcagagggcagccatctcatccactcgttaagtctctttaacttgtcaccttgcacttccacaacagtagaagttctgagagagtcaagtatcaactgaatgttggttgtcaaatttttaactcgaggaaagtctgctatcaaagtaacaggaacccaaccctgttcgtccattttagaccttaaaaatgcgtctttcactaaattagcatcactaaagtaatattcaatttggtagactatcatattagagagaggagattctgcagcagagaagaacggtgtaggaggagggctgtgagcgaagaatggcatacccgtaaactgttccactgttactggttggtagtaataaaactcaggaaaaccaatgggtttagcaaatggtccaataggctgaggtcccacaaatgcagcagcagtagtaggtggtggtgtgtgtctcggtaatcctcttggaggcatccttggttgaggaacaaatgcatctctagtattcacataatttccacgatcttgatgatcacgccggctaccataactattatgataggaaccatctcctcggggatgaggcccaaaataacccctgcgagaggaaccccgatatccattcatggcaggcacaaaaccccctaccattggtcctgcatcccagttattgttccggtaatgatctcttggagcagggtcagggacccctggtaccatattacaatagctaactggtgggagctggtatacaggaaaaggcgggggcggcggtggtgggggagggttagagaagttgccctgtgaaggatcagacacagtgctgctgctgccacctacccgcttcattgatctttgtctaccaggcacattataatttggagcagaattaggttttgcattagtggtcgcttgtttctgaggagattgtgaagccattggcccctgaggacccacgcgtccgcggacgcgtgggcggacgcgtgggcggacgcgtggg

SEQ ID NO: 16740 - DNA, 337 bp, Glycine max
  Clone ID: PAT_MRT3847_115121C.1
ggggttgtgcttttttcagtggcaacaacctttttccccgttttgctttggttaaaaaaaactaaacccataaaccttctttttgggggggaatttttattatcccccggaaaaaaagcctccaattccccccaaaacgaggcccaaccagttggggaaaccaaattaaataatttaaaccccatttttttttttataaaaaaccacccaaaaaaccccttgttattttaatttgttacccggcgttaccactaaggggattgaccttgttaccgcccggggcgttgggggcattaacaactggggggggggacatttccatttgggaaaccctaac

SEQ ID NO: 16741 - DNA, 234 bp, Glycine max
  unsure (1)..(234): unsure at all n locations
  Clone ID: PAT_MRT3847_115122C.1
acntncgctnatnngctgcncccncagtcanannacactancnnaccnncaacccngngtaacgnnnctnaagacaanctngnngangnangaantannngngnctcnnntnanngannagncnannnnncanaccggtnnggcagngangtnaggnngnnntcgcttgtnnacnacagcnnagcntnncgnanntantnccaannnnnnnantgcnaannantgnnnnagngc

SEQ ID NO: 16742 - DNA, 505 bp, Glycine max
  Clone ID: PAT_MRT3847_115123C.1
gttttaaacattaagggaatcagtgtaggaatagaaaaaagagcggtgttgtgtgtaattcgaaaaaaacttgggagatacgagtgtaatttgctctaagttaatatattttactaacatttagggactaatttgaagtttcaatatttagagggttgcttatgatgatttctaatacttaaaaggggttacctgtatgatttttttttacattggagaccatttaggatagagtatatttgaaggatttgtttttacttttggttaaattagtttttttatcctctaatttattttttagatttgatttagtcctctattttttttttcaatttgatccactaatttttaaaatcggttcaatttgatcctaccgtcgatcaatggtgttatgtaattactcattgtgttagtttaaaattgttacaaaacacattttttaacacggtcagggtaattcatatggttggatcaaattgaatcaattttaaaaattagagaatca

SEQ ID NO: 16743 - DNA, 193 bp, Glycine max
  Clone ID: PAT_MRT3847_115124C.1
cccacgcgtgcgaagtgtttggagttcaaaatcacacttatccagttaaaggttcaggtcggatacactgcctttgacgtattgaaaccttaaattagggattacgtatgagcagtctggatagcagaacctgtagtcttacacagtcaagtcatatgtatggattacactatcgaatacatactgacttaga

SEQ ID NO: 16744 - DNA, 393 bp, Glycine max
  unsure (1)..(393): unsure at all n locations
  Clone ID: PAT_MRT3847_115125C.1
ttntttttttttttttgttttttttttttttttttttttttttttttttttttgggggaacagcttaataacaagaacttaaatagccaaaatgcacacctaccggggccatacatgttttgggggggtttttcttttcccaaccaggggtttatacaaataccgtttttttactttctgggcattggccacataacggactacctttttgtttccattaaagacctccacattttggcctggcattttcttgggaagggccttgcgggctccaatggggacattgcaggatgacatccaaaggggacgcattggtttatacttccctacgcgcatgagaagggcggagttaccaaagggggtattttttattttaaggttgcgaagtttttt

SEQ ID NO: 16745 - DNA, 249 bp, Glycine max
  Clone ID: PAT_MRT3847_115126C.1
gttacacggcaatgctcaacatatatgggagtcagggagatgttgacaaggcgatgaaattgtttgacgagatgtgtaagttgggtgttgaactcaatgtgatggggtttacctgtttgattcagtgcttgggaagggcaatggaatttgatgatttggtgagagtttttgacatttcggttgagagaggaattaagccagatgataggctatgtggttgcttgctatctgttgtgtctctgtctcagg

SEQ ID NO: 16746 - DNA, 1548 bp, Glycine max
  unsure (1)..(1548): unsure at all n locations
  Clone ID: PAT_MRT3847_115127C.1
ggtccggnaattcccggngtcgacccacgcgtccggtggctaatcagcttcccataaggcccagaggaggccagatgggaataggagttgttggtctttcgggtgggatgagaatgcacttcttcagctgaaagatgggttaggggatgatgatattgaggttatttatgttggatgccttaaggaggaggtgcatccaagcgaacaagatgaggtttcacagacacttcttgagaccttcaagtgtatcccaacttttctcccagctgaccagtttactaagtactatcatggtttttgcaagcagcagttgtggccactgtttcattacatgttgcccttgtcaccagagcttggtggcaggtttaataggtcactgtggcaggcttatgtgtcagtcaataaaatttttgcagataggattatggaagttattaaccctgaagatgattatgtgtggatacatgattatcatctgatggtgttgccaactttcttgaggaagagattcaacagggtgaaactggggttcttccttcacagtccattcccttcatcagaaatatataagacattgcctgttagggaagagatcctgagagccctccttaattcggatttgatcggcttccacactttcgattatgcgcggcatttcctctcctgttgtagccggatgctcggccttacctatgaatccaagcgaggttatattgggattgagtactatggtaggactgttagtatcaaaattcttcctgttggtattcacttgggtcagcttcaatcagttttgaggatgcctcagactgaagaaaaagtttgcccctgagctcattaaaagaagttttcaagttttctgaacccccaaaggccttaagaagggtttaagcctttccatgatcacgtttttgttttctcaatagttgatgaccatatatggtttcggaattaccagatctctgttcctcataatgagtcagacaaattacctagaggaggccttgataaaatgtcaatgatcgaggttggtccgcgattctgcttgaacccaattaaaatatttggtggaagttttggagggccaactttatatgagaatccattctatgtgtccccaaatcagattcgaactttggataaaaggaagaagactggaaagttcgcaaagaaagtcaaagcaaagacaaggaggaaaatgcatgagatgtctaatcctctggagcctgatgagtttgcagatatgtggaaagattgattctatatccaactgcccaagttcatgttcacttccatcaatctcaaacaattgcctgcattcattctcaagctcaatgctctcaccctcaacaagaagtagttactcattgtttggaggactttcatctttatggaattgttttttttgaattcaatataagatataagtattttgagtatgcattgaaattgacaacagatagaaataccttgattaccaagcttgttattgccaaattggaatttttatattgccaaccaatctgaagtttcttttatttgttccat

SEQ ID NO: 16747 - DNA, 1054 bp, Glycine max
  unsure (1)..(1054): unsure at all n locations
  Clone ID: PAT_MRT3847_115128C.1
ccacgcgtccgctcgcttctggctcccgctgtgtgctctgcttcacactactgtatctcatccactccctatcgctgcaatttgggataccaaagatacccgtagatcatcagagaaaaattcaattgaagaagaggttgaaacttaaactgctgaaacgcaaagattttctagcaaaaaatggggaagaagagaaagcacagtgagacaactcatgatgaggcacagccccaaaaggaagatgtcgctccagggagaccagctaggacccttttggggtggaaggataagaatgaagtcactgatgaagttgaggataattcacctatatttaggaacagagagaaggtattggtcacttgctctaggcgcattaattacaggtaccgacatttgatgttgaatgtggtgtcacttttgcctcattgcaagaaggaaaacaaggttgaatcaaaggaaactaaaggcgccaccctgaacgagcttgttgagctaaaaaattgttcctcttgtttattttttgagtgcaggaagcaaaaagatctttatctctggatagcaaaatgccccaatggcccatctgtaaaatttttagttagtgctgtgcacacaatggaggaattgaagctaactggaaatcacctacaaggttcgcgtcctattttgacattttcagcaaattttgaaaaagatgcacattggaaactactaaaggagatgttgttacagatatttgaaacaccaaaggaccacagaaaggccaagcctttccatgatcacgtttttgttttctcaatagttgatgaccatatatggttccggaattatcagatctctgctcatcataatgagtcggacaaattacctagaggtggccttgataaaatgacattgattgaggttggtccgcgattctgcttgaacccaattaaaatatttggtggcagttttggaggcccaactttatatgagaatccgctctatgtgtcaccaaatcagattcgagctttggagaaaagnaagaaagtctggaagtttgcaaagaaggtcaagc

SEQ ID NO: 16748 - DNA, 205 bp, Glycine max
  Clone ID: PAT_MRT3847_115129C.1
gaagggagggtgccactagtaccattttgattgcaagacacgccccgcccgcattgaaggcggcgaaagcacgctctgcgcgtacagagccgttcaggacattgctaacaccgtgctgactacaactcaccctatcatgctgggtcttgctctgaattcatccgtgtttgactatgacattcttatctctactgcgcgtgcatgc

SEQ ID NO: 16749 - DNA, 495 bp, Glycine max
  Clone ID: PAT_MRT3847_11512C.1
actcttgctaaactgtgggtaaaagcctaataaaacggacagtttgtgtcaccaatctcgcttttgagatgaatcgaaccaccatataaacctttgaatatgcagactcatgatcccacttatacggccgatacagaaccttcatccttgctcagatcttgtcgcccatataccaggtgactgctataatgccactttattcatccctattgatacactgatgcatctcaaaatagaatggtatagtgtaccatgtgaactctattcaggaccctggatcaagatcagtactaccaaccaagatgtatcccatagcccatattctacttggaaattgtccctacctgtggataatggatagccactaacatatatagactgcagcttaacgatactcatatagccagagagccatgataactttcttgctaagcataaaaagctcaatgccgtttatcgaactgcacgtatgtgtgaactacactgcaaaaattc

SEQ ID NO: 16750 - DNA, 390 bp, Glycine max
  Clone ID: PAT_MRT3847_115130C.1
tgggaactaaggagggtaaatgggtcagtgccattttttttaattgtaaattttgggtctttggtgtggcagattttgaagcaaaaataatggggaagaagagaaaacacagtgagactactcaaagtgtggcacagcccaaaaaggaagatgctgctccagagagaccagctaggacccttttggggtggaaggataagaatcaagttgaggataataataatgctgattcaccaatatttaggaacaaagagaagctattggtcacttgctctaggcgcatcaattacaggtaccggcatttgatgttgaatttggtgacacttttgccccattgcaagaaggataacaaagttgaatcaaaggaaactaaaggagccaccctcaacg

SEQ ID NO: 16751 - DNA, 4339 bp, Glycine max
  Clone ID: PAT_MRT3847_115131C.1
tgttgttacagatatttgaaacaccaaaggaccacagaaaggccaagcctttccatgatcacgtttttgttttctcaatagttgatggccatatatggttccggaattatcagatctctgctcatcataatgagtcggacaaattacctagaggtggccttgataaaatgacattgattgaggttggtccgcgattctgctccttaaaatgcttgatttccatcaggaaaacttgtacatatagttagttggtttctttccagccatgatgggcttagttgcactaagtgtatcattgcaatactaatctaatttcaatggtcattgatttttttcttttatttttaagtttcaattactgagaaataaattggacatcagttaactactcaaaaggggtaaaggtcaagaactaaagtgataatacgaaagcgtttactttgaaattttttgttcctcaagcttaaagagtcatttgagataaaacgacatcctctcacttcttgattcagaggaagaggactcaacacaagacctctcccctctcatgacaaccctccaacaagaaatcacttgtgcctccaaaaataccctagatgcccttttggtgtgcccaactcaagaaaatgaccaaaacaccctcacaatcactagtttagaggacaataatgcaacaacctcacaagttttgaaggaagatgaagagagtgacaaggagagggtcatgaaacatctccttcaagcctctgatgatgaacttgggattccaaatagtggggatgggttatggggttttgaagataatgaatttactagtggggatggattttcttctttgtgtgacaagttgtgggagcttgaagatgaaagagctaactactatgctttcttgcaatctgaactcttcctaggggggtattaggatagtggaaattattattacctgggtgaaattctggatgagaaaaaaaaaaaagaaaggtgataacatagtatgtaggctcaaagagggagtaatagtttgtttgattttaagttgttcagagtcataagggtggtttcaaaatacttttcaaacctttttgtggtggcctctggaaagtcttggtccttagccagcttaactcttaggagaggggaaaaacccttagccgccagcattcgttgaactcattcttcttcaactcaacagagcaagggttcgcactcgcagattcttgagcaagaataatggggaagaaaagaaaacacagtgagactactcaagctgtagcacaacccaaaaaggaagaggctgctccagagagaccggctaggacccttttggggtggaaggataagaatcaagttgaggatgattcaccaatatttaggaacaaagagaagctattggtcacttgctctaggcgcatcaattacaggtaccggcatttgatgttgaatttggtcacacttttgcctcattgtaagaaggataacaaagttgaatcaaaggaaactaaaggagccaccctcaacgagcttgttgagctaaaaaattgttcctcttgtttattttttgagtgcaggaagcataaagatctttatctctggatggcaaaatgccccaatggcccatctgtaaagtttctagttagtgcagttcacacaatggaggaattgaagctaacgggaaatcacctacaagtgtcgcgttcaattttgacattttcagcaaattttgaaaaagattgacattctaaactattaaagaaaaagtttcattttcagaaatataaaaaacagtgtcttaaaagggagaaaaactgtgaacgtgccaaaagaaggaatagttttgctatgatcactttattgtttcgtcaatgttggatgaccatttgtgcttcaggaataatcatacctctgaataaaataatgagtataacaagatacctaatggtggccttaataaaaggaccttgattgagcttggtccgcgattctgcttgaacccaattaaaatatttggtggcagttttggaggcccaactttatatgagaatccgctctatgtctgataaaggcaggacattgttgcttggtgtggatgacatggatattttcaagggaataagtttgaagttgttggccatggagcagcttctcattcagcatcctgagtatcgggaaaaggtggtgctggtccagatagctaatcctgcgagggggcgagggaaagatgtgaaagaagtgcaagccgagacgaaggccacggtgaaacgaattaatgaaacatttgggaaacccgggtatgatcccgtcattctgatcgaggagcctctcaagttttatgagagagttgcttactatgttgtcgcggagtgttgtttagtcactgcagtaagggatggaatgaatctcataccgtatgaatatatcatcagtcgtcaaggaaatgaaaccttggataaagttttgggtctagcttcctcccctaagaagaaaagcatgttagttgtgtctgaattcattggctgttccccatctttaagtggagcaatcagagtgaacccctggaatattgatgcagtagctgatgcaatggactcggcgctggaaatggctgatttggagaaggagcttaggcatgaaaagcattatagatatgttagtactcatgatgtcgggtactgggctcgaagcttcttgcaagatttggaaaggacctgtagtgatcatgtgcgacgaaggtggtgggggattggttttggattaagctttagagttgttgcgcttgatccaaacttcaagaagctctcaatggagcacataatttcagcttacaagcggacggcaactagggcaatccttcttgactacgatggtacactaatgcctcaatcatccaccattgataagagtccaagcagtaaatccattgaaattcttagtagtttgtgtagagataagaacaacatggttttccttgttagtgctagaagccgaaagatgctttctgaatggttttgtccttgtgagaatctgggagttgcagctgagcatggttactttctaagaatgaagcgagatgaagagtgggaaacacatgttgcggcaacagacactagttggaaacaaattgcagaacctgtaatgaaactttatactgaaacaaccgatggatccaccattgaagacaaagagactgcacttgtttggtgctatgaggatgcagatccagactttggatcatgccaagctaaggaacttctcgatcatcttgaaagtgtgcttgcaaatgaaccagtaacggtcaagagtggccagagcaatgtagaggttaaaccacagggtgttagcaagggactagtggccacacgcctactttctgccatggaagaaaaggggatgtgccctgattttgttttgtgtataggcgatgacaggtctgatgaagacatgtttgaggtaatcaccagttcgatggggagtccgatcgcggcaaaggccgaggtattcgcgtgcacggtttgtcgaaaacccagtaaggctaagtactacctggatgatacaactgaaatagtgagattgcttcagggcttagcctgtgtttcagaacaaatagacaaatagtttcattttcttcggaacaaaaaatagtttgttaagcttgggaacaaaggtggtggtggtgatgagaggtattataaatacattgtgcttgctttactttgtcattgaggatgtaggctcagttgtgctgctcttaaaatcttaatacacaattaaaattattggtttccttgatattccatgtatattatccctagtttttactgagaaaagttctgtatcggattctgctccttaaaatgcttgatttccatcaggaaaacaccaaatcagattcgagctttggagaaaaagaagaagtctggaaagtttgcaaagaaggtcaaagcaaagacaaggaggaaaatgcccgagatgtccaatcctctggagcctgatgagtttgcagatatgtggaaagattgattttaaatacaaccgcagctaccacataaaagaaaaacccatatttctcctatattatcctcgcattatattccatagcattaaagggagacttttgtgattctataaatgttattttctgtaatttcatgtggggtctggttattctctcttatcagacattgaacctagtggaaattaaattttgacagaggcttcagttttggatcatgggtttgtttgattgatgtgctactagtatattaaccagggattatttcgactttaattagtcaaatctcgtttataaagatgctttcacctaagatgtgatttttgttat

SEQ ID NO: 16752 - DNA, 480 bp, Glycine max
  unsure (1)..(480): unsure at all n locations
  Clone ID: PAT_MRT3847_115132C.1
taaaactgtatcatttattaataacttttatcctatatatgacctccatttgtgtagttcagatacatggtttgccacatggtatccagagcctcaagagattcaaaagtggtgcctgtccactggactcactgtcttctgtcttttggtcaaaattcttctttatttttttaagctttcaccattctggctggtgaacccattggatgacacatgtctccactctccatcagatacaccaataaaacacatggttcatcatatgcctctctgtttattctcaccttgtttgaaaggaactatgaatactgaattctatacttggtttttagtgccacttangtttgattgggattttgaatcatatttttcaagatatatcagatgagcaaagtgtgttatgataactattggcagtatanttacgtactattttgcatattaaaatgatgtaagtaatggtattctgaatctgcatac

SEQ ID NO: 16753 - DNA, 435 bp, Glycine max
  Clone ID: PAT_MRT3847_115133C.1
aaaaaaaaaagggggttttttttaaaccctccttaaattggggggcgggggaaaaaaaccaccatgattttgttgcttcaccccgccaaggggaaaaatccctgggattagccaaatggggggccattcacttggggggggccccttacataagaaccaattatgggggggcattcaaaaacaatttttttaattccccgctagaagtttccccccccccaaaaaaagatatgccaaaaaacgggacccaaaaaccatgggtgtaaaagcaacaccccttgggaaccccctggcaattttgaccccaaaaaggggggggggaaggggttcatattgacccttgggcaaaagtttatccctttgggggttgaaagatatttacccaacccctgaaataaaaagggggacttttttcacaaaaaacccccccccccg

SEQ ID NO: 16754 - DNA, 1210 bp, Glycine max
  Clone ID: PAT_MRT3847_115134C.1
caatagtccgctcagcttccaagataatctgagaacaaacctgaataagcaactgactgcatgaataggttatgcgtcccatttggtgtggcagaaggtttggctttccttcatcatgtggcaattattcatcttgatatctcttctggcaatgttctcttggatgcaaattccaagccgttggttgcggagattgagatttcaaaacttcttgatccaaccaaaggcactgcaagtattagtgcagttgctggttcctttggttacataccaccagaatatgcatatactatgcaagtcacagcaccaggaaatgtttatagctatggtgttgttctgctggaaatccttacaactagactaccagttgatgaggattttggtgaaggtgtagatttggtgaaatgggttcatagtgctccagtaagaggggatactcccgagcagatattggatgctaagcttagcacagtttcctttggttggaggaaagaaatgcttgctgctttgaaggtcgcgatgctgtgcactgacaacacaccagccaaacgaccaaaaatgaagaatgtagtggaaatgcttcgagagataacagaaaattgagaacaacaagccactcaaagattctattctgtgctgtaatctacaccgttgaagatttgatgtatgcaaatctctcatggatacagaggaaatgatgaattacaacttacaacaactttaaatagtagacttgtatcaggaattatttcatgtggtgaagctggtgtgtcatagtaaaatcaggcattgatagaacttcacctttgtagtttgtccaaagggttagttgtgaaatggcagcttatctatttgagttggacactatgttaggtttggggaggataaatgcaagaagaaaccttgaaatgggatatatcagttcctgttgcatataagctagtccacagttttcatattgtatttactcatttgggagatgtatgcacctatcaatcagtctcttcccattgaaactaaaagttctatttatttttgttgagatagcagactgtatatctggattgtgcacatgtataccgtaccttctactggatgttttactgttttaacatacatcccctgcaccaatcaatcagtctgttcccattgaaactgaaagttcaaatttatttttgttgaaatagcagacagtatgtttgaattgtgc

SEQ ID NO: 16755 - DNA, 346 bp, Glycine max
  Clone ID: PAT_MRT3847_115135C.1
gagagagtgcatctcgatccacattggtcaagctggtatccaagtcggaaatgctggctgggagctctactgccttaagcccaggatcgggccccgtgggcaaatgcccagtggccaaccctttggcgggggggatgaagcttttaaatccttctttaaacgggcctggggctgggaaacccgtgcccctgccgggtttgtaatcctttgccccctgtttttgtgggggggggaaccggaccttcccccgctttttccaccccagaactttttttgggccaaaataattcggccaccacttttgccgcgggcctttttcacttggggaaaaattgttggtctttgc

SEQ ID NO: 16756 - DNA, 181 bp, Glycine max
  Clone ID: PAT_MRT3847_115136C.1
ggaattcggcacgaggtgaaaactaagtcccttctttacttattacacctacaattttcatttcacacaccaacgtgccatcatggattcaggtttctacttggtgtcatcactgaaccaccaagaagtagtccaaagccgtttcttcgatccctcttggctacaaatgcaaccccacgtt

SEQ ID NO: 16757 - DNA, 460 bp, Glycine max
  Clone ID: PAT_MRT3847_115137C.1
cccacgcgtccggctttcttagttcttactagtccaagtgaagaatgttgagagaggaaatgtcaaagttgaacaaagacagtcatggaggctgacacctgacagtgcgatgaaaaatagcatgagggattgacgtgccttcttcccgaatggttctctgactaaggagcagaagaaggttttgtgaattgtttgtaagcttagtgtgtttgctgccaagccaattggtccaaattatctgttttcatcatatatgtgtgtgtacctggcattttgctgaccattatgcgggcacattcgacacgtctcaagtttttgtgagctcctctactgaccagtatcaattctcatcctgatatagcatacttggatagtgaaacatacaatacaatagatacaatcaccctttaaacctatttatgaatattaattcaaatgaaaattctaaccctgctatatt

SEQ ID NO: 16758 - DNA, 329 bp, Glycine max
  unsure (1)..(329): unsure at all n locations
  Clone ID: PAT_MRT3847_115138C.1
ncagnngnanntcnnaatncngctcnatnantaataataatattatatatanaggtataagcctaacaaagtagtcataataaatttaatcattcttttatttatcctattattataaacaacataaaacactttattgctcttgctacggtttatagataccttgtcactcatccttctaatttaccatcttaaacttcataaatataacaaataccttatacctcgtgtagaaacaaaaaataagccaacaaaatgataaaatacagtcaaagacaaacatgacaaagccttaaaatgctttcacttagaatttttattaaagaaag

SEQ ID NO: 16759 - DNA, 490 bp, Glycine max
  Clone ID: PAT_MRT3847_115139C.1
ggctcgagggccatgcaaatgttaccgaccaccgcagctatcttaaccttaacactggactacattgactataataatgaccatgacattagagtgctaatattcattgatgcatcgattgcagatactgatcttaacgacatcctcacgattaagagcacgacacaagatactgaactcgcactaactgggttcacagacatggatgcaaatcggaagcagctggacgtggaagaactgagccaaccgtaacggctacgtacgagaaggcaagtctatgatctatgatctggacaaagcgtcggctctaccataaaatgcctctggcgtcacgaaactgtccagtttacgaaaatggatatggtccctagcgctaatgtccactcctgtgaccataccatagaatacgtgaatgctaatgcgaatgggaccgataattatgacagggagttggaggatgtaatagataagcttattggggagtgtgata

SEQ ID NO: 16760 - DNA, 441 bp, Glycine max
  Clone ID: PAT_MRT3847_11513C.1
tccaggaaggtttcccgtcatcactgtatgacgtcctccttctttgggggggggggggggacaagagacaaccacgacggctgtgccagatcgcgaaacaagagagtctgacagcgtgagcgccaagcgataggaatagtgcggtagatgcaaaaggtgcctataggaggagcagctcctgacccgtattcgttacgacgtggcatgtgtatgagaattaagaacccgcttctgacaacaatggcacgcgacaccagtacgacaccacagaatgagactagtgcttatgatcgtattaattataatagattgttaaaggcagcgtagtgccgtgttacatattacgttaacggcgtttaagacaaaggcgagcaataccgattgccaaacagaacgttgcgatgcaatagagctattacaataaaggtaaacgaggcagta

SEQ ID NO: 16761 - DNA, 154 bp, Glycine max
  Clone ID: PAT_MRT3847_115140C.1
attgagtgttgctactctcgtcgctagttgtacacttgttcctattagtgttcagaaaggatcatggatgctgtgtgtccttgcgctgttggcatacgtcacatctcagtagaacatgccacattgcactccttacagaaatccatattcttga

SEQ ID NO: 16762 - DNA, 373 bp, Glycine max
  Clone ID: PAT_MRT3847_115141C.1
ggcccaacggccgaaacttcaacatcattcagaatcagctggaccacgtcgtctcctacgacctcgaatggaccaacggcacctccttcgtctacaccctcgacccttccgacccgacatgcaaagttgtggactttggagtgggtattctccgacccaattggctcgacggtgcaacctatttgggtcagcaacacgttgataacttcctctgcaacgtttgggcgaaggttgatttcattgtctactacgaggaggtcctcactcgtaggcctgttaggtgggacttctcctcaggtactacacacacctctattcttaaattgctaattttgcaagagatatttacaagtaatggtccattaagctcaac

SEQ ID NO: 16763 - DNA, 404 bp, Glycine max
  Clone ID: PAT_MRT3847_115142C.1
aaaaaaaaaaaaaattactgttaacaaatttttattaaacacaaacgggagatccaatttacgacccatcattcaggtttgggcttttactaaaagaaacatgatagaaggggcgtttttaagctaaggcaacactaaactttttttgaaactggaaataaaaggaatagaaatttcaggcccagctgggacttgaaagcataatacctacctaccttgagccaaaatcaggacgggcatctccataaaaaactaaacccttttggccggatgcaaagctggatctaaacctgctacgaggaacaaaagtccttttatcatatcgtttgggggggggggcatcaggggatctggagggaaaaaagcctttgctcctaaatttcaacctcaacctcgacctcccc

SEQ ID NO: 16764 - DNA, 522 bp, Glycine max
  Clone ID: PAT_MRT3847_115143C.1
ggctcgagacggaaaggcccatggtattggacaaccaggtagcgataactgactctgacatgatagtgcgtgttggttacatgatcgaacgcccgtacctgcactgtgcgaaccgggcattctagcatcggacgcgctacacactggactgatgacctggatcgctcggtcacgtatgactgcagcgagtagactgggtccgatctgtatggatgggagctcctgtgctcagcagcgctgccctgaaatggcgagctggcgagacaatgttctacgctgcgtgaggtgttgctgcgtctggcggaggaagcacagcgtaaagctcggcacaatgatcgaggagagtgctgataagcgaagtgctggttcgatacaaagactgctaggaatcgctgaggaaggacctctaggccgaagcagtgtaagctcttaggctagtggaactaactcggttctcacagcgcgcgaggtgcacgatgatgtgcattgcatcatctacagtggacatgtctcatcgagcat

SEQ ID NO: 16765 - DNA, 420 bp, Glycine max
  Clone ID: PAT_MRT3847_115144C.1
atgggcggcagcaatggtaacttgggtgacccaaacaaaccgaaatgactgtttctgtttccgagtctgcgtttgtgtttgtttcagagagagagagagagagagagagagagtgttgatttgttttttttttttcttttttaaattaataaattaattcagaaagggttccttcccttccttttccactcttgtcttatgattcttcttcattcttccatttgccctagattagatctttctcttccaatctttaattatattagatttgattttccttaatcctttcgcctgctttttcattccgggtgggtgctctctctctttcccttttgcttgatttcaaattaatatcgtcgcttatttgatgaagaaactattcacacacaacacaaggggaattattctccccttattttt

SEQ ID NO: 16766 - DNA, 366 bp, Glycine max
  Clone ID: PAT_MRT3847_115145C.1
ggccttctcacttacgcacgggaaatagagaaagggagataaccagataactatttgattcattaatggataatgggaggacgggaagagatgtatcgacttacgatctcacgattgcttatgcgtttatgcttacgacctcaagcatgatggagctatctaactggatcaatgttccgatatcagcaaaacataaagagttagctagatatgatcatgtcagcctctacgttactacattctggatggcataatagatatatataactagttgacatgtggtctgtgctttgcagatgatctatggatctatcaaaagagatagaaaactggcagcacatttctacattagtagaagagcaattg

SEQ ID NO: 16767 - DNA, 204 bp, Glycine max
  Clone ID: PAT_MRT3847_115146C.1
ggccgcccttttttttttttttttttttaaagggatagttaactctaccttagtgaaaagattgcggatcgacagattgcaaccaccacatatctctatccatgaagttcaaagcacactcgtatagggttcaacttaaaacccaatccatgaccagagagcacccaccgctttccaccaaaaaaggggggaaacggatgaaca

SEQ ID NO: 16768 - DNA, 725 bp, Glycine max
  unsure (1)..(725): unsure at all n locations
  Clone ID: PAT_MRT3847_115147C.1
tgcttacgcgtggggccttttagctctatcattcatcgccatcttcttattcttctgcttctcacacagatcttcagctcagctttgagtttctcacccaacacctgtatttttctcctcctccattaattctgttcataaaaatctgattttttttattatctggggtttaaatattttacttgatctgctggaacttagagggggtgattttgtaaaatcctgattatctgaggagaaaatattagtgggatttggttggatcgagggaaaggctcgaactttgcagattgcaaaacgagggtctttgggggagaaaatgtggatcttgcaaaaggtgttgatttgatcgagaaagaaaataaaagagaaacattttttgcagcttcaagtgattcaactttttcctctgccattggagaaggttagaagaaggttttaaaagataccattagctttggtagccagtcatcaaagccaaatatgaaggtgtcttgtgacagtgcatagggtgataaagttcagggtggatctgattggactgggntgtcattnntcaaatattttgagtgaaggcacaccattgaaagtgtaangaagtcttcattctttcaagtttgatttcagcctaccaaaatgggtatttcagtgctccagactcatccccgtgctgngtggatccacaagntaaggcctctgttattgaaactcaatgctgaattgag

SEQ ID NO: 16769 - DNA, 821 bp, Glycine max
  Clone ID: PAT_MRT3847_115148C.1
cttgcatgcctgcagtgtcttaccaagaaaatgttataaatttatgataattttaagaatggatatagtgcttttaactactaggcctagatgcaaattataaattttcgactgattaatttttatgtatgacccaaaaacatgacacaatctgcgtgtccaagtcccaccaaaccccttcatatgtacttggttttttatggtgtttgtttttggcttgaatcatgcgacctgcctattttgttttcgtttgtattgcactacttatccaacccctgcacaaaattgagatatataatatacaaataaataaataattcacaagtatagttatttattggtttatcatcattcgatagtttagttagcgattttgtcacattcttgggagagaacattacagaatcaaggaaaagtgcttttggtactatgtggagcaagtaagttcttaacaacttcattacaaaccttatgagaatcagacttcacagaaacatagagcatcttcactaaccaaccctgttaattaaatggctcaaccattatgcatcctctatatatacacctgtaacaatttcaacattacatactacaaaagaactgcaatagcccgttgtgatggactcagggaaagagggtgaggcaccagcagccaccagcagcccagaatcgaggaggaccaggagcaatggaaaagtgaaagcttttgctgatgctgcgccaccttctgcaactgtagtttccacaaaagctaccccactcccaagaggtggatgggaaaaagggtgttgcaatccttgatttcatcatttaggctcgag

SEQ ID NO: 16770 - DNA, 170 bp, Glycine max
  Clone ID: PAT_MRT3847_115149C.1
gagtgagaacaatactgttccaaaacttaatttgaggtagggcctaccctaaaatgccataacatggacctatcagtagcatttacaatagaatctattaaaaaatttttgtccaaaaaaaaaaaaggaataaaaaaaaaaaaacgggccgcccaaaaggttccaagctt

SEQ ID NO: 16771 - DNA, 285 bp, Glycine max
  Clone ID: PAT_MRT3847_11514C.1
gacagtattatatattaggtgggagtgacaggtttccctaccccgtcatcttcttctgattagggttcttctcgttccctcaaattctgagaatttgaccaccaattattactgcgttttaaaatctgacatttgtccgtatccaacgattcagcagaagatcgaaattcttcggcgttttccgttcgggtacggttctacgtggacaattacctatggcttcatcctacataatcactccccaaaatgtgttggagtcgctgattaacgacggcccaattgatg

SEQ ID NO: 16772 - DNA, 235 bp, Glycine max
  Clone ID: PAT_MRT3847_115150C.1
tccaagtgatgcaactgatgctgcaaaagagactacagattatgctgctcagaagaccaaggattatgcaagtgatgcacctgatgccgcaaaaagtactaaggattgtgccgcgcactcgaccaacggctatgccagtagtggtgcgcagagcaccaaggactgtgccactggtgctgcgcatataccaaggactatgcaagtaatgctccgcacgaggcaaggaccatgcaag

SEQ ID NO: 16773 - DNA, 542 bp, Glycine max
  Clone ID: PAT_MRT3847_115151C.1
tgattacaatgtaaggggttcgattctcctctaggccagctattccctgtgctatgaagctgcttgcttattttttatactaaaaataacgagcattgttacttgtcacaaaaactaaaaacagttaccggaggttgactacaaaataggaatcgcttggatacatagataatcacagaaaaaagtgattttgaaagtaactgctcacacttgcatattctaccattttaccatatcaccagccaactacctcagtttcccaaaacttcactaaactctttataaaatttagcattttccaaaaggaattaaaaacctatactaacctaacatattttctaaaattcaaaacctataaacagaaatgaatgagatgggagctgtttcagcaagcaaaagtcacaatttagggcacgcaaaacggttaaaaatccaggttcatgtgaaccaggtcacacaacccaacaaaaaaatctccaatttcaggattgcagaacttgcacgatctcatgatttcactaataagatctcatcaatttgca

SEQ ID NO: 16774 - DNA, 433 bp, Glycine max
  Clone ID: PAT_MRT3847_115152C.1
ataaggcattacaaaaacagttgcttttaaattgtgagctggtatgcagtaattgctggtgggatatacgtgcctgttatattgaagtatcagcgtcatacccactgataccgtaatgctaacgatatgcctagatatgcattcaaggagtatcctccaatttgttacttatcttaaaattttattaactgatacatttggaatacaactgccttccaaaaaaaaaaaaaagacatttggaatacaactcccatgctttgaaaatgactaaaattacatatggctctgatacgggttggggaaagtatgtaactttatgacatgttcattggtagaagagtatagtctgataatgggcatgagaaagggatgtaactatagtcttttgttatgattacaagttttttttttttcaattgtgatcaccattcac

SEQ ID NO: 16775 - DNA, 1147 bp, Glycine max
  Clone ID: PAT_MRT3847_115153C.1
tacggctgcgagaagacgacagccgggtacggctgcgagaagacgacagaaggggagattagggtttctgcagccgccacactccctttctgaacgagatctcagatctctggttgatgcttcaaagaaccctaatctcatggctattgtttcctgcacttccatcattgcttccaaatgaatgaatgaatgaatgaatatactactctgtctctctctatctctctctctctctcgctcactcactcactcgctatgccatgcttcttgctatgatatgtttctttctttttctttttatgcgacctctggggtccttcactcgctctcttatctgtctctcactttcctaaccctaagaggctgtgaagacggtttcggagtgtggacccgatggatccgtcgccgtcaaacatcctcgccggtggcgcggcaacgttatcggttttttgatttcgttgcagtcaaccatggcggtgggtggttttaacgaccgatctcattgctgtgccagatctgagcctcaccaaatccctaactgaagatctctccttcgctgacgttatcttaacgcactgtttgacagacatgtatggagtgagagaagggaaatgatattttccgatcccatcgttactctcttccctctctcattccatacatcgtctgacgaacctagcgttgatttgttctgcatgtttagtttactgtttgtttcagcctagaaagctttattttcttcccgtgaaagtaatgaatgtctgttgttacttattttttctaatttctgatgtttgttgatgttgaaatattgtgtcatgcaagcagctcttatggcaggattagcttcattaaggactggtgcgtaaatgctctgaaattcggtagtaatgttctgcttttggtgatgaacttgagtcatgtgttaaggatagttatcgtgtgttaagcgagcaatacaactgggagaatgatttttgtactattacctatttgccattttataatctttatcagagtttatttttctgattttctgtataatggtcaacggtttggtttcgagtcttgaggcaagtaatgaaaacttactgcaatacaataataaaaccagagtttacattttttactttctgtatgatgttca

SEQ ID NO: 16776 - DNA, 693 bp, Glycine max
  Clone ID: PAT_MRT3847_115154C.1
aaccaaaaagaaattcttctactatttcatgttcccttcttgtgtgttttctaaaataaataagaagttgaataatggccttgcaacaattttttatagaatattctaaagcaactaaagcttttctgtcaacaattcaagtatcatacttcatatcgtaccaattctcctactgcaatttcatgtttcttgtgtgttttctgtgtcattcacagtcgcttttttatgtccaccccaagtccgtatcctatcttcggcaagggaggcctcttcgttccaattagttttgtaaatcagcaccaaaagaacacatgtttggaggatagtccctgatatcattcctaaccagattcccttgactccccagtcaagcttgtaacccaatacaagacccacaggaattccaaaaaggtagtagcatgcaatgtttacataggcaacaagagcctgccatcccgccccaatggcaactcctgagagaacaagagaacattattaatgacaatgcagaagcacaaaaatggtgtgaggtccttaactagatcttgcacttctgtgtcgtttgaaaacagggaagggtactcattccgcgagatcatcaaaacaatagcgagtaaaactccgatcaaaaccgaagtaatcacggcaaccactagggaaaataatgctgttcttgggtggcgtgcccgtagc

SEQ ID NO: 16777 - DNA, 792 bp, Glycine max
  unsure (1)..(792): unsure at all n locations
  Clone ID: PAT_MRT3847_115155C.1
tcttgcttcgtgctttatngnantcagnnnnnnnnatgaatccaatccctcaaagaattgttcatggnnnnnnaatcgagattctttgnaccatannncctagtgtcatactaatgttcattgctataccatcgtntgctttgttatactcaatggatgatattgtagtggatccagccattactatcaaagctattggacatcaatggtattggacttatgagtattcagactataacaactctgatgaacaatcacttgcttttgatagttatatgattccagaagatgatctagaattagggcaattacgtttactagaagtggacaatagagtggtagtgccagctaaaactcatctgcgtgttattataacatcagctgatgtacttcatagttgggcagtaccttccctgggtgtcaaatgtgatgctgtgcctggtcgtttgaatcagatctctacttttatacaaagagaaggggtttactatggtcaatgcagtgagatttgtggaactaaccatgcctttatgcctattgtcatagaagcagtttctactaaagattatggttcttgggtttccagtcaagtcaactaatccctgctggctgtgtggtggcagtagtggcaagtaaggtgaaataaaaataggtgtttcttacttttgaatatttggtttgtgttgttccataatcattcttgagatcaaactcaaacgacaatatttgtgtcttgagatcaaactcaaacaataatatttgtgttatctggcattgtgttttttaaaaaac

SEQ ID NO: 16778 - DNA, 1137 bp, Glycine max
  Clone ID: PAT_MRT3847_115156C.1
aactcgagccgattcggatcgagtaaatccaaagaaccccatctcggcatttcggattgcacaacaatacagtcacagaaacagagaaaaaacaaagaaaatggatgcagaaacggagtctccggcgccggaaacatcgccggcggtgatccacccggcagtggcaccaatctcctaccttctgggcacatggagaggccaaggagaaggaggcttccccactatcaattccttctcctatggcgaagagcttcacttctcacattcccccaacaagcccgtgatagggtacactcagaagacatggaaactcagctctggagagcctatgcatgctgagagtggatactggcgtcctaaacctgatggcactattgaagttgtgattgctcaaagcaatggtcttgtggaagttcagaaaggaacatacagcgctgaagagaaagtgatacagcttcagagtgaaatagtggggaacgcttctaaggttaaagagataagaagatgtttccagctggttgatgggaatctttgttatgacgttcagatggctaccaataaaataactcttcaaccacacttgaaagcgtcactgaagaagctctaaagcaaacatcttccccaattacttgcagaaggatgtacatcagtaatatggagccatccaatgtgactcttttttaacaacaatttaggtcaccttggtaattttctgttaattagcaaaatgatctcctttacaacaacctatatgcaaggttctgtctgacatgttcacaagtcttttatacaaggtcttcaagacctaatgtttgaagaacctgacatgacatagttttattggaaacaaccaagctggaaaaaaaaaaaaaaaaaaaaaaaaaaaaaaaaaaaaaaaaaaaaaaaaaaaaaaaataaaaaaaaaaaaaaaagggggaattaaatactggacagctacctgaaccccgaaataggttcccctccagtaagtggaattttaccccgtttaaataatgggagtcgctttatactgggggaaaatcttttccataaacagttccacaaagaaactggcccccaaccataaattcacaagccttgggtgcaaaatgattaagctaaaaaacctgaattgcc

SEQ ID NO: 16779 - DNA, 316 bp, Glycine max
  Clone ID: PAT_MRT3847_115157C.1
ggctcgagctctccctacctctaccttcggtatgcagctctacttaacgatcctgaccgttatgactatcactcttgatgcggaaagctctgacaccatcgacatccttcaggtcaagatacatgacacggatcgaatgccaccggaccatcatcgtctcacatttgctgtaatgcaacttgatgactgccgtacccttgctgactacaacattcagaaggagcgtactcttcagctcatgctacgtctccgcggcggcatgcaggatatcgctaatacactcaccggcacgaccatgaccctccaagtcgaaagc

SEQ ID NO: 16780 - DNA, 253 bp, Glycine max
  Clone ID: PAT_MRT3847_115158C.1
ttcagctcgactcactctttgctacatatgccagtacttttccagccatagcaagtcattgtgaaattcatgagctctccatcttttggcaatgagttgcatgagtgataatcttcacacttttaccactctgctcataaatgacttagctatcattgtgctctgattacacgtggcatcacgttagctgacatggattacgtgctggctattgaatcctgtattccgtagcagtgatggtcacttcagctaa

SEQ ID NO: 16781 - DNA, 512 bp, Glycine max
  Clone ID: PAT_MRT3847_115159C.1
ggtgttttttttttttttttttttttttttttttttttttttttttttttttttttaagaaaaacaaataccgggttaattcccttttttttttgaaggacttttttttttgaagggggccacccaatgggaattacaatcatgaacccctttttggggttttttttgcaaaaactttgcaaaaaccccaactaatggggcagtattatttgggccccccccaaaccgcaaaaaaatgttccttttgccccaaaaaatggttttcccataaggccctccaaccaaagccccaaccaaaacattaggattaggggcccggctaccataccaattataatacccttgagggccccctatgaacccttttttttttttgtataacacaatggatgcccctctatggggcccccttttaggggagttagggccacaccccaccaaaaacctcctgttcattgggttggcccccaaaatggaatccccctgtgacttaacaaaaataaaaatttttt

SEQ ID NO: 16782 - DNA, 581 bp, Glycine max
  Clone ID: PAT_MRT3847_11515C.1
agcccaactttattgtctttataaatttgacaatacttcaaatactagtattatttagggcaacaacatcacacaaagagaagaaaacttacaacaataataatactgataaagaaaaacttacaacaatattcattttaagaacaaaaacatgcatttataacttggcttaaaatgaaaaggtttttggtttaaggagaagtggtactttctttgagacaacaagtccaaatatctcgctcatatctacatcttgtgtatcagtttcaggcaacttccaatcaaaccagtaaagaagactagcaagcagatactcaacagaagcaattccaaaattcatcccaggacatcctcttctcccaaaaccaaatggaataaactgaaaatattcttgacctttaaaatcaactttactattttcgaatctttctggcaggaactcttcagggcgttcccaaaatttaggatctctttgcattgcccatgcattgatatataccattgtttttgcaggaatatcatatcctttcagttttacatcagacattgttactctaggagccaaaagaggagtaggaata

SEQ ID NO: 16783 - DNA, 495 bp, Glycine max
  Clone ID: PAT_MRT3847_115160C.1
aattcggctcgagtttcctccttggagtaattggtgagtgaggcagacttacagcgcagctttgtggatataaaggacttaaatacacttcgcccactcttgcttctgctcttagcaaccttataccggctttcaccttcatactagcaatcattttcagaatggaaaaggtagctttgagaagcccaagcactatggccaaaatcttgggttcgttagtatccatatcaggtgcactcatagttgttctttataaagggcccataatcttatcaacttcttctccacaaccttcaccaacaactgattctccaatggattctacatctcaaacaaactgggttcttggtggatctctacttgccattgagtttcttttggttccaatctggtacattgttcagaccaatattatgaaacaatacccagcagagtttattgtggtcttcttatacaacttgactgggactcttatatctacaccaatttggttgg

SEQ ID NO: 16784 - DNA, 387 bp, Glycine max
  Clone ID: PAT_MRT3847_115161C.1
cgcccttttttttttttttttttttttttttttttttttttaaaaaataagaatattattacacaaatagagtcaaaagaaacatcaagatcaggaatttggggtaaaggagcacatgacatgtaacgaatttggggtaaaggagcacatgacatgtaacatttttgttttgtaatttgggattattttttcaatatcaaagtaactgtataagctataaagcatgaattacattattgtctggttcacttttactgaacatttgaatgaaatcacaaaagtctaaaagattttcaaaaaaaaaaaaaaaaaaaaaaaaaaaaaaaaaaaaaaagagaaataagacaactagggagttaaataaattaccgaatcattacaaggggg

SEQ ID NO: 16785 - DNA, 1415 bp, Glycine max
  Clone ID: PAT_MRT3847_115162C.1
ctttggtgagttagatgatacagtgatttgggcatcggcgaatccaacccaactgcgagcaatcaattgttggtgtgagaaggagggcgaactaaagattcgattttggggtgaagagaagcgaagcgaagcaatgagacgaaaccattctaactcgggcaattaccggaatccatgtttaactatgcaccagccttgggcttctctcctcgtttacgggatcaagcgcgtcgagggcaggtcatggcccgctccaatcacagcaaagtcccagaggagtctacaatcaaagcaatggaatacttctacaaggagatttatgcactcaatggcatcactgatatccaatttcctcagcactaccctgtttctaggcttttgggatgtgttgaagttgttggctgcttaacacgtgatgagctagcatgctgggagatggttcctgaaggggtgcgggtggaagcacaaactgattattgctggctgtgcgaacgaccacagaaattgttgattccttttgagatgcgggggtaccaaggtgtttataacctggaaaagaagatttatgaagctgcagttagaggtctgtctccagttaatagtccgtggccggtgaaatttccacttccagatccacaaaacccattttcattgaagccaggttccatctctgcgcttacttctaacttaaaagcaactgaagtggataaatcatcaagtataagtctggccatagctggggcacaagcagcagccactcagttctcaaagaaggatcagaattcccatagtactgctcagaacaatgcacctactaacatgaatgctaataatgaggacacagaagttgcaacatcttataatctaagatcacaaggcaggtctatggaaaagggcaatatatcatccaccaagttaagtaagacatttgatgatctgacattgccatcatatcacgaagagaaaagcagtagaaataggagtgagggaagcagtaagcagaatcgatctcctggtgcagaagcagatttgagacagtttcctcaaccaccgtctaagatttttgctgctgcgttgaaaggcctgaggcactgatcgtgcaaggagtctgaccacttggagtctgaatgtgtatttgtagcataacgaagtgtaacttacgaagctgagataaagcttggaagtggtttgctctcatgaaattgttttgatgttttatagtctctaaactattataattttatgtcatttctcggtgtctgagtgattgagcttaggttcatgtatcattagtagtagaagattgtagtctgtagacaatggggtgatggattgcatccaagcattcagactcgtgctgcatgatgttacaaatgaatccgcgttagtatccatctagaacacatattgccatc

SEQ ID NO: 16786 - DNA, 417 bp, Glycine max
  Clone ID: PAT_MRT3847_115163C.1
ccctcactggcgtgggggctggattggaagtagccgtctaaacacaggactacatacagctctcactcatgcaggaactgagaaaggagaggaggaatgctgctttgctttgtcattatctcagcaatcccactatcaatttccttttaatgattcacttaccgaggcagtcgccatgatcgacgatatcacgctgaattctgcactgatcaatgcttatatcaaagctcatcaccacatacaacatctcactacacatacttctccagattctgttgcctcgcctggaggcaaggcaagacacaagggtctacagataccactgcacatcagactgctatgcgagccactgagcgtgcctgcactcacattcggactcatatcaatacacgagctactgcagcagctatagaggca

SEQ ID NO: 16787 - DNA, 590 bp, Glycine max
  Clone ID: PAT_MRT3847_115164C.1
ccacgcgtccgcatgacttaaactttgagttcgctttggtgagttagatgatacagtgatttgggcatcggcgaatccaacccaactgcgagcaatgatttgttggtgtgagaaggagggcgaactaaagattcgattttggggtgaagagaagcgaagcgaagcaatgagacgaaaccattctaactcgggcaattatcggaatccatgtttaaccatgcaccagccttgggcttctctcctcgtttacgggatcaagcgcgtcgagggcaggtcatggcccgctccaatcacaggtcgtctttggattcattctgccagtaaagtcccggaggagtctacaatcaaagcaatggaatacttctacaaggagatttatgcactcaatggcatcactgatatccaatttcctcagcactaccctgtttctaggcttttgggatgtgttgaagttgttggctgcttaacacgtgatgagctagcatgctgtgagatggttcctgaaagggtgcgggtggaagcacaaactgattattgctggctgtgcgaacgaccacagaaattgttgattccttttgagatgccggggg

SEQ ID NO: 16788 - DNA, 475 bp, Glycine max
  Clone ID: PAT_MRT3847_115165C.1
ctatatcctgcccaactaatactttctcctgcatagggttgctaactagacttgatctggtagcatttatgctcatatgtcttcatcgatgtacattccagaacggtgattttggcattctgataagatctagggttcagcatacctaccgcgttgttcgttcactttctgtcagcacttgaggcacttgcggcgactgcattggctctgctgagcagcaaggatactggacagtcatgtatgattgagggacatacagcaccgtgcatctatatacatcgcattatcggtagtacttgcaccactgattagcagggggaatacgacattaataaatactgttgtccaaatgatcttcctgaccatggtcatggctgttgccctaggtattgcccttgtagaaagaatgaaatgtggcctctttaagactcgcatgccttgatgcctgatttgccaatcatttcacagaatatgc

SEQ ID NO: 16789 - DNA, 1537 bp, Glycine max
  Clone ID: PAT_MRT3847_115166C.1
tggggggggtttttttttaaaagcaaaagtcaattgcatcactttacataatgaaacagatttttacagagtactatataatgaaatgttacatgtaaaagtgcccctatctactacacattggcaatcaatcaacttgatacggtatgtctcaaactttggatgatggggcacattcaggaaaacaacaatatggcagatcttccattgtgaaaattactccagcaaaaaaaattcaaattactggggcaaaatctgctgcatatcagccagccggagcacccacagattcagcaagttcttccagaagttccttttgctccattgtaacacaagacgtgatcagcatcttctatatcaccatcaagaaaagaggtgagctcatagtttatcttcaatctgtggtcagtaaccctgttgtccttataattgtatgttcgaattttttctgaacgtgcacctgtaccgacctgtaatttcctttgatttcgtaatgactcctgttgctcccttaccttaatctcatatagttttgctcggagcaactgaaaagcgcgattcctgttcttaagttgtgtcctttcttcagtacaaaagatacggattcccgttggtttatggaagagatcaatggctgtttcaaccttgttaacattctggcctccagcacccccagaacgtgccgttgtcagttcaatatcttttgggtcaattacgacttcaacttcatcagcctctggcatgatggccactgttgcagtagaagtatgtacccggccctgtgtttctgttaggggaacccgttgaactcggtggacaccagattcatatttcaatttactgtaaacacgatttccctttatttccatcacataagttttgtatcctcctttttctgccgcagagcttgagacaagagaatacttccaagaattcctttcactatatctttcatacattcgaacaagatcaccagcccatattccggcctcgtcaccaccagtgcctgctcgtacttcaagcaatatgtttctagcatccataggatcactgggaagcagtaacaccttaattttttcctcaagctccgcgagttgcttggacaaagtgtcaatttcaaaagatatcatttccaccatatcctcatcgttgccatcatccttcgctaaagctttggtttcttctagaaccttctcacagtctttaaatctcctatacgtggacacaacctcatcaagctctgaaactgattgtgctaacttctggtactcctttggatcagaaactacgtctggatcagcaagcttgaccgataactctttccacgttttctcggcggactcaagcttcgttatcagataaggttccgccatgcaaacgattcttggaggagtgagtttggtggcgacgcgtctggtagtgaaaggatgaagggaacggtgtcgtatagggagtagtaggtcgcggcgcgtggcgcatattcgagctgtgaaactcgccgttaagctgttcatcgccacagagtaaccggatagag

SEQ ID NO: 16790 - DNA, 577 bp, Glycine max
  Clone ID: PAT_MRT3847_115167C.1
caagaaagcagcatcaaatacacttcaattctcattactaagatcgatttgaatatcctccaggatccatatcatttatctaggaatagttctagtcatagaggaaaatcttcagctgtcaaatagcatcttttttcataagaaaagacatcaactaaagaacttaatcagggattgtgttgaataaacaacaagctcgcactgctttcaaccagtttcaactctgaaagaaacactgtcagtagcagaaattcaagtcacctgaataggtaaaatgcagcaatgaccaggcaccacaggctgccactttggcaacataagatatgtgaaatttgcgattgaaacaacaagatgcataggccgatttggattttctaaacaaaataggcagcgctcttgctgagtcaagaatcgatttgtcttcttttggatactcttgtgatcatcacctccttgcttctttctactctttctgcttggaccatcctcaaagtcatattcatcatcagcctgagtagaagccctaaactgcttgttctgcatgatcttgtgagcaagatgcattatcaccatcatc

SEQ ID NO: 16791 - DNA, 336 bp, Glycine max
  Clone ID: PAT_MRT3847_115168C.1
acgactatttccaactcattcttcatgtcttaactcaaactattaatgtccctagtctattatcttatcatagacatgcttaacaaatataatcaggaaaattaacaacatcgatcacaataatgattactttaccatcaactggattaataatgtcatgactttcactgctttgtactttcaatcctctgtatactatatccctacctagaataaattctcattctaaagtattcattgcaacttcttcacctctaactacatctaccataaacttgccccaaaccctctttgaacgtttcacttagaaaaccatcaaagtcattattctatccc

SEQ ID NO: 16792 - DNA, 870 bp, Glycine max
  Clone ID: PAT_MRT3847_115169C.1
gcaatacactcgggtccgaattaatcaagagaggatgcatatgaatatgatgaagaaggtgtgtggtgggtttgcattaatagtgctggtggcactagtattgcttgtgattccccccaaggcagaggctgtgacttgtagcccagtggaattgagtccttgtttgggggcaatcacttcctcatctccaccatcaactacttgttgccagaaggttagggaacaaaggccatgcctctgtggttacctccaaaatccaagtctgaggcagtatgtcaattctcctggttccagaagggtcgctagctcttgtggggttcccttcccaacttgttaattactcactttttatttcgtattctatgtttataataaggaaaaattattcctttgattcttataattacataaactttattatttagtctttacacttcaaaaatattcattttagtctctttgcaagtatttttggattccttttaatcttgctgtgttacaaaatgcagggcttaaaagataaagtttttgtgatgacaggaaccaaaaagaatccaaaagtgtttgtacaagaacttacattttttaagtgtaaaaaactaaaaagtaaagtttatataattataaaaattaaatgagtatttttttcttataattaataatatgataatatagtatgtaagaaacccctacccattggcaggaaattatatatatatatatatatatatatatataagaatgatatcagtcagtaccaccggtcgaataagaaagtgatcgatgctgttcaagagtgatcatatgttagcttgaacaaattaatatgattattatcaatgagatatatgttgaagaaatttgctgtgt

SEQ ID NO: 16793 - DNA, 420 bp, Glycine max
  Clone ID: PAT_MRT3847_11516C.1
gacagacaggacagttggatcttcttatattggatgcgttggaaaagactggatcatccaacgttcacttttgtcttccacagactattgaaactgtaaagtggttatgtccaaagcaaaccctattgatcggaatgaatcacaagtttgatcaccacaaggacaacgagtttttaatggaatggtccagaagggaaggactatcaatgcagcttgctcacgatggtttaagagttcccataaacttatagttgtggacatggatctccctttttcacatcaagagtatagcacacgtggtaccagaactatcaagtcttcactatgattagtagcatgcatgcatgtgtcccaggtctcacccttcttggagggcgcgcttcctagattatcaagatcctgagtacttttgccttttgt

SEQ ID NO: 16794 - DNA, 326 bp, Glycine max
  Clone ID: PAT_MRT3847_115170C.1
ggtggaacataaattgatcgatgaattttaacttacgcataatgaacgaacattgctattaaacgcaccctggtgcaggctaattaacgagaaaccattgagtctacccaggccacgagatacatatttatatccaagttaatccgatcaccttagtagagtttttcatagctaccagtcaaaggcaagcacgaggaggtcaacacctataatccccgaacgtgacgagaaaccctactccactccctaaatttgtatccatcaaaacctggtagggtcctgccctgccttttgagagggtaaacaacgtccatagccaagacggt

SEQ ID NO: 16795 - DNA, 448 bp, Glycine max
  Clone ID: PAT_MRT3847_115171C.1
gctttttcatatccccatagcaagatccattggttcttcaagttcggaatttgatgttgcaagtaatgaatcttcaaggtgatgacacacacactaagctctgaaaaaatctcaaatttctaagtgttattttcaaaatgagtgtcattgtaagagagttttgaaacttagtttatatagatcggaaattgagctaactgatttttcataaaggataatcgattattttgtgcttcatatcacatgggtactaagaagatcaatatagtcaattatttcacctgataatagattaattgcgaaaggtctggttttgttcagggtcaaataatcgattatcttaagtatagtccattatttgcgtcccttcacaaattttaaaagaacaaagccatggataatcaattattttgttcatgtttcaaaacataagatttttcaaaatgat

SEQ ID NO: 16796 - DNA, 284 bp, Glycine max
  Clone ID: PAT_MRT3847_115172C.1
ggagcaagagcacaagcagaggaaagacgaaggaatgaagtgctcaaagcaaaagagaaggcaaatataattagaacaacaggcaaaattccagggccatgctcttgcttctaacaacaacaaatatatttgtacatattacataactgagtttgggtataacaaaaaggaatatgtaattatttgttttataattctaaggtttctaactgtacaactctcagtactcatttgtagcgggataattttccattttatatgaaaaaaaggaaaggaggggaaaa

SEQ ID NO: 16797 - DNA, 267 bp, Glycine max
  unsure (1)..(267): unsure at all n locations
  Clone ID: PAT_MRT3847_115173C.1
gngcgcgctttcaagcgaanccacgggcgccatcagaggatgccgctacaactcttccgcctctgcctctgccttcgaccagcccgacacaacatgccttgacgctcagaacgctggacaggctcgtgacgtccatctcgaaaacgtcgaaccagactgtctcgcctctggcaatgcgcaccctaccgtcaccttggctttctagcttcatcgcccaacctcgcatcggatgcnccagagcaggatcaggcgacaggcatcgcatca

SEQ ID NO: 16798 - DNA, 1044 bp, Glycine max
  Clone ID: PAT_MRT3847_115174C.1
ggaggaagtggcattactcctttcatttccataatccgttcactaatttttaaggccaacactgaaggcagcaaaactcctagagttcttctagtatgtgccttcaaaaagtctattgatctcaccacgatagacctcatcctcccagtttcagccacttgcaccgccttcgatatctcacgcttgcagcttcagattgaagcctatgtaaccagagagaaacagccagatatgaatgacaaaaagctaattcaaacattatggttcaagccaaatgcattggatgaaccagtttctgcagttttaggacaaaacagttggctctatcttagcattatcatctcatcctcctttatgttattccttctacttattgccatcctaactagatattacatatatccaattgaccataatactgacatgatatacccttatttctcaaggtccagtctaagcatgttattcatatgcatatctatagcctttgtagcaacatctgctttcctatggaacaagaaacagaacaaggatttggggcagattaaaaacatttacacatccaattcatcaacttctccgggttcaggatactacaatgctgacagagaattagggagtcttcccctccaatcgctcgtccaaacagctaaagtacattatggagaaagacctaacataaaaaaaattctctctggctgtaatggatcaagcattggagttcttgttagtggcccaagaaaaatgagacatgaagtaggatcattatgtacttcttgttcaacagatgacctacattttgagtcccttagcttcagctggtgagctataaatgctgttgtgttagttttgttacaagtggcctcttaatccaggggagacagtcaggatctttagtttcattcaatcttgtaatacagttaacaaaagtggctattctgtttgtaaatcttgtgtaaaatggatcactttgctatgcatactgtgattagttaggtgaatttgtaatttgatggcgtaggaatagcatgaactcaattatca

SEQ ID NO: 16799 - DNA, 325 bp, Glycine max
  Clone ID: PAT_MRT3847_115175C.1
gctcgagaaataacatagtcctcctcctttgtttttccacatatttccatcgcagagagagagaaccgtcgtcaataatttcaatggccgatcagctaccgacgaacagatcttgattcaaggaagcctttacctttcgacaaggacgggatggtgattaccaccaagaacttgggactgtgatgcggtcgcttgggcagaacccaactgagctgactgcggacatgaaaatgaggttgatgctgatgggaatggaccattgatttccaaattctaatctatggcgcgcagatgaagacctgttcagagaagagctgagaacttt

SEQ ID NO: 16800 - DNA, 956 bp, Glycine max
  Clone ID: PAT_MRT3847_115176C.1
aggatccaaaagtggcaactctttttgctataggaggagtcttcaatcttcatctacatctgttctagctataccgttccttctgccactacttaactggaaaggatggtgctgcccaagttctctccgttctcacggcttctcctttcttcccttgtgattctcttaataagctatccagttaaatgtgacgatgatgaggaagacaatctttatcagggtatcaacaagtatcgagcatcgttaaacttgaaagctctaacaaggaatgacaatgcaaattgccttgctgaaaaaatagctgaccaattcaagaaacaaccctgcacaaataccacaggtgctaacactgtacctggcacagaacctcagttttctaactatccagaccttttatctaagtgtgacttggctatttccaacacaagggatggaaatgtaatgcctgcctgtgttcctggcctggttccaagtcttgtccttgctaatttcaccaaatctctctactctgatagtctcaatgacacaaagtatacaggaattggtattggttcagaagataactggattgttgtggtcttgaccactaacactccttcaggaacctttgctccctatagttctgatggtgccaatttgatttctaaatctggattgatttactgctcagtgctcttcttaggttacattttcctgttatgaaaaaaggtggttggctgttggaatgcttcatagttaaaattttgttaccaattaaatctatagcttgtatcggggtgagcttaatgaagacaactgcttttctagtgggaaattgagaggtccttgtgtaactgtgttttgtattgtaattctacagaatgcaagagacaaataggagaaagaaagcattattcctaaaagattgttatcttattgttgttattattatcaataatatcatttttgagcttggg

SEQ ID NO: 16801 - DNA, 174 bp, Glycine max
  Clone ID: PAT_MRT3847_115177C.1
gaaggcagagatcacatagacccatctaattttggactcaaatagttggtggtatggatgaccaatttttgaccggtcataggcatagtcgtgagcccatggctaagggcttaattcatgagaaggctttaaaagcccaaattttttgccacaatgggtgccacgaatttttta

SEQ ID NO: 16802 - DNA, 507 bp, Glycine max
  Clone ID: PAT_MRT3847_115178C.1
aacacttaaaagttggaagcaatcctttatctaatcaaggtttctaccaaataaatccaatcaaaagtttgtcattggacgttcatacaatagttcataaaaaaaagtatatatgacagcataacttctccatatcaaccattttccgattgatatgagctaatcaaatcaaggtttccaccaaataacaccaatttgtcatgggacgcccttacaaaagttgataaaaaaaaattatatatgtatggcagcatatattctccaatatcagccttgtatgactccttcttgtatacatcctatagccctctaaaatgcttactatcaaatcacatctaatttccaggcagtccttgcatagcaggaaagggattccctaaacgagcttcacgtctcaattgagataagcgtaatcttttcacaggtacaaattctttttgtgcttctgagttcgctgcttttaacccagtcaggcttgtccccattgcatgcagtcccgcactggaa

SEQ ID NO: 16803 - DNA, 245 bp, Glycine max
  Clone ID: PAT_MRT3847_115179C.1
ccccatgccgcaggaattcaccaaggcattctttcacaaaaaacggcttcttccatcatcagcaccttccactaaaaacgaacctaaagccgttcattccaacgtctatttcatgaacaacgatatacaccctcacttctaccaacaatctaacgtgtactgcaacggccacctggaactgactacatataatacccataaacaataccttatggtcttatatactttgaaccaccccttctacc

SEQ ID NO: 16804 - DNA, 797 bp, Glycine max
  Clone ID: PAT_MRT3847_11517C.1
cccgcgtccggttgcgaagcagtttgcagcatagcactatctcgaaattgttcattttcctctaatctatggatcccgaaacagcgttagaacttgtcaagcacggtgtcactctcctcttactcgatgttcctcagtacacccttgtcgccgtcgatactcagatgttctctgtggggcctgcttttaagggtattaagatgattcctccaggcgttcattttgtgtattatagttcatcaagcagggatgggaaggagttctcatcaattattggattttttattgatgctggcccttcagaggtaattgttcgtaaatgggatcaacaagaggaaaggttaatcaaattatctgaggaagaggaagaaagatatagtcaagctgttaaaaatttggaatttgacagacaacttggaccttacaatctcagccattatgaagactggaaacaattatctaattttatcacaaagagcgtcattgaacgacttgagcccattggaggtgaaattactgttgaatgtgaaaatgagatagttagaaatgctactaaaatgccaatggaggacgcactaggcaagcagctgaaggttggtaattctgcaacatctgttggcaagtcccggaggaaaggatgttattatacctcaattccacatgttgtgaaatgcaaggggattagtgggcaggaacttacttctttgaatcttgacaagacacatttgttagaaactctactgacaaaagatatggagattctgaagacttgcttcttggagactgcagtttgcatt

SEQ ID NO: 16805 - DNA, 148 bp, Glycine max
  Clone ID: PAT_MRT3847_115180C.1
gaaacatattggattgcacaccctatgatagctatatcatcagccctatgtgggcaatgagggccagcaacaaccatgtttgtgaattcacctcttgcataagaggaaaccttagcgactatgcacctaacatttgactatgacatgt

SEQ ID NO: 16806 - DNA, 308 bp, Glycine max
  Clone ID: PAT_MRT3847_115181C.1
caaccgttcacacacacacttagcgtgacaccaaggacgtcgtcgttttaaccctcgacttgccgtaacgtaactgcagaacgcaacgacttgaatgaatgccatggtgaggaaaaaggagtgacaaaaaagtattattactataaaaagcagtgtcgtatactgaaaaaaacgacaacgaaatggagtgcgttgcggcgaggaacttggcggcaatggcgttctgcgtgagtcctttgtcgtcgaggttgaggctgcggaggaagaagctgtggagaagacgaaccgcgtcgtcgtcgtcgtcgtgc

SEQ ID NO: 16807 - DNA, 338 bp, Glycine max
  Clone ID: PAT_MRT3847_115182C.1
gaccgagtgcctcctacgccttttcgttctgataaccgcataatgtctgcgaggtgaacatactctggtcgatggaacaatgtaggcaagggaagtcggaataatggatccgtaacctagggaaaaggattggctttgagggcttggcactggggtccaagtacctaacccggctgttgtacgttgtctggtcgagctgcttactcaaagagagcggggtgtcgacagccggtctggggacggattgggaaccggcccttaggggccttttccttgggcggcgtacagtcaactcttaactggtacagacaaggggaatacgactgtgtaattaaaac

SEQ ID NO: 16808 - DNA, 285 bp, Glycine max
  Clone ID: PAT_MRT3847_115183C.1
ggaaaaaacccccccccctttatcagggtttataaaacccggggaattggcccttttacaaacatctagggggggttcattggggcccttggcccgttcctggttttgggggaaacctcgggccgaattgcggggttaagaaaaggggcgggggaagaattagtttttttttgggggcccctaaattaaattgcccggccggcgtggtaccacccctggacggggaaaacccggggggtacccaatttaattgtcttggaggaaaaacccctttcaccggggggg

SEQ ID NO: 16809 - DNA, 698 bp, Glycine max
  unsure (1)..(698): unsure at all n locations
  Clone ID: PAT_MRT3847_115184C.1
nnnnnnnnnnnnnnnnnnnnggctctcatcagttggctatgttcaatttccgttagtcactcgatctctgtaataatcgtcaaaagaatcattacaatgtgtaattggctgacactgttggcaagtcaatgtattatgccaatggcttgtatgtattatgtaatgcgttgccactgttcatttctctccttgtccttgtgataatgaatcgctcatccgtttggaaaactaaacgaagcattcccattagggatttgatgctatgcaaaaaactttagactttaatgggcaacttaacacttgtgagttctctgtttgctcgtggcaaaacattcgttcaaaaattcagaaagctgtgataagtataggtcgggaaatgtcctattatgatccacattgggagataaaaacttttcacttgactgggcaacttttgacttgtttaatgatccacgtggggagataagccgaagttaaaggaccttaccctctttcccatcttcctctgctcctcaattaacgtttctatggattgacatggaactactttgtcagcagtactatacaggtaaagctgaggacaaggtttggtgtttcatgagcacattgacaatccttgttaacctcctgtattcaagacacgaaaaatgtgcttaccagttaccacctaacatttaaagtatattatggctctaaaa

SEQ ID NO: 16810 - DNA, 1962 bp, Glycine max
  Clone ID: PAT_MRT3847_115185C.1
tttcgatctccaaattcccgcgctttgagtttttggttttggcatcatctgtgctcaatgaacttggctcaagtgaatattatccatacttcattaaacgccttgtgtccatggcaatggacaggcacgataaggagaaagaaatggcttctgttctgctttcagcactgtatgggggggggggggggggttatatcttcctatacttgcgacatccttgcattattcttacgagctgttgttgatgacattcttcctccagcctttcttgccagggctaggaaggctcttccagaatcttccaagggagttcaggtaatccaaactgctgaaaagagttatctctcagctccacaccatgcggaacttgtggaaaggcgatggggtggtagcactcacataactgttgaagaagtgaagaagaagataggtgatttacttagagaatatgtggatagtggtgacacattggaggcctgtagatgtatacgtgagttgtttcattcttccatcatgtgttagctttgatacttgccatcctattaaaagaagcagctgaagaaggacttgttagttccagccaaatggtgaaagggttttctcgtttggcagaatccctagatgatcttgctcttgatattccatcagctaaggcattgtttcagtcatttgtccccaaggcaatatctgaaggatggcttgatgcttcacttaccaaacctgcaactgaagatggggaaatccaagaagatgagaaggtgagaaagtacaaaaaggaatctgtaactataattcatgagtatttcctttctgacgacattcctgaactgattcgaagtcttgaagatcttggagcacctgagtataatccaatatttttgaagaagctaataactcttgctatggaccgaaagaacagggaaaaggaaatggcctctgtactgctctctgctcttcatatagagatcttctcaacagaggatatagttaatggttttgtcttgcttctggaaagtgcagaagatacagcactggatatattggatgcttcaaatgagctggctctgttcttagctcgggctgttattgatgatgtattggctccactgaatttggaagaaattggcagcaggttaccaccaaaatgcagtggtagtgaaactgtgcgtatggctcggtcactcattgctgctcgtcatgctggtgagaggctattgagatgctggggtggagggactggttgggctgtggaggatgccaaggacaaaatcatgaagctcttagaagagtacgaaagtggcggggttgtgagtaaagcttgccaatgcatccgtgatctgggaatgcctttctttaaccatgaggtagtgaagaaagctttgattatggcgatggagaaaaagaatgatcatatgctagatctactgcaggagtgcttcagtgagggcctgatcaccattaatcagatgacaaaaggtttcacccgaataaaggatggtcttgatgatctggctctggacattccaaacgccaaggagaaatttggcttctatgtggagcatgctcagtcgaagggctggcttctacccttatttgattcgcctgccacagatgcctaattaccgccggcggcagctttttgaggacgtttgtgtcttattatttctctcatggatgttgtcctttagctcccactgaatgctgaatctgggaccgttggacttctaatgatcctttttttttttcctgttccttttacttactctttcttccctgaatcatctcaccgacagagtttcctgttatctcaggcattgtataaagttggtcttattccagtaacagctttttaggatgatgttgttgcaccaagaggtattttagaagggcatatattgtatttttcagtatcgattatcgttttcattttgtcaaattttcggctatggcatcgtggctgtt

SEQ ID NO: 16811 - DNA, 1220 bp, Glycine max
  unsure (1)..(1220): unsure at all n locations
  Clone ID: PAT_MRT3847_115186C.1
ccacgcgtccggggcaaactggagtaatcgcgaatggaggggctcaaggtctccaaagcgaacttaacagtatacattcacccttccaaaagtaaccaagtttcccaagccgttctccgccaactcagctctttgcttttcacgttcagcgaaatcttcgacggcgtcgttttggcctacgatgtcaattccttcgacacgtgcgcaaagatcctctccggcgttcacccttacttcggcgtcaaactcaaggtcaatctgttgctcttttctcccaagccaaacatgctcttagggaaggtggttaaggttacgcaagagtccattcacgttgttgtgcttggcttttcctctgcgattatatctgagaaagatatcagggaagagttcgtgtgcaaaacgaaacgagggcaagaggtgtatgtgagcaggtctcacaagcggcatgtgataaaggtcgggaccatgatacggtttttagtcaagagttttgatgaagaaatacttcatgtttatggatctctggttcctgatcacacaggcagcatttattggttggataagaacttggaagttgattcccattctgacaggagtgaaaagaagagaagaattgtgccagaacgaataatgctagagcaagatgctgtggatggggaattgtcaacgttgaacattggccaaaagagcaaaaaatcaaagaagcaaaagcaccaggaggaatcttgaatgtaccttggacattgtccacagggaaaacaaattggcgtgtctatattaccaaggggatgccttcagcatttagatttcaaaagcattctctatgttgccttggagatcggtgcacttgttttcattgagatcctaattctttcagaaactttatgatgataatttactgtatgatcaagaagcttaggcaggtttttttggggagggtgcggcaagtgtaaaaaaaaagccttggtgcattttcagtttaggaattacaggtttgcagtcttttcctagagtcctttaggaagtgagaactattcatgtatatcactgagcccagcccccccataattagaaaggatggtggactactgtgtatgaaaaggttgtttttttttttggtttgatcacttctgatgttatatgctgaaatgatcttcaaactttccatatattggtcagtagattactatgttctcttttgagnccaaangaggacnnnn

SEQ ID NO: 16812 - DNA, 547 bp, Glycine max
  Clone ID: PAT_MRT3847_115187C.1
gtcgaattggcatcatctgacctcagagaacttggctcaagtgaatattatccatacttcattaaacgccttgtgtccatggcaatggacaggcacgataaggagaaagaaatggcttctgttctgctttcagcactgtatgctgatgtcatcagccctgcacagattagggatgggttttttatgcttattgaatcttctgatgatcttgctgtggatatactggatgcagttgacatccttgcattattcttagcacgagctgttgttgatgacattcttcctccagcctttcttgccagggctaggaaggctcttccagaatcttccaagggagttcaggtaatccaaactgctgaaaagagttatctctcagctccacaccatgcggaacttgtggaaaggcgatggggtggtagcactcacataactgttgaagaagtgaagaagaagataggtgatttacttagagaatatgtggatagtggtgacacattggaggcctgtagatgtatacgtgagttgggggtttcattcttccatcatg

SEQ ID NO: 16813 - DNA, 1824 bp, Glycine max
  Clone ID: PAT_MRT3847_115188C.1
gttctttttaggatactatatcaacctaaagcatatttgcccttttggagacttgcgctttttctttgttatttcttctttgttccagaatcatcatcaccaatattttccagcaacacatttaccaagctacataagtagaaacaggattttccatatttgaagtgccacggtgcttccccgagaggcttggcaacttaaagtagatcaaaagtgatgaagaagagttctggttcctcccagaaacttggttcatttctaagtccaggggcaccaaactacagtgagaaaagcattgggagccaaaaggggtggagctcagagagggtgttgttgcagccttcaagcagcaacataaggaatgctagtgtagctaacttgacaccctttaacagtggaagaacaataccttcaaaatgggatgatgctgagagatggatttgtagccccgtttcaggctattctaacaacaaaaccaattcctatgcacaacttcagcagcggcgaccgaaatcaaaaagtggtccaattatgcctccaggaacaggctactactccaattactcacccacaattccactgcgccaaggtttggtagtgaagaacttcatgatgggtggttctcctttttcaacgggagtgttggcaccggatgctatttctcttcaccattattattcacatgaggctgttttcggtcaccgttatgactttgacaatagtatgcaatgctctagtccattgctcaatgaaaatagtgtagccctcccatcagtgtctagtgcacccatgtggtcagaactgctatgcgacccttcttcgcctaattctcaagatgagaaacgaaaagaaactaagaatgcggacgacgtgacatctctctcaaaatgtgacaaaggcactcaaatgagccctcctgagactgagaatgatgcaccaaaatcttcacccaattcgaccatggatcaacaaaattacctttctgcaaagttagaggtcagagatgtagagatagaccgtgaggctactactgttaggtggtctaagagccatgtacccaagctgagcttgctacctggtatacactcaaggaaaagtagtagaacggaagccaaagcttcaggtttggatattgcagactcaacgttggactcttccaagattcagagggaggaagccaaaatcgttgcatgggagagtttgcagaaagcgaaggctgaagctgaaatacgaaaactagagatgaaattggaaaagaaaaaatcgtcatcaatggataagattctaaacaagctgagaagggcgcagatgaaggctgaaaagatgagaaaccaaataactgtacaagagggtcagcaggtttccaatactcgcaaagtattttcattccacaaatatgcccagatatggtctccaaggagctgcttcggcactcatgctctccatgattaattaataatttaatatttaatcccatacccacgccctgaaatcactaaggtttagtcccgaaaaatgcaggaataatcatatttcaagtcataggccatttttgtttgccttttgtacttcccaacaatgttaatagtgaattactaatacattgtcttacagccatttgatatgtttggcattatgtacgagacctaatcgggattatttctggatgcttgcctttctttttaccgtttattttcttctcccctctttattactaagagcatcgttggaggagcacaagtagttcaagaattggagcgttttccatgaccaccatcagcaaatttgcattgtaaataatattcaaaatatttcacttctttc

SEQ ID NO: 16814 - DNA, 3039 bp, Glycine max
  Clone ID: PAT_MRT3847_115189C.1
cccacgcgtccgcagcattgtatgctgatgtcatcagtcctgcacagattagagatgggttttttatgcagttgacatccttgctttatttctggcacgtgctgttgtggatgacatcattgctccagcgtttctcttcttcttctcacttcattttataaactcactctgcagttagcgacaaaaccccaacccgattcggatccgattaggttctctcggatcctctccaccgcctcctccgattcccaaatccactccctcctcctgtcttcgctcgagatccgagctaagcacgggattcggatttccgtttccatcgctctctcttcaccagttttgcgcttaaatggcatcaagcgaggggtttctgaccgatggacagagagagattctgaaaatagcgagtcagaatgtggagaatttgtcttcctcgccgaaatctccatcctccttgcttgctgaacatcatcatcacgtgagggctccttcagggggtggtaaggcacagactgctgggcatgctgccaggaatgtgcgccggtcgcactccggaaagtatgggagggcgaagaaggacggtgctggtggtaagcgcactggtgggaagttgtttaaaagaggtggtgaatcccgtatagacaaggtgatccatgccaaggacaagatcatgaagctcttggaagagtatgaaagtggcggggtggtgagttaagcttgccaatgcatccgtgacctgggaatgcctttctttaaccatgaagtagtgaagaaagctttgattatggccatggagaaaaagaatgatcgtatgctagatctactgcaggagtgcttcagtgaaggcctgatcaccattaatcagatgactaaaggcttcacccgaataaaggatggacttgatgatctggctctggacattccaaacgcaaaggagaaatttggcttctatgtggagcatgctcagtcgaatggctggcttctaccctcatttgattcacctgccacagatgcctaattacccccggcagcagctttttgaggacgtttgtgtcttattgtttctctcatgtgtgttgtcctttagctcgctcttccagaaccttctaagggaagttcaagtaatccatactgctgaaaaaagttatctctcagctccacaccatgcagaacttgtggagaggcgatggggtggtagcactcacatcactgttgaagatgtgaagaagaggattgctgatttactaagagaatatgtggatagtggtgacacattagaagcctgtaggtgcatacgggaattgggggtttcattctttcatcatgaggtcgtgaagagggccttggtacttgccatggagatccattcggcagaacctcaactgttgaagctattaaaagaagcagctgaagagggacttattagttccagccaaatggtgaatggattttctcgtttggaagaagtcctagatgatcttgctcttgatattccatcagctaaaactcagtttcagtcattggtgcctaaggcaatatcagaagggtggcttgatgcctcatttttgaaaccatctagtgaagatggggatatagtagttgaagatgaaaaggtgaggaagtataaaaaagaggttgtaactataattcatgaatattttctttctgatgacattcctgaactcattcgaagtcttgaagatcttggggcacctgagtataacccaatatttttgaagaagctaataactcttgccatggacagaaagaacaaggaaaaggaaatggcatcagtactgctatctgctcttcatatagagatcttctcaacagaggatatagttaatggttttgtcatgcttctggaaagtgcagaagatacagcactagatatattggatgcatcaaatgagcttgctcttttcttagcacgagctgtgattgatgatgtattggctcctctgaatttagaggaaattagcagcaagttgcctccaaaatgcagtggtagtgaaactgtacggatggctcgatcacttgttgctgctcgtcatgctggtgagagactattgagatgttggggtggtgggactggatgggctgttgaagatgccaaggacaaaatcatgaagctcttggaggagtacgagagtggaggtgttgtgagtgaagcatgccagtgtatccgtgacctgggaatgcctttctttaaccacgaggttgtcaagaaagctttggttatggccatggagaagaagaatgataggatgctggatctgctgcaggaatgtttcagtgaaggtctaataaccatcaatcagatgaccaaagggttcaccagaatcaaggacggtcttgatgatctcgctctggacattccaaacgctaacgagaaattcagcttctatttggagcatgccctgaagaagggctggctcctaccatcatttgattccactgccacagatgtctaactggcccaggctgcagcagcttcttgaggaggactatattttcattgtttctcttatatatgttgttgcactttagcttccgctgaatgtggataaatctgtgggatggttggacttctcatgatcctttgaatctgttttttcttttctttcaaaattatgtcaccgacagatattcctatgaatctcagtcgttgtgtaaatttggtcttatatttcgttgacagctttttagaatggtgttgcgtcaagaggtatgagaggaatatagtgtatttttcagccttaatactcgtttttcattatcttgtattttatactttgtttgtctattctttatctacgtcgagctagataaataagaggcttagaaatggtggccactggccatatttgaattaagattctatagtgactgcgaaaatcattttagaaacggtagctgtgatgagtgatgagtaatgagcactgtggctgataagtggctccctgtttggttggattcatttcattctgttgcaaggtttgtgaggataaataaaataaattagacttgctatgagcc

SEQ ID NO: 16815 - DNA, 1196 bp, Glycine max
  Clone ID: PAT_MRT3847_11518C.1
gagacgttatgagttccctccctttcactctttaatccccaccagcaaaacagtttccaaatggtaatagtagcattatcctcctcccttcccgccggaagaaacctcttctcctccattccaccaacgccgccaccccccaccaccgtctccgccaccccacaaccaccaatcccaatccccaaatacccccctccccgcaaaaaccccaaccacccccaccacagaaccccgccctcaaacaccaccgccgctccaagtaccaccggccagttccccgtgacggcggcatcatcgcctccgacggcgcggaccgcgccgtcgtaatcggggagtccggcgtgtcgtacctgctccccggcgcgccgttcgagttccagttcagctactccgagacgcccaaggcgaagccgatcgccatccgcgagccggctttccttcccttcgcccctcccacgatgccgcggccgtggaccgggaaggcgccgctgaagggcaagaagagcaagaaggttccgctcttcgactcgttcaatcccccgccggccggcaccaagggcgtgaagctcgtggagatgcccgggccgtttcccatggggcagtttccgctagaggggaagagcagggaggagattctcggagagcctctgaagaagtgggagatacatatgctggttaagcccatgatgtcttacaatcgccaggttaatcttggaagggatggattaacgcataacatgctggagttgatacattcacattggaagcgtcgccgagtctgtaaaattcgttgtttaggtgttccaactgtagatatggataatgtttgccatcatattgaggagaaaacaggggggaaaataattcatcgggttggtggtgtagtttatcttttccgtggcagaaattacaactatagtactcgtccacagtatccagtgatgctctggaagccagctgctcctgtttacccaaaacttatacaggatgctccaggaggattaacaaaagatgaagctgatgaattacggatgaaggggaaaagcctgttaccaatatgtaaattagccaaaaatggagtatatacatcccttgtaaaggatgtcagagatgcttttgaaggaagtattttggtgaaaattaactgcaagggattggatcctagtgattacaagaaaataggtgccaagcttaag

SEQ ID NO: 16816 - DNA, 514 bp, Glycine max
  Clone ID: PAT_MRT3847_115190C.1
gttctttttaggatactatatcaacctaaagcatatttacccttctgaagacttgcgctttttctttgctatttcttctttttttgggaatcatcacctccaataatttccaacaacacatttaccaagctacacaagtagaaacaggatatttccatatttgaagtgccacggtgctaccccaagaggcttgtggcaacttaaagtagatcaaaaagtgataaagtgtgtgatgaagaaaagttctggtacctcccagaaacttggttcatttctaagtccaggggcaccaaactatagagagaaaagcattgggagccaaaaggggtggagctcagagagggtgttgctgcagccatcatcaaacagcataaggaatgctagtgtggctaacttgacacccttcaacagtggaagaacaataccttcaaaatgggatgatgctgagaggtggatttgtagccccgtttcaggctatgccaacaacaaaaccaattcctatacacaacttcag

SEQ ID NO: 16817 - DNA, 1845 bp, Glycine max
  Clone ID: PAT_MRT3847_115191C.1
aaatcctatgctattccaacaccacctctactctctctctctctctctctctctctctctcctcagctgtgtgatgattcatttctaaaccctaattctccttgtttccattgctgcttcattgttttttaagcaattccgagcattgatcaaatgggttttggttcacttccaattttctgaaacagcgtactctcaaaaaaaatatctgatcacattttctacttctgcaaattctgcatttttttccctctctttctttctggggtgtctgcagaacaagggaatctcacagattccttgtgtttctctttggtttccggtctcaaaatatcagcttttggatttttagtgttgcaaattgttgagggtttttgtggggtggtggcttttgtttgattttccatggctgcggttgctgagattcccgctgatgccaacaaaatggactcaaaacctaaggctgaatctgaattcagtgtgcagaagctggttgacatgttcacaaagttgaatcctttggcgaaggagtttttcccttcatcatattctcccaatcatgataatcgctttcagggctttaatcagctctcaccaacccactttctggtcagcactaagccctctgctgatgagaatttcccgaacaatcgaaggagaagaaatagttttaaccaaggaaggagaaaggtgagtggaagatcactaaaggctcagagagaagatagcattagaagaacagtatatgtttctgagattgatcagcatgttactgaggagcggcttgctgctttattcagcagctgtggacaagtaattgattgccgaatttgtggtgatccacattctgttctccgttttgcttttgttgagtttgcagatgagtatggtgcaaggaccgctctaaatcttggtggtactgtgcttggatactatccagtcagggttcttccttcaaaaactgccattcttccagtgaatcctacattcctccctaggtcagatgatgagcgtgaaatgtgtgcccggactgtctattgtacaaatattgataaaaaggtttctcaagctgaagtgaagaatttttttgaatcagcttgtggcgaggttatgcgcctgaggctcttgggggaccacgtgcattcaactcgaattgcttttgtggaatttgcaatggctgaaagtgctattattgcactaaactgtagtgggatgctcttggggacccagccaataagggtgagtccttcaaagactccagtgaggccaagggtcactcgtccggcgtctcattaactgatcgtcttcgtgaaagatttgtgagtggatatttgcttcaactttccagttgagacttgtgtagaaagggtggtgaaacttccctttgtttgtttcagtatttccatcctttttctgtcaacagcagttacttttttgttaccagagcttataactatcatgcactagttaaacttcctagcatccagtctttgattgtgaagtatttataccgtatctacattgaaatggtctagtttcagttttttttgttacttggagctagtactaatcgtactttaatttagcttgaatcttttgcacaattaaaaacaaaaataaaagagagttcagtttgtttagcatctaattagggcaaacgttcaatcaaaaaaaaaaaaaaaaaaaaaaaaaatgcagttgtgttccctccttggagctaggtcggtgcgcactttaacttggcctggatcttttgccctattttctgtcgttattgtttgtgtgttctgtttgttcaccacctatataaagatttttacatgtcaatcgatttgaaattataat

SEQ ID NO: 16818 - DNA, 290 bp, Glycine max
  Clone ID: PAT_MRT3847_115192C.1
agttctatctctgtctgctttttgttctcatacctagcctcttctacgagacacacgcaccatgtgaacgtggtcaatatctttgatacctttctacatcgctcactcgctttgatatagatcgtgctccgtttgtgctacggtcctgtgaatggttgctatcgacacccatggggtcgttccgcctacctacttgtttcgcacaccgacttgaagacacacgcctacagtgaattcttcatttgcgtgaatcagtcgaatttcagacttgaggatcagagacaagtttt

SEQ ID NO: 16819 - DNA, 644 bp, Glycine max
  Clone ID: PAT_MRT3847_115193C.1
ttttcatacaaagagaatagaaagaaaaaactacacaccgcaggcaaaggccaagacagtagtagctaaagccaaagcctatgctattccaaacaccacctctctctctctccgcagctgtgtcatgattcatttctaaaccctaattctccttgtttccatttctgcttcattgttttttaagcaattcccgagcattgatcaaatgggtttttgttcatttccaattttctgaaatagcgtgccctcaaaaaaatattatctgatcacattttctgcttctgcaaattctgcatttttttctttctttctttctttctggggtctctgctgaacaagggaatctcgcagattctttgtgtttctcttcggttttcggtctcaaaatttaagcttttggacctttagtgttgcaaattgttgagggtttttgtggggtggtggctttgattttccatggctgcggttgctgagattcccgctgatgccaacaaaatggactcaaaacctaaggctgaatctgaattcagtgtgcagaagctggttgacatgttcacaaaattgaatcttttggcgaatgagtttttcccttctttatattctcccaaacatgatcatggttttcagggctttaatcagttctc

SEQ ID NO: 16820 - DNA, 394 bp, Glycine max
  Clone ID: PAT_MRT3847_115194C.1
gaaaaccctgcaatcaatggaaaaagagcattgttctcactgacacccaattccaggtatatcctgctgtgaaacgaaattttcctgccgattactgctgtgaggaggttggcaaaacaacagtttgggtacttttgacctctccaatggaagaaaacctttacacaggaccactggcccgtacaaaggacactgaattgaaagtcaaactaggcttgtaccttctgcatgccgaaatgaacggtcacaggggcccgcttacaggaccctggagagtaagaccgcgcactttgacataccttttgcataacctatgcggacctgatttgcaggctaggaaacggagggacctgcccttctgagccaaacgcctaggtgggtgccaaagttatga

SEQ ID NO: 16821 - DNA, 862 bp, Glycine max
  Clone ID: PAT_MRT3847_115195C.1
gggagaagggtgagtggaagatctctaaaggctcagagagaagatagcattagaagaacagtatatgtttctgagattgatcagcattcttttttcctggtgtaggttactgaggagcggcttgctgccttattcagcagctgtggacaagtaattgattgccgaatttgtggtgatccacattcagttctccgttttgcttttgttgagtttgcagatgagtatggtgcaaggactgctctaaatcttgggggtaccgtgcttggatactatccggtcagggttcttccttcaaaaactgccattcttccggtgaatcctacattcctccctaggtcggatgatgagcgtgaaatgtgtgcccggactatctattgtacaaatattgataaaaaggtttctcaagctgaagtgaagaatttttttgaatcagcttgtggcgaggttatgcgccttaggcttttaggggaccaagtgcattcaactcgaattgcttttgtggaatttgcaatggctgaaagtgccattattgcactaaactgtagtgggatgctcttggggacccagcctataagggtgagtccttcaaagactccagtgaggccaagggtccctcgtccggcatctcattaaccgatcaacatcatccaacaagacttgagagagaggatatttggtcaactttccagttgagacttgtgtagaaagggtggtgaaacttccctttgtttcagtatttccatctttttttctgttaacagcagttactttttttgttgccagagcttataactattatgcactagttaaactttctagcatccagtccttgatcgtgaagtattataccgtatctacattg

SEQ ID NO: 16822 - DNA, 254 bp, Glycine max
  Clone ID: PAT_MRT3847_115196C.1
ccttcgcgtgcgtgtaaaacgtggccatgtctgttccaactgctgacggggacactcctgatgcgattttgttagtgaccttcctgccgtaagagtgatcggcacctgatacgatagtgctgctggtggtggcccacacaagtggactatggcgccatcattaacaagctttatatcagttccttgatctcagagaatctgtggtaatagcccgcttgtgtgctggagatgtgcctgtggccgtgccctgctac

SEQ ID NO: 16823 - DNA, 323 bp, Glycine max
  Clone ID: PAT_MRT3847_115197C.1
tggggagtttggttatcgagatgagtagaaacagtgtgacgataatgaacgtccttgttttcttcgctgccaaaattttggaagcatggcaatgccatgcttaccatatgttcccactccgaatgaacactggctatggtgcccgtactccggtggtgaaatgcgcaagttggatgcttgctgtggtagcacacaacatcgttggctttgggaccattcctgaaaagtgcgttgaatcaacagatgcatacatccatggcgaagactatcgatcagactccaaaccagttaagcaacatacttacttttatgccagagacctc

SEQ ID NO: 16824 - DNA, 338 bp, Glycine max
  Clone ID: PAT_MRT3847_115198C.1
cgactactcactcactgcacatcacaattttatcgttgaccatggctaccatcgatagcatgcgagcccgccagatgttccacagacgtggcaatccaactggggaggcggattcgacgcgctccgatggaacattagccagagctgcctgcccaagtggagcacccactgggagggccgaggcccgtgaatcgagagatggacgacccgaccaccaaggaaagggcgcatcaaaggctgtggacaatgtgaacaccgccattggcacctgctttgaacgccacagacccaactgagcagacggccccagacaacggaacggatcaacaacaagatgg

SEQ ID NO: 16825 - DNA, 228 bp, Glycine max
  Clone ID: PAT_MRT3847_115199C.1
agataaggtagcgtctaccacctcagcgacaacccatgccaataccccatcacgctcttcctactccaggtgcaagtgcaactcattagaggaattaattctcacactccatgccaatttctaaccgccctctctctcaggctatcttttgccgtcaaaactcgggaaaccttcgtctcgaagtgggatctcttcttttaatcccaatatgcatttagagttatgatc

SEQ ID NO: 16826 - DNA, 433 bp, Glycine max
  Clone ID: PAT_MRT3847_11519C.1
tcgagtgtcacttctcctcttactcgatgttcctcagtacacccttgtcgccgtcgatactcagattggcaacgcgacattgtttttcttctctgtttggttttgtagatgttctctgtggggcctgcttttaagggtattaagatgattcctccaggcgttcattttgtgtattatagttcatcaagcagggatgggaaggagttctcatcaattattggattttttattgatgctggcccttcagaggtaattgttcgtaaatgggatcaacaagaggaaaggttaatcaaattatctgaggaagaggaagaaagatatagtcaagctgttaaaaatttggaatttgacagacaacttggaccttacaatctcagccattatgaagattggaaacaattatctaaatttatcacaaagagcgtcattgaac

SEQ ID NO: 16827 - DNA, 313 bp, Glycine max
  Clone ID: PAT_MRT3847_1151C.1
aacaacacaattagtgaatgttcttaaaacagagacgggatgattgttaaaaataatgaaaagggaatgggaacataattaatttaagcgggggggtaggcttttcaaacaaaatgcaggagcccagtagcaaaatatttgaaaaactggggaaaaggaagagaatgtccttcagactaaaggagataaactatgtgtaagaaaggggccacttaaaagatataaggggcggcggatagatgacctatccagggtgtatggacagcatgaatctttaacttacagttgttcatttaaaaaaaaaaacacaggg

SEQ ID NO: 16828 - DNA, 498 bp, Glycine max
  Clone ID: PAT_MRT3847_115200C.1
gggaaaccccaaacctaaaattaaaaattattaaggagaggtaagggacaaatcattcacgggacaaccaccatttataattaagggggattatccaaaaacccccaaacatttgtttgcagggccaaccaaaacaaaaaggccctaaatgggttctcaaaaaaaaaaacgggggccccccccagggggaaaaaaaaaaaaaagggggaaaaactaaaaagggttttttttaagcaatttccagggaaaaaatcccgacaaaatgggaaattcaaaagggaaaaaaaaattaatactaacagggggggggccaccaaaagccggaaaatttgaagcaaaaaccaagcttgaagttagcccccacaaaaagctccccaaaggtgatttaagcgaaaaaacctcaaaaaaaacgggcttttactcctattaagggggtcccttttggttaaaaggtattttatccccaaaacgggggggaatcccctggagttttacttt

SEQ ID NO: 16829 - DNA, 295 bp, Glycine max
  unsure (1)..(295): unsure at all n locations
  Clone ID: PAT_MRT3847_115201C.1
tttttagcgatgaagagagtcgtagtctactagagactccttgctcgtgtctggtatttgagaccctcagcttaccacgctactatgtgctggtgtctgtagacttatgttgcacatgcatagagctagggtgtagcaaccgaggcttgagtacactgaagtaaggtggtacactcgacgtcataccggagctatactacaatcgtacgtgagattgaggatcacgctagatcatgaatctgcagntgccatagcttgtaaagcagctcctcacctctcaatgccaaggaagtca

SEQ ID NO: 16830 - DNA, 298 bp, Glycine max
  Clone ID: PAT_MRT3847_115202C.1
cctcctgccgaatcggaatcagagtttgaaggaagtttatttgaattttctgatgatgataattttgaatcaaagagaagcagtagcagcatcaatgaaaatggcagcgattataataatgaaataattaataacaataataacggtgcaaataatgttaattatcacaataataattttaacaataataacggagataacaatggatttcatgagaaccaagacgcaacaactgatactatttatagtagtgacgaaggatttgacatttaaaataaagtttattataaatataaaa

SEQ ID NO: 16831 - DNA, 279 bp, Glycine max
  unsure (1)..(279): unsure at all n locations
  Clone ID: PAT_MRT3847_115203C.1
tcgnangcacgcgtacgtaagntcggaattcggntcgaggattgtcctctccatcttcctctctttcanannaaannanagnngaaaanatnaaaantnattcntttnctattcttaanaancctttgggngtctctgnnagttaatgnnagaganagncaattnttcagnaaagtnanccctctgaanaanaanatnaaagtgaaangaggttnncaaaaatgaaggnnaagtaaanaagcnagaanaanaannagttttnannnnagaaacagaaaa

SEQ ID NO: 16832 - DNA, 475 bp, Glycine max
  Clone ID: PAT_MRT3847_115204C.1
cttctttctcgtgcaagcaaattcttctttgattcactctctccctctctctgcgcctctctgttactacgctgcttccacatggaagcaggggaagattgctgcgtcaaggtcgcagttcatgtacggccactcatcgccgacgagaagcttcaaggatgcaaagactgcgtcaccatcgtttcagggaagccgcaggtacaaattggtgcccactcctttacatttgatcatgtctatggaagcaccggttctccctcaagttccatgtttgaagaatgcgttgctccccttattgatggtttgtttcaaggatataatgctactgttctcgcatatggtcagacaggttctgggaaaacgtacaccatgggaactggctttaaagatggttgtcaaacaggaatagtaccccaagttatgaatgttttgtttagcaaaattgggaccctaaagcaccagattgattttcagt

SEQ ID NO: 16833 - DNA, 1329 bp, Glycine max
  Clone ID: PAT_MRT3847_115205C.1
cggacgcgtgggggtaactgaagtttgggagaacatggtggacaaaaagttttatccttctgtctcaacatattctgtcatgatccatggtttttgtaagaagaagggaaagctagaggaggcatgtaagtattttgaaatgatgattgatgaaggaataccaccatatgttactactgttgagatgctgaggaatcggcttttgggtttagggtttatagatcacattgaagtactggctgctaagatgaggcaaagcacttcctatgcaattcaagaattggcaaatattatgattggcaatagaacagctcataatactttgggacgtgatgagatggacatagaaagtgactgaggaagtgattattgtttctcgtaatactttctcattaagctattttgacaaatatgtggaggcaaccatttcattacggcagagcacataataaagatgctatatctgtgggctatggttaattgattcattttaaggtgctgggtattattataattctttgatgtagcctgtatgacatatttcagatggaaggtaatctaaagtttaaacctctgaaaaattttcatggaacaccttagtttctgtatcatgaagaaatgacggacatgctggttcaggaaggcagagaaattgcaagttttatagctcggggagtcatttcttacatgatatctcttgtcctataggctgcagtattgtttgagtggcatgcctccgccaaatttcatttcgtagacacctatcattgccacagatgggttgtgattgtaatcaggatagaagtgactgctttgtttcattgatttaaacatcagacaggtaaagttgtctcaaccatggtagttgaattgggattcaaatcctggatcgaattgtatcgtattgtgaagactgcacaccaagttggcaatctgtttctgttcatattggagaatttaagttattcctgatgaaatcgtaaacccaaaaaaggtttgggaaactttgcaagtggatctgcacaccaacgaaagaactagtgacatgatacaaagattactctggcctcaatagcaggcatttgtacggtttcattccttacactggggatcataaggcagtcagacatcacaggtttggggttaaaagagaagaaacccataaggcagtcagacatcacaggtttggggttaaaagagaagaaaccaaattatttatgtttagtttttttatgttgatcataagtgtacaattatcattattaacttttagttttttcatcgctgttggattttggatgaattggagccaacttgtggcattattat

SEQ ID NO: 16834 - DNA, 454 bp, Glycine max
  Clone ID: PAT_MRT3847_115206C.1
ataaaaaaaggaatggaaggggcccgatcaataataatagggggacatttgggacattttttttcctttcctttcccctttttgtggatatatatatatatatatatatggggacaattttttctattgcacaacattccacactaccttttttctcaagggatcaattcctacccaggaacaacggttttgggcttatagatcccccaagcaaaaggggagggggggaaattgaaattggcctacaactaacatgatggggtcccgcaaatcacacaggggggaaaaccaggaagaaaaaagggggaaaaagaagggaaagacagcaaatggggtcataaacccttccctgccccaccgggttagcgggatcataatccacagcaaatgggggtataaaccatcatatgccctcttctagattcagccgcagcaaaaccactttctctttcca

SEQ ID NO: 16835 - DNA, 385 bp, Glycine max
  unsure (1)..(385): unsure at all n locations
  Clone ID: PAT_MRT3847_115207C.1
agagacacgaagagaaaacccaaaaaagaaaaaggacacacnaaagggaagaacaccacagaggaaagggcaaacggcncccccngncagggagggggggggancnacacnnanccacanncnngaagacanaancgagaggggcaaagaaacgnngcaaanccaaagccaaaagcannncccannannaaacnngccanancaacccccancncnccaannancnncnnnccacnagagccancancangaagagaaagacancncaannaggggggggacnccngaanganccaagggccnnggcngcnccngcncncaagangaaccggnggnagaaggcngcaanggcngccccaanaaaggggcccacccaaaagaacca

SEQ ID NO: 16836 - DNA, 641 bp, Glycine max
  unsure (1)..(641): unsure at all n locations
  Clone ID: PAT_MRT3847_115208C.1
agacgtgggcttatctcgtagtatgccccaatataactagcttaagtttgctcgtacatggcttgcttaagcacgcatataaagccataaattttctacttgtagggagcgcttaagcgagcccccaatgtgacaagcttaagcaagtctagagagttcaaaattctcagatagacaactagcataagctagcccataaatagatagtgcatagttattaaacacttttaagttttacaaaactatttttatgttaccataacattggtgagaagtatctatcgactttgtcaatgactaatttccaccaaagaatctatttggtcaacttaaatagagtctttcttgtcaaccatattttttcacccacaagtcgaacttgaaaccttggttatgacattcgaattcaatatcactcaaaccaacanacttgatgtgaaaatgnttgtgaatcatgcaaggtttgatgatgccaaaaagaatttacttngataatggttgttatcataaaaaagggagaatatgaatatatgaatacaagattntgatgatgccaaagtataatcaaacaaagattgtttcaacaaacattncaaggttaagcaaacagagattgctttcaaggtcaaacaaacaagatc

SEQ ID NO: 16837 - DNA, 239 bp, Glycine max
  Clone ID: PAT_MRT3847_115209C.1
attagggccaataatacaggtgcgagcgatcataatatattttagaaaacactgcctcccctatgtcacagcgaaaaggaccgcataaactgtggtttatggggccacagaatgttaaaagacttctaaatgaacttgcatttgacaaatattcatttgcattaatagaggcagccctactgactttaacagcccgaattgtgaacccctgctcctcctggctgtgaatatataggccc

SEQ ID NO: 16838 - DNA, 276 bp, Glycine max
  Clone ID: PAT_MRT3847_11520C.1
tcggatatcatttgttatcaactattctttttctctttcctagaaattccctgcaactagccaatttcattatattttcatttgggtgagcatagtaattgatcagagtagttaatcaagtcatttgtggcttacaattgctctttaaatactgttaattgctcccatatttaattggtacatacttgaaagttatttgtaaggaattcttaaacttatatcattattagtaatgattggctgggaatgggatgataagtgagtcatgcttcctag

SEQ ID NO: 16839 - DNA, 275 bp, Glycine max
  Clone ID: PAT_MRT3847_115210C.1
gcaaaaaatgaggtggtgcgttttgggggtaatgtgattttggggccaaagaaaagcctccagggctaacttactctctcttactcttattggtcagtgaagattcaacccacccttgacatttagttcgaccacacacgaggaaactgctagtgtggctacaaaaagattgcaacactattttcataacccaaagttggttgtacatgtatgcaatggccaccttcacacgtttttttcgcgggtttccaagcttaaacttctctagttgtttc

SEQ ID NO: 16840 - DNA, 588 bp, Glycine max
  unsure (1)..(588): unsure at all n locations
  Clone ID: PAT_MRT3847_115211C.1
cgaattcgctcgagcatgatgaaatcaacaaagtcggcactaatgaggagccaaactggagattttgatcataataggtggctctttgaaacaaagggcacctatggctatggcaatgctatatggccaaaggaaggtggttttggaaatgaaaaagaggatgatgttgttcagccaactgaattgatgagcagaccctggagaccacttactcggaaactgaagatacctgctgccgttttgagcccatatcgtcttatcatttttattcgtttggttgtcttggcactgttcttggcatggaggatcaaacaccaaaattctgatgcagtctggctctggggcatgtctgttgtttgtgagatatggtttgctttttcctggctgctggatcaactgcccaaactatgcccagtgaatcgttccacagaccttaatgttctaaaggagaaatttgaaacaccaaaccctaacaatcctactggaaaatctgatcttccaggcatagatatctttgtttctactgctgatcctgagaaagaacctnctcttgtcactgcaaacaccatcttgtctattttagctgct

SEQ ID NO: 16841 - DNA, 337 bp, Glycine max
  Clone ID: PAT_MRT3847_115212C.1
cggaaattgttacccaactgtgagagctgattaccagaacgccgctcagaaggcgaagaaaaaccttagaggcttcattgctgagaagagatgctctcctctaatgctccgattgacatggcactctgctggaacctttgacaagggcactcataccggaggacccttcggaaccatctagcactctgccgaactggctcacagcgctaacaaccgtcttgacatcactgttaagcttttagagccactcaaggcggtgttccctattatgagctacaccgattcttaccagtaggcttgcgtatgtgccgatgatgtctcgggctggcctcaagta

SEQ ID NO: 16842 - DNA, 269 bp, Glycine max
  Clone ID: PAT_MRT3847_115213C.1
ttcgcgcgtttggcaaggacgaaaagcggtctgagtggtggagattcaaacctgatgcacgaaaggacgcacatgctgacgcattgccgtagaacgatggcaagttgccaaaaagatcttcgttgtgtcagaatgaggaactggtgctgagtatgctatcccagtgattagccctagcgcttttattgagatgctgataaaatagaggattgaaatattgctgtaagcgcctaaaacgacttgtttgttcatacaatgcacagaaggtt

SEQ ID NO: 16843 - DNA, 267 bp, Glycine max
  Clone ID: PAT_MRT3847_115214C.1
gggacacacaagtagacaagaaaaaggcgagttttcctagaaaactcccccttggctggccatgggttccctggtaaacatcaattgactgctcgattacccgctgaacgaaaacgatcaacccgtcttggtcacatagacttgcacttgcgcctccaaatttatgaggccctcacgtacaatcaaagtctgtggggtatctcaaactaaagttggcgaatggacattccccggacccactattttagcactgaggaggggatgagc

SEQ ID NO: 16844 - DNA, 634 bp, Glycine max
  unsure (1)..(634): unsure at all n locations
  Clone ID: PAT_MRT3847_115215C.1
aaaaatcatacttaactttatttttcattgattaataatataaaaatctcccaactaacaattaataaaaattaggcttaattacaattttatctcttacttccttaaaaaaattgcagattttgtgggttaaaaaatcgtcacaattaatggaaagaccggcacaaaattgattcatcctagtagaattgattcagccttcagaatcatcttcacctctcacttacgcattccctggccaactccctcacgggctcgccctacttaactctcaacaatggggaactcaaagcaaagtcggacgatgagatggacctggttctgacagcaaatgccttagtgcagaaccaatgtgcataagttgaaagtcaacagtaggtgttgtgatcctcacaaccgtagtgcagaagtttggcaacaaaagcacgtttgtcatcctcgactttggtccagcccaaatctcctgcgatcaatatttgaatgataaatattaacctgcacatatccacccaacgtaaccaataacttgattggacgaaatcaaactgaaattttcatgataggtttgggttcagtttggcatatnttcagatcctaaccaaccgtgggccttttccacataaaaaggggaatc

SEQ ID NO: 16845 - DNA, 360 bp, Glycine max
  Clone ID: PAT_MRT3847_115216C.1
ggtcgacggacgcgtccgtccagacgtcagacgactacaaaacggggacaaaatgaggatgctgatcgatgtgaattcaattcagtttgatttcccactattgtcttcgccacctttgtgcgctgcaacctcaggttggcgaggagggttcatgctacaatgaacttggtttcggtgttcaaagttagttagatgcattgatgcttgcagagatctctgatcttaagatgagtgcgtcgaagttcagtaagttcatcagcgtcggggacagtgctgtcgacaaaacctgcttgttgagttcctacaccagcagcaattttcccacatactatgtgcccaccgtttttgaaaatttcaatg

SEQ ID NO: 16846 - DNA, 678 bp, Glycine max
  unsure (1)..(678): unsure at all n locations
  Clone ID: PAT_MRT3847_115217C.1
gctggtaccgcctgcaggtacccggtnccggnnaattcccggngtcgacccacgcgtccggccatttgtcatccgggtgaagtgacatgcttcaaagaaattaatgaatcttccaaagtagcttgcatcttgcacatggattcccttagaggaagtcataaaggtctcaagaatgttttccaaagttacctatgtgaagaatggaaagagaggcacagtaatgtggtggatgatgtttcttctaaatttttacatctgagattcatctcacttgagctcccccagcaagaaaatttatatgattgtggtctctttttgctacactatgtggaacgttttctggaagaagctccaatgaactttaaccctttcatgataacaaagtcctccaactttttgagcagtaattggttccctccaccagaggcttctctgaaacgatctcatatacagaacctaatttatgatatatttgaaaataattctttgcatgcacctcctactgattgccttgacaaaggtcatccctctgaagatccttccattattgtcaatcccaaagtggaagaagattccctaagggggttgttatccagccttgtggcatgggaaaaatccttcgaattcctctactgaactggagactactgatattcagtatcccacagcttcacacat

SEQ ID NO: 16847 - DNA, 850 bp, Glycine max
  Clone ID: PAT_MRT3847_115218C.1
ctttttactaggttttttttcccccttaatctttcttctttggctcgaaactttccaatcccactggaaaggttaccttgcacgtaaagagtcaaaagaacagttattggatttgcgcttgaggatgcaaaagtctgctagaaatgtggatgacagcaagcgtctcataaacagactcttggcagcgctttcagagctacttaatatgaagagtcttagtaacatccttcatacttgttcaacattggatatggctacaggacattctaagaaatgttgtgaagaacttgtggctgcaggggctatcaacaccttgttgcagctaattcaaacagtcagccggagtatacctgaccaggaggttctaaagcatgctttgtcaactctccgaaatctcgctcgctatcctcatctactacaagtgttgatcctccgtcgtagttctgtccagataattgtcttggagttattgaggaataaaaatgagggctatttcgttgcttctgaacttttgaagaagatatgttcaactcgggtaggccttgagacgatattcaagtcccctgccctgctaaaacgattgcacagtcttgttgaggaccttacacggaagggaatttacgagaaaagaaatcctagggctcctagcctggctatcagaaaaaacagagagagaagattgaaggaggctgctgagattctgaagctgataacaagcgcctgaaactttttttccatcaagttctgatgtgaaattgtagaatatatgctaggatgtcaaagtttgtacgattctaatttacattctgtcctcaactcgtggatttggaatgagctttttttctgtttt

SEQ ID NO: 16848 - DNA, 1992 bp, Glycine max
  Clone ID: PAT_MRT3847_115219C.1
gttattgcgtccacactacacgttgtagacccatcaacttctgaaaaaaaaaagtatacatctttgaactgcgagaagacgccagaaggggcagtctcaccctgccacaacactacactagcaagcacacacctttagcacaatcaccaatggcttcttccgacagcaagcttcccctgaaacccatccctggaagctacgggcttcctttctttggacccatgagtgacagacatgactatttctacaaccaaggacgcgacaagttctttgccgaacgaattaaaaagtacaactctacggttatacgaaccaacatgccaccgggtcctttcatttcctctaatcctagagtcatcgctctcctcgacggtgtctccttccccattctattcgacaactccaaggtcgataagcgcgatgttctcgacggcaccttcatgccttccacctccttcaccggcggttaccgcgcgtgtgccttccaggacaccaccgaaccctcccacgcgctcctcaagcgcttctaccttaacttcctcgcctccaagcacgaaaccttcctcccactcttccgcaacaacctctccgaccacttctctgatctggaagacaagctggccggcaaatccggcaaggccagcttcaactcctccgtcggctccgccaccttcaacttcctcttccgtctcctctccgacaaagacccctccgaaaccataatcggctccgacggccccagcctggtccaaacctggctggcagctcagctggctcctctggccactctaggcttacccaggatcttcaactacgtggaggatttcttaatcaggtcaatcccctttccagcatggactgtcaaatccagctacaagaaactctacgaaggtctctcgacagcaggtactgcgattctggacgaagcggagcgcgtggggataaagagggacgaagcgtgccacaatcttgtgttcatgttatcgttcaacgcgcagggtgggttagtgaaccagtttccgattttgatcaagtggctaggactggctggggagggtttacacaagcagctcgcggaggagatcaggaccgttgttaaggacgaaggaggggtgagtctccgggcgttggatcagatgactttgaccaaatcagtggtgtatgaggtcctgaggatagagcccgcggtgccgttccagtacgcgaaggccagggaggatctggtggtggagagccacgatgcggcgtacgagatcaagaagggagagatgatcttcggatatcagccgttcgctaccaaggatccgaagatcttcgagaacgccgaggactttgtggcccacaggttccttggccacgacggggaaaagctcttgagacacgtcttgtggtccaacggaccccagacggaggagcccacaccggatgataaacagtgtcccgccaagaatctggtggtgctcatgtgcaggctctacttggtggaattcttcctgcgttacgacacgtttacgttcgattttaaaccagttgttctgggtcccgatgttaccatcaagtcactcgccaaggcttcttccttctgatcctcctcatcacctactctacctcaaacttaaaatcaatcttctttttaatgtgtattagttaattaataattaaataaaacaaagtaaatatatatattaaaagtaggatgtgcactggacagcacagcagtactcatgaattgccgcttgttgcattttgtgagagaggtgtgtacattatttgctacctgtaacttttgcagagtgctctctatatatataatgttaaagttttacttgttttggttggctttggcaatcaacttgtcttttttaatcaatgtattgaatttgatttgttttttgtttttgttttgaataaaacatgtgtatctgagagttttgtcttttgcatgattcattcagattaactatagattagtgcagcatgtggttcgggact

SEQ ID NO: 16849 - DNA, 315 bp, Glycine max
  Clone ID: PAT_MRT3847_11521C.1
attcggctcgagggtgcatactacagctactgcaaggacattagaatttctctaaacaaaggcatacactactttgtagtatttgtaagtacttctgtaagtgatcattgagccttgaggcttgccctgaccctggtgagcccttgggacccaatcacataaacttttcattatcaaaaaaaaaaaaatgatggatggtctgattgttctacacataacacattgatagttttcatcaaaaaaaaaaaaaaaaaaaaaaaaaaaaaaaaaaaaaaaaaaaaaaaaaaaaaaaaaaacaaaaaaaaaacaactggg

SEQ ID NO: 16850 - DNA, 1126 bp, Glycine max
  Clone ID: PAT_MRT3847_115220C.1
ctaaagagagagagaaacccggccatcagggcaacaccattccttggtctctgaatctcaaaatctcaatcaaatcgcatcccatccatgtacaaatttcagatctaaccaacactcccaaatgtcccacattcccaccgccggctacggcaccctcgccggcgccactcccactggaaccaccaccaccaccaccaccaccactaccaccttggtgactccccgtccatggcgcgagtttctagccccctccgccgcccccggctcctgacctttcagccctctcccgcccctactcctacgacgacgccatgatccgagtccgaagaaacctgagctacttccgcttcaactacgccgccgtcacgctcctcatcgtcttcctcagcctcctctggcaccctatctccatgatcgtcttcctcctcgtcctcgtcgcctggtactacttctacttctcccgcgacgtccccctcgtcgttttcaaccaaaccctcgacgacagaaccgtgctctgcgttttgggattgctcactgtcgtttcgctcgtctccactcacgtcggcctcaacgtcctgctctcgttaatcgtctcggtggttctcgttggcttgcacgctgcgtttagggttaccgaggatttgtttcttgacgaggaaagttcgttgctttccgttgtggggactcagcctatcagaacaaattatacccccatttgattatattatattcgcttccgcaaccaccatcgagttcttgacttcccccccttaatttgacaagtttaaattcttaattgagaaggcagagttcaaatttcgaagatgggtcctttgtttcggagaccagtcacttattgaaacagtgttgtaactgtgtctgtggtgaggcattgatcaacattgaattggaatttggaattaggtgtgttatgtcaatttctgtcagagagatacgggaattttctgaggaactggattggttaaagtagtgactcacaatggagttattttgcttgttcatcttgtttttcagttccttgtttagtttctatttgataagtttgagtctcttgctgctcatcctcattttttatcgttgttaatgtagctcactgatggttctg

SEQ ID NO: 16851 - DNA, 364 bp, Glycine max
  Clone ID: PAT_MRT3847_115221C.1
atgattcgtgggcaggacgctgtggcgctcaagctggggtgttggtgtgagacccaaggtgtgatagtatccggccgtccacagagtgaggcagcggtagttacaatggaaaatttcgctacacgctctctttagattcggatgacatctagtaaatattggattggagatcgatctaaatgaagcacaataatcaagggctgtgcgactctcactttaaagacatagaacccagtgtgtggccttacgtggttgacaccatcgctaaatacagcttgagatcatcgatgtagcttgggacatcgccgatggtgtgcatattgacttctgacaattccagagaaatagctactacaggctttga

SEQ ID NO: 16852 - DNA, 849 bp, Glycine max
  Clone ID: PAT_MRT3847_115222C.1
cggactcgtgggtacgaggtcatatagtattattgggggcattattgataactcaaggtgcatatatgaaattataaaaaacaacaacaacataggagatacaaagaacaaggattgattcgtatcagagagagagaagatgggaactgttacacgcagctcctctgaagtgtattcaagtgacagtgaaaaggggtttgcgatgaaccactctacttctacttccccagagctagatgcaggggcaaagtttgttcttgtatctcgaggatcatggttgcactgtgggtaccatttgactacatctattgtggctccggtgcttcttactcttcctttctccttcactttgttgggttgggttggaggagtgctttggttgacccttgcagcagttatcacattctattcatacaaccttttatctgtggtcttggaatatcatgcacagcttggccgtcgccagctacgattcagggacatggctagagatattttaggacctggatgggcaaaatactttgtaggccctcttcaatttgctatatgctttggcacagtgattggtggtcctctagtgggaggaaagagcctcaagttcatttaccagctctacaacccagagggatcaatgaagctttatcaatttattattatatgcggggtcataacactgattttggctcaacttccatcctttcactccctgaggcatgttaatatgatttctctaattcttagtgtgttggatgccacatgtgtcacgatcggttctatatacattggtcactccaaaaagcgccaccaagcattattctgtaagaagttctgatgatgatcaactctttg

SEQ ID NO: 16853 - DNA, 235 bp, Glycine max
  Clone ID: PAT_MRT3847_115223C.1
ctgcctactctcacactcactccactccattgagaaagtgggttgcaacggcatgctggtggatgaagaagaccagctgacgcttccagatctggtgaaggaactaggccaccgacttgtttactataacctcactgcgaattgccttcctgtaaaccctaactggagcaaattctgcaactccctactataatccgtccgaatgctatgaagtcgacttattgcctccgtaggc

SEQ ID NO: 16854 - DNA, 251 bp, Glycine max
  Clone ID: PAT_MRT3847_115224C.1
gagtgcggcggtccaaacactcttctctgcaacttttgcctacaactccctttcaccagtggctgtaaacaaatccgcgctacgcttgtacttaagcatccgtaagtgtttctcagcacaaaggagactgggaccggaagagacctggaataagtgacaaccgcttttggaagtccattgggcttggatttaagactcccagggaaacactcgaaagaacctatattgacgagatgtgccccttcactggc

SEQ ID NO: 16855 - DNA, 347 bp, Glycine max
  Clone ID: PAT_MRT3847_115225C.1
cacgctttctgtatggcacgttcttactcttagtcctccaataaggaaaaccaacgaagatggaggcgcctactcatgccacgatgcaaattgtggctacactctcttgatctctcttgatgagcttgtcaaagatggtgtgctcacaaaagatgagtttgccagaaccagtcgaccatgaccatgtagtcttctccactgttgctgatataaaagatcccttgatagcaaaagctgccgaaaggttaattcaaagtgatggtgatcttaaaagacagcttggagaattttgttaagaccctgaaatatcaaactggcttgaaaaaacaacttattttgctgctatt

SEQ ID NO: 16856 - DNA, 228 bp, Glycine max
  Clone ID: PAT_MRT3847_115226C.1
aatacaatgagcaatcggcttgagtaagttataacggaaaacgagggaagcttcccacaacacgcaagtgtgtgccttgaattaaattaatagaggatgaaattctagtttaaggaaggttggttggttgggtgggggtaggagatactctcattcacctcccatcatcattataatcattcattccaacctacccttattcttcttcttcaatttcacacccatcat

SEQ ID NO: 16857 - DNA, 264 bp, Glycine max
  Clone ID: PAT_MRT3847_115227C.1
agaaactcctcagagatgtttgttggatcccttgcttggtcttggactgatccctcccttttggtgggaactttgggtcccacaattactttgtggggttattagctcaagccacttaacaaaaagaagaatcgcattttgggcttcatcaaaggggacagggcctaccaagtgggcggggggtattccggattggggccgaaatcaaaatggaaggtgcatttaaacatgtttttttaacgcgaaggccttctttaaaggggg

SEQ ID NO: 16858 - DNA, 798 bp, Glycine max
  Clone ID: PAT_MRT3847_115228C.1
ttgtaggcagattttgttgtaaaaactccttagtgtcgggcttccaccaaggagatctctgctggtttggtgaatatgaacagaatcgatctcagctaggaaatcagctgccagctggatttcatgatcaaaaaaatcccttctccatgatagcttccattcccacctaccctccacaaaatctcccatagaattaattgatgagttctgctgtttacttattaaatagagctgggggtattttccttggagattacaattgtcctccatccaattatccttccagaaactgatgctagacccactacccactttccaacttaaattatcaattaagcattcattatgttgctgctgaaagatactcttcaaatcctgccaccattgggaagtgaaattcctcctaccaccagagatcagctctttccacccaccatacttagagattaagattctagaccaaggttggtctcgattgttagccagctgccacccccatttgccaagtagagccgcattaaataaggataagtctttaatccctaggccccctttgttcttaggaagacagactttgtcccacttcacccaaggaatcttgctggcctcttggtgacctccccataagaaatatctctggatggagacaattttttgcactacttttttggggatcctaaagaaggatagaaggtatataggtaaggctgagaggacagaattaatgagagtgattctgcctcccatagatagagttctttgcttccatcttgcaagtttggactcaaacttctttac

SEQ ID NO: 16859 - DNA, 282 bp, Glycine max
  Clone ID: PAT_MRT3847_115229C.1
gcaagagaattggtttgtattggaatggcttactcctcagatcctccggccttctttgggggagcctccttgccgtggaagttcttcttgatccactcggtggtgacagacttgggtctctcgatggggaagcccagagctcggtcccagaccaaagcagagaggactccgagagctcgagaaactccgaagagaacggtgtaaaagttctcctgagtcaaaccaaagtgcgtcaacagcacttcagagtgagcatcaacattgggccagggggtcttgggc

SEQ ID NO: 16860 - DNA, 245 bp, Glycine max
  unsure (1)..(245): unsure at all n locations
  Clone ID: PAT_MRT3847_11522C.1
tttattcggggaggcttggcctattaaactgctactatggaacaccttcctgctgaagtggattggaacacattatctcttctccgttctgcccgagatgttgttggctgcttctgtaacttgtaaaaaatggacggaagcatggcgcaatcacctcctctttctttgatgggctactgngaatgccccgtttttcatgactatacctctgctaggtctgaaatactcatcactcacacaatctt

SEQ ID NO: 16861 - DNA, 1064 bp, Glycine max
  Clone ID: PAT_MRT3847_115230C.1
tgcaactgattagctacttataggaatcgggcgatatgtacgagtagtagcttttgtacttctgtcctgtatcctatctcaatgtacactttctccataaaaaaaaaaaaaaaaaactcgagggaattctcaatggtgtcacaatctctgtctgaatacaactgtggcacatcgaacacgacttacttgccaacaactatgagatcacatagctttccatctgtattgaacgatgctccaggagggtctatgatgccctcaagtgaccttaatgaatgccagttatgggtacagcctggggatttaaatggtctcaaggggcagctggtaaggttgctcgaactttctggaggatgcctgcctctggcccgagttccagcagagtaccagaaactttatgggagacctctttatgtatctgaatatggggcaataaagttggtcaatcttttcaagaagatgggtgacaccatggctgtggaagggaaagggaatcgtaaatttgtgtatctcggaaactggaggacaggcccaagtgctcctcctctctctctggcaaagaaagataagaaaggaaagggagcccaggaagagaatatgaatattgtcactggtggatgctcttcagatgagttctcagatgaagaaagagtagtcatcgaagaacctgatgaaagcagttgcataggaaagggcaatcagggtagagccgccaaatgtgaagtcgatgaccattttatcgagcaattcaagtatgagctgcaagagattctggtaagctattcttgtcgcatattcctaggttgtttcgaggctatataccagcagcgttacaagaaacaactggaatatcagagatttggtgtggacaagttggaagatttgtttgagaaagtgagtgatgtggtggtactgcatgaggaaccagtaagcaagaagaagttcctggctgctgtaggtggttagaaaactcagcaacggactgcatctactttaaccattctgatgttttaaacttatgcttaggaattacttgttctctctagcaacctcatccttttctg

SEQ ID NO: 16862 - DNA, 283 bp, Glycine max
  Clone ID: PAT_MRT3847_115231C.1
gataggattaacatgataaatagttgtattgggatcatgaaattatgattgaaattgtgtataagtgataaattaaatatgtgatgaattgcaggataacatggtgctttgaaattataatattggtattgagattgagtataagtgcaaaggtgaacatgtgttaatttgggagaaacacctaaacattggaaggggggttgggacattatgagatgttaaactggggacatgaaatctgggtgggaataaatgtgtgtttaacacttaatgtgacaatact

SEQ ID NO: 16863 - DNA, 153 bp, Glycine max
  Clone ID: PAT_MRT3847_115232C.1
aaccccccctgtcccggcgcattaaacactcgggccaacgggggttacacccaatttgacccttaaactccccagggccctaacccccgctccttatactcgggtccctacctatctccccacatcccccggccttcccacaaaaactcaaaa

SEQ ID NO: 16864 - DNA, 242 bp, Glycine max
  Clone ID: PAT_MRT3847_115233C.1
aacaaatcataatatttggatgtaagatgcatggagtacccaaacatttttttttctttggggctaaaccttgaacaaaggcaaggggcaaattaccaatttctttttaacctatgaccgatcggcctgccggaaaagtactatttacatacaacttgaaaacaaggaagcgattacaatttaaaaaaaaacgtccaacaccctcaaaaaaagggggaaaacattttaaaaatgcatttgaa

SEQ ID NO: 16865 - DNA, 435 bp, Glycine max
  Clone ID: PAT_MRT3847_115234C.1
gatagaggcgtatctagtgattccctaagattcctgaggcttttcctttggttgctctgctagggtttccaagcgttaacgagaaggagaagagattggagccttagtttcactatttttgtgtgaggggacatttctctctctacagttattattttgtaaattccaatggttggaatgtaagggattgaattccaaagttggtgtccaaatttcaggatgatccaacggttaatgagtccaggattatagttttaccaggacaaatttgggtgtatgcagaaaaaattaaagggttttggaagaggaagaagggataacaaatttatgaagaagaagaaacatagaaacgcatcgtaaatgtaaaaactaacctaatatgtctctatttatagctgggatactctgagtctattatttactcaatttttcttt

SEQ ID NO: 16866 - DNA, 471 bp, Glycine max
  unsure (1)..(471): unsure at all n locations
  Clone ID: PAT_MRT3847_115235C.1
tattttttttttttanacannacnaaaaacaccacccatcgggaccggttatgaaataaacaaggagaataaccaccccaagcctgaaaattgcgagcaagggggagccaaaaaaggcaacgggccaattccaccaagaatgcgacctaaaaaaaaacctgagacgctaaagcattacaacttggaccccccattccattctcacaggacaataattccccggcacaagaatcttctgagatcactagcaatcccatgcaacaaaactggcttacggaaaactccataaataccaactcgcatgcaactgacccacaaatcttcatccgcacttgcagtcaaggcaacaataacaggccggctcccaccacaaaacatacgaacccagggggcaccatccaaaccgctactacaggccacccaagaaccaaaagaatgaccatcgaaagaagaacccccagggcccatgac

SEQ ID NO: 16867 - DNA, 127 bp, Glycine max
  Clone ID: PAT_MRT3847_115236C.1
tcataagataaaagcgacagcggcgtcgatgcacactaatgcggtggacgtgaacagcgtaaccagcgttgggggaattattgctcacagactcaacttagttggctcaacactcgatactcttaca

SEQ ID NO: 16868 - DNA, 169 bp, Glycine max
  unsure (1)..(169): unsure at all n locations
  Clone ID: PAT_MRT3847_115237C.1
tcncntgcncgcgtacgtaagctcngaattcggctcnaagnaattntcntgaatccaantatttctgctgcttctgttatngctgctgggttggccgtaggcttgcctctattagacctncggttggtcaaggcactgctncngggcaagctgtagaagggattgcacg

SEQ ID NO: 16869 - DNA, 403 bp, Glycine max
  unsure (1)..(403): unsure at all n locations
  Clone ID: PAT_MRT3847_115238C.1
gttctcccttttcctcgcgatgcataatcttgtgtgcttgatttctgttgaacnncattaaatcattctgtgtatatgaaacagcgctttgacaactaacaggaataagccnnnncgaacaattaatgacaactaacatnnnntgccagatttcctatcatacaagcaaagaacttgattgttatccacattttaaaccaccaacattgctaaagagtgttatctgcaacctatcccttctatgattgttacagattatggacatgttgatgatctttactatgcactgagtgnnttgttacattgtgtgaagcacctannatggggcttgaataccagttattnnctctggtatctatattatgtttaggttgcatatactaagatacagcctgatgctcat

SEQ ID NO: 16870 - DNA, 349 bp, Glycine max
  Clone ID: PAT_MRT3847_115239C.1
tttttatattttttttttccgagaagaaaggcagcagataccaattttatttcatcaattgcagtatgcatattgtatcctttaatattacaataagacttttttccctcacatacaacacttactttggcatcttttgttgccaatgatctaatcttgtgcattcctttgtgttcgaataattgtgctttttttgggcatggaatctttatgccggggaagcatttgcatcaagactttttctcccagtttccttaattgtttcagtttcgtttttatcaatgctcatcttcaaacttccttttcctaccaaagtttttccatttttttgtcaaattttttgctgagt

SEQ ID NO: 16871 - DNA, 468 bp, Glycine max
  Clone ID: PAT_MRT3847_11523C.1
ggcgttgtggtctgataccgatgccacaaataggctaggctgcttgatgtctatagaacacaaagaccggcgtactgcttgtggactacatagggaagatctctggccacatgacaaggatcgtcaagtaactgcaacccagggaataaaatacgctcgcatgagacatgcaagtaatatactttgaacctatactagaacgaatctttgaatactgatgagaccgggcaggttacgatgcccactaaatgcgatcgcactcaggacctatatctttacccctaacatatatgattatgcttctcacaagttacagatgcaagaagacgttgactgataaaggtgtgacttgtgccagagacagactcattagaccgcaactgttctcaatacccaactataccatcattgtgcttctctctaaaaatctacctagcttggactccctttgctttataagaaaaacgc

SEQ ID NO: 16872 - DNA, 2260 bp, Glycine max
  Clone ID: PAT_MRT3847_115240C.1
ggtgcattgctgaagaagatataggaagacatggaatacctgtcccatcagctatgggaaatgcaactgctagcagaggattagaagtagcagttgctaatttacaggactactgcaatgaactggagaatagattgctttctcggtttgatgcagcatcacagaaaagagaattgaccacaatggcagaatgtgccaaaattttgtctcagtttaacaggggtacaagtgccatgcaacattatgtggcaacacgtccaatgtttattgatgtggaaataatgaatgcagacactaagctggttcttggtgaccaggctgcccaagctagtcctagtaatgttgctcgtgggctttcctccttgtacaaagaaatcacagatactgttcgtaaggaagctgcaacaatcacggccgtattcccttcaccaagtgaagttatgtcaattttagttcagagagttttagagcagcgaatcactgcccttttggacaaactgttagagaaaccatctcttgtcaatttaccttccgtggaggaaggtgggctcctattatatcttcgaatgctggcagtggcgtatgaaaagacccaagaactagcaagagatctacaagctgtaggatgtggtgacttggatgttgagggtctaacagagtccctattttcaagtcacaaggatgaataccctgaatatgagcaggcatctcttaggcaattatataaagtgaagatggaagaactgcgagctgaaagccagcagatttctgatgcatctgggtcaattggacgctcaaaaggagcttcagtagtttcttctcaacagcaaatatctgttactgttgtaacagagtttgtgcgttggaatgaagaagcaatctcaagatgcaatctctttgcttcccagcctgctacacttgcaacccatgttaaagcagtgtttacttgcctgctagaccaagttagtcaatatatagctgatgggcttgaacgggcaagagacagcctgactgaagcagctaatttgagggaaagatttgtgttgggtacaagtgttacccgtagagtggctgctgcagctgcatctgctgcagaggcggcggcagctgctggtgaaagtagtttcagatctttcatgattgctgtgcaacgttctggaagcagtgtagctattattcaacaatactttgctaattctatatctcggcttttgctccccgttgatggtgcacatgctgctgcttgtgaggaaatggctacagcaatgtcaagtgcagaggctgctgcttataaaggactacaacagtgcattgaaactgtcatggctgaggtggagcggttgctttcagctgaacaaaaggctacagattatcgatcacctgatgatggaatggctcctgaccaccgggcaaccagtgcctgcacaagagttgttgcttatctttctcgtgtgctggagtctgcatttactgctttagaaggccttaacaaacaagcattcctgactgagttgggaaatcgcttgcacaaggtgctactaaaccattggcagaagtatgaatcactttggagtggggggttgcgactgaagcgtgacattactgaatatggagaatttctgcgtagtttcaatgctccgtctgttgatgaaaagtttgaattattgggcataatggccaatgtatttattgttgctcctgagagcctttcaactttgtttgagggcacacccagcatacggaaagatgcacaaagatttattcaacttcgggatgactacaaggctgccaaacttgcgtccaaactaagttccttgtggtcttaacaaaatccggcttgtgatctaaaatcttcggggatgactacattcacctgtttattggctatgggcactgacgcttgaactgaattcatttggtggtgttagaagagtgattaacaatttgttctatacaaaattataggttattcaatggccgttttagtagaattgagtgttctttcttgctgaatatttggaggcatgaataggaagggagaccatgtagatttgtattttattttattttattttataatgcatagttttcctttgtgaatgtagttgtatttttatgtttgcggagttgttgatttttggtgctaagtggatcgtgcttagaccgagtaaatatagccaatacttggatacgtcgtgtaaattagtttcactctgtcgtctatggaatgcagtgtttcattatcatggtaaaaaaaaaa

SEQ ID NO: 16873 - DNA, 370 bp, Glycine max
  Clone ID: PAT_MRT3847_115241C.1
cgggttcgcaaaaagacagagggataatggtggcgtatttgggagggatgactaacgaagctcataacctatatcagccccaaaagaaagaataggtagagggaaattgttcctttgctattaaatctagctctatattgtaaaaagtctcctctacaaaagcacaatggggtagggtaaaaacctcctactatgaaacacttggcgctggatcacattcttcaggagattttgctgtaaaggaagatcatcgaaaaacccataaggacagataccagattgagacatagacacgaccctcaatgcaacgcggtgcactcccacatggaaacagagttggttaacttggctcttgacgacatgacatctc

SEQ ID NO: 16874 - DNA, 634 bp, Glycine max
  Clone ID: PAT_MRT3847_115242C.1
tttttttttttttttaaaataatttaatttttacttaaaaaattattgtacttcaacataaattaaattcatttatttatatatcatacacaataaaccctctgtaaaattattgccgatggtttggtggctgattaaaggtgcttcacacgtttgaggcgctgaaacttttgtggagttcacaccttgaataactgtagcacacatatttaccgtccccaccacatcctagaggccatataaatgtgataataataataatgatctaaactaaagcaaccaaatccacccattctgctccaccgagctcacaattcacaacaactccacttagacttttaaaaggttaatacaaattaaaatactaaagactaatataatcaacatactttacaaagattaacataaatttttaacattatatatcaattaccaaatttcttgggaataaactaagagtgtactcccctacaaagatatcttaatatgaaaatgacaattgattcagatgtttaaaccaaatctagtactatcaaagaaaacattttgaccagtcgatgaaaaaccatctcaattaactattataataagtgtttttccgaaatcatacgatgatttcgtggtgatggcccgg

SEQ ID NO: 16875 - DNA, 650 bp, Glycine max
  Clone ID: PAT_MRT3847_115243C.1
ccaatttgttggaagggtgcaaagtttttcgaatcgttaaatgatgtcaaaaaatatttcaagcccctagcattgagtttcaaaaaaatcatgaatttgcagatgcccctaccaccagaatttattcttattatcactatcgatggcaatgtctgcttggggattctagatggcactgaagtaggactagaaaatctgaacataataggagacatcactttacaagataaaatggtgatttatgacaacgagaaacagcagattggatgggtttcttcaaattgtgataggcttcccaatgtggatcgtgatttggaaggtgattttccacacccatatgcaacaaatttgggtatctttggggaccgttgccctgcatcatatgaagaaacaggctgtgaatgaattgctagggaaggagggtgcttggatgtacattaaatagcatgtataattccatatagtacaacatatatatacatagatatttttgtcaccttacaatattttatgcttcataagctacattttgtgaatttgtaaatgataacttccaaacgatacaagctacagttactgatccttgcttgagaaaaaatcatgaagctgaggggcctcaattcccatcagtagcaagtagttattcgcct

SEQ ID NO: 16876 - DNA, 215 bp, Glycine max
  Clone ID: PAT_MRT3847_115244C.1
gcagactgaggtccctgtttatttaccggttgctggcctgggattgtttgtagtttctacaggctttctgcattccttattttgtgaaccccttccttaatcaccaaagctaggattgacagggaaagtctttcttttgctttgaatctctctgatttcccactgtgcctgattcttctgtcttcctcttttgctttttaggggtcatgggggta

SEQ ID NO: 16877 - DNA, 304 bp, Glycine max
  Clone ID: PAT_MRT3847_115245C.1
agctcgattcggtgagcaaatattgataaaggtctagctgaaggaaatttttttgatactggggaggttcccttagcttttagggaccgtgcatactaatgttttgggaattgcaggtgaaggcttatgctactgtggacttgggacccacctatagggaccttaagactcggggcaggtcctgtcgattattaaccgacaatatcacagatgaaagagatttggaattcagtgaatggaaaggggggaactcttgttagattctttttttgtacagagacttttgtgcgactatactatatcc

SEQ ID NO: 16878 - DNA, 200 bp, Glycine max
  Clone ID: PAT_MRT3847_115246C.1
cccacgcctccgcccacacctccggaagatagtaatatacacttacggattctacagagcaagaaccatttgtaactcgcagtacgctcgtatctcactaatataaacgacaaatacattgacagacacaacactttcgattcataacaatttcaccaaacagttgcctttacagaacaaagcatctactccaaatatca

SEQ ID NO: 16879 - DNA, 589 bp, Glycine max
  Clone ID: PAT_MRT3847_115247C.1
gtcagaggcattttggcaggatagacagacttgttagaagcacatttttgttagactacattctatcgggaatgtcagttattgaaccacaagttcaaccgacagaatcaaaggctgagttactgttgcagtctgaaattgacattccagacaaagaaaatggcatcgagaagaaagatcatactcatgaaattaccgcttcaaagaaaaggaaatcaaacaaatcaaaacatggttcccataagaaagttaagaatgtagcttacaacaaggtcgaatctatacaattacaggcataggattggtgctttcattatctcatgtatacatatgttgattgatcgatggaagagctgtattgattcatccaaattttgaaatcttgctgtcatttgataaaatgtaagccaaagtaagttttttcggtcctgctcatcacgtgatgtagaaatgattcttcagctgtcttaacaaaagaaagttattgtgattgagagactgctgaggggctgcaagatagcatgagaacaacaaacagttctgtaaactaagttgtggcaatcgtagcaattttgacccccatattgtc

SEQ ID NO: 16880 - DNA, 1519 bp, Glycine max
  Clone ID: PAT_MRT3847_115248C.1
ctgcggacgcgtgggcggacgcgtgggtaaattctgtagctgttgctccaaatgatagtttagtatgtagtggttctcaggatcgtacagcttgtgtttggagacttccagatctagtatctgtagttgtatttaaaggtcataaaagaggaatttggtcagtagaattttctcctgttgatcaatgtgtagtaacagcatctggtgataagacaataaggatatgggctatatctgatggctcctgtttgaagacatttgaaggacacacttcaagtgtgttaagagcattgtttgttactcgtggaacacaaattgtttcttgtggtgctgatggcttagtaaagctgtggactgtaaaaactaatgaatgtgttgctacttatgatcatcatgaagacaaggtttgggccttggctgtaggcaggaaaacggaaaagcttgcaacgggtggcggagatgctgttgtcaatttatggtttgactccactgcagctgacaaagaagaagctttccgtaaagaggaagagggagttgtgaaaggtcaagagctagagaatgctgtctcagatgctgactatactaaagcaatccaaattgcatttgaactgcgcaggcctcataggctttttgagctatttgcagaactttgcaggaagagagaggctgaagatcatatggacagagcacttaagggcttggatagtgaagaacttcgtatattatttaactatgttcgagaatggaatacaaaaccaaagctttgttatgtttctcagttcgtgcttttcagagttttctgcatctttcctccaacagatattgttcagattaaagggattggtgaatatcttgaaggtcttatcccgtatagtcaaaggcattttggcaggatagatagacttgttagaagcacatttttgttagactacattctatcaggaatgtctgttattgaaccacaagctcaactgacagaatcaaagactgagttactgttgcagtctgaaattggcattccagatccggacaaagaaaatgacactaatgaaattaccgcttcaaagaaaaggaaatcaaacaaatcaaaacatggttcccataagaaagttaagaatgtagcttacaacaaggtcgaatctatacaattacaggcataggattggtgctttcatcgtcttctcatgtatacatatgttggttgatcgatggaagagctgttttgattcatccaaattttgaaatcttgctgtcatttgataaaatgtaagccgaagtattgctgtcaattaagaagatgtaagcatagccagccactgtaattgtatcagtatttattctttcatgtaggttggttttcctgtcctgctcatcacgtggtatagaaatgtttcttcagctgtcttaacaaaagaaagttattgtgagagacgctgaggcgctgcaaagatagcatgaaaaggcaatcgtagtaattttgatccacataattcttattaaaaaaaaaaaaaagggaatt

SEQ ID NO: 16881 - DNA, 383 bp, Glycine max
  Clone ID: PAT_MRT3847_115249C.1
aaaggaaaggggcttttttggtaacgacattacctatatatatatatatttcactacccaattttaattaaaaatggccttggggttcacattatttaccttaaaaatgcggttacaagacctatacccagttcctttggaagctcatccccaacggggacaagagtccagacaacacgaaaaattgcatttgccacaagggcctttctccatgtgccaacctgtggcacatcatttaaccatggttttttcggtgccctttgacataacaaaacataaagcccccaagggagggaaagagggccaccaagcccttcttatccaagccatgtatatgttggtaaaacaaagcccaatagcgcatttttttcaaaagcaccctg

SEQ ID NO: 16882 - DNA, 322 bp, Glycine max
  Clone ID: PAT_MRT3847_11524C.1
atataaaccggcttaatgaacggtcgattggatacactaatgacgttaaataattgcctacgtataaatgtacaatgaatttaatgtttttatgtgcatatacagagagatacaactttatgtacagagagcttaacgaagggttaagggaggggagacctacactatatgttgacagcaagtcccatcggaaataacactttaatacaatttctacacaccttttaaaaaccatgtgaagagttttacaatgtggcggaaccgcccataacaatggcagtgcgaccttcatggttagatttttatgttaatcacctttgct

SEQ ID NO: 16883 - DNA, 406 bp, Glycine max
  Clone ID: PAT_MRT3847_115250C.1
cacacacacgacaccatcaacccaaaacaaagaaacaatggctctgagattcgcagcagctgcttctgcttctgtctcacgaatatcaaggccacaaaacccaccattcttttcacttcaacaccgcaacaacggtactctcaaattccatagcccaccttttcatcatccacttcccacaccctcaaaacgctgcaacgttcgagccataagcgaggtagctgtggaacctgaaatttcaaagaaagaacaaaatgagtcacctaaagattggaagattaaaatgctctatgacggagattgccccctctgcatgcgcgaggtgaatatgctaagagagaggaataagagttacggcacaatcaagtttgttgatataggttctgatgaatactctcccgaggag

SEQ ID NO: 16884 - DNA, 188 bp, Glycine max
  unsure (1)..(188): unsure at all n locations
  Clone ID: PAT_MRT3847_115251C.1
gccntttcggagtntanagttaattnagaaattcnntgctacaactaagaggttactagttactgctatacntcgtgtnatnnatttnattgattngaatttnaagaangtcnngtngnaatactatatatagtaataataatgtgtagctgcatgatgtttattataataagnnanaaaaaaaaaaa

SEQ ID NO: 16885 - DNA, 325 bp, Glycine max
  Clone ID: PAT_MRT3847_115252C.1
gtacgcctcaggaattccaggctcgaccgacccgtccgttgcgaaacgacaacacaacggggcggaggtaactttgctgattgagacaactattatcagtgtgagtttgatgaacgtccttgatttcttcgcttgcagcattcaggtatcagggcaaggccatgcgtatcagatcttccactcgtcaagtgaacactgcttcaaggggccagtacaccagaagttaaatgcgcaagttggaagcatgctgtggcagtatacaggaactttgactttcatatcaatcctgactattgcattgatccaaaataggcatacatccatg

SEQ ID NO: 16886 - DNA, 369 bp, Glycine max
  Clone ID: PAT_MRT3847_115253C.1
ctatatagaagagcttacgcacttcttcgcgtcgaatccgtagcctctggtcttctagcacgtggttacacaacgctacatcactcgttcgaatggatgtggaaatctgctcgcgggggaccacactaagcaccgacactctccgaggccgatctccatctgtccagtcatggggcagagagttatagccccagattacagaggctgcaagaaatactggcttagcacagcactgatgtgcccttattgtaactccaccggcgctgactatagcaaattccgtttcatctgcaccgctcgtgacgctgtccatgaagttaaagcggtgactgactcatgctggaacaaccttggtattgcaggtgatac

SEQ ID NO: 16887 - DNA, 257 bp, Glycine max
  Clone ID: PAT_MRT3847_115254C.1
tggcttggaacctttgggctgatttatgtgcttgtttatgtgcttgctccactttctcaactatctcagtcgtcgtaaaccctcatcgcctcctaatggtcctcgtagacgccgagccttgccgtcccggcggcgggtccgtccgggctattggcaatgacgtttctgagaaagttcccctaactcatggtgatactgccgaactgaaggccactaatgattgcgatatcgaaaggcttaaatgacctggacccgcg

SEQ ID NO: 16888 - DNA, 1417 bp, Glycine max
  Clone ID: PAT_MRT3847_115255C.1
gtatagagacgaggagccgaagctggagtttgaagatcccactttgtatcattatgcaatattctcggataatgtaatagctgtgtcggtggtggtgagatcagtggtgaagaatgcagtggaaccatggaagcatgtttttcatgttgttacaaacaggatgaatgttggggcaatgaaggtttggtttaagatgaggcccattgacggtggtgcatttttagaggtgaaatcggtggaggaattcacattcttaaattcatcatatgtcccgatcttgaggcaacttgagtcagcaaaaatgaagcagcggttcttagagaatcaagctgataatgccacaaatggtgcaaacctgaaaaatacaaagtccctgtccatgttggatcaccttcgattttatttgccagagatgtatcctaacttgtataagatcttacttttggatgatgatgttgtggttcaaaaagacttgacaggtttgtggaaaattgatttggatgggaaggttaatggtgctgttgagatctgttttggttcttttcaccggtatgcccagtacttgaatttctctcatcctttaatcaaggagagcttcaatccaaagtcttgtgcttgggcctatggcatgaatatatttaatctcgatgcttggaggcgtgaaaagtgtacagataattaccactattggcagaacttgaatgaagaccaaactttgtggaaagcagggaccctatcacctggtttgatcaccttctactccacaaccaagtcactggacaaatcctggcacgtgcttgggctaggatacaatcccagcattagcatggatgagatcagcaatgctgcagtcattcattacaatggagacatgaaaccctggcttgatattgctttgaaccagtacaaaaatctttggaccaaatacgtggacaacgatatggagtttgtgcagatgtgcaattttggcctatagttgagatcaacacgcagctgtcatcatgataaaagcttgagataacatgacaattgttgtttaccgtattcttttggagctgagaatctcaagttaaatgtagcctgtcacagaaaagttctgtgttgtcatcaagttaaaaatctcaagttcagatgctaggcaataattttgatagactatatttggaaatttacacgaagtggttgttttttctccttctgtattttggagcatatttatcatgtattcatttgctgatgatggtagtgtcataactctaattcacgagaaagcactacctcttatctatttaacacacctattacatgttatttcttgtacgtttctggacatggttttttgtatttccaatactggtaaagcttatcatagagaaatgccatgtggtgctgtgatttttcaaaaatttgaaaaaaa

SEQ ID NO: 16889 - DNA, 141 bp, Glycine max
  unsure (1)..(141): unsure at all n locations
  Clone ID: PAT_MRT3847_115256C.1
angtncaaggagtcggtnngctccggcttcggattgagggattctgagnnntgaatctttaanttntgcttcntggcnncagaccatntcgtgactgtgaacgntgtngtggntaanatggcatgntggcntctttgcgnc

SEQ ID NO: 16890 - DNA, 2122 bp, Glycine max
  Clone ID: PAT_MRT3847_115257C.1
gcaacccgacccgcgcaccggcaagggtgtttcaatcgaacgcgtcaagcgagtcactcacgctcttttccttttcataattccaaatggcttcgtctactctcatctgtgacactcagcaatggaaggagttaaaggctcatgctgaggatgtagaaaagactcatttacgtgatttattgagcgatgatgagagatcccagtcaatggtggttgaatttgatggaattctattggactactcaaggcagcaagccactcttgaaacaagggaaaaactcttcaaattggcagaggttgcatccctcaagcaaaagataaaccagatgtacaatggggagtatataaacagcactgaaaatagatcagtacttcatgtagctcttcgtgctccaagagatgctgtcatacagagtgatggaaacaatgttgtccctgaagtttggaaagttcttgacaagatccaggagttctctgagcagattcgcaatggttcttgggttggtgctacaggaaaggctttgaaggacgttgttgcaattggtattgggggaagcttcttaggtccactgtttgtacacactgcacttcaaacagaccccgaagctgttgaatctgcaaggggtcgtcagctgcgctttcttgcaaatgttgatcctattgacgtggctagaaatatcacaggattaaatcctgaaacaacacttgttgtggttgtttcaaagacttttacaactgctgagactatgctgaatgctcgaactcttagagaatggatttcatcagcacttgggccctctgcagttgcaaagcatatggtggctgttagcacaaatctcacgcttgtggaaaagtttggtattgatcctaaaaatgcttttgcattttgggattgggtcggtggtcgatatagtgtctgcagtgctgttggagtattgcctttatccctacaatatggtttctcagtaattgagaagtttttaaagggagcttccagcattgatcaacatatgtattcacaaccatttgaaagaaatctacctgtgcttttgggaatgttgagtgtatggaatgtctcatttcttggatatcctgcccgggctatcttaccttattctcaagccctggagaaatttgccccacacattcaacaggttagcatggagagtaatggcaagggtgtttcaattgatggtgtccctctaccatttgaggctggtgaaattgattttggtgaaccaggaactaatgggcagcatagcttttatcagctcatacatcaggggcgtgtaattccttgtgattttattggagttgtgaaaagtcagcaacctgtctttctaaaaggtgaagtggtgagtaaccatgatgagctaatgtccaactattttgcacagtctgatgcccttgcatatgggaagacagctgagcagctgcaaaaggagaatgtttccccacaccttattcctcacaagacattcagaggcaatcgaccttctctcagcctactgcttccatcattgaatgcttataatattggacagttgttggcaatctatgaacacagaattgctgtagagggttttatttggggaatcaattcttttgatcagtggggagtggagcttgggaagtcactggctactcaagtcagaaagcaacttaatgcatctcgcacaaaaggagaaccggttcaaggctttaacttcagtactactgctatgttgacaagataccttcaggcaagtgcagacgtcccggctgatcttccaactcgcttacctcagatttaactgtcttttttgaggaatgttattttttttatattttaattggatcaaagtcatcttacaaatctcactcatataagctgttaaacagcatccttcaaacttttgtttctgggctacttattgagtaacttctagtacatcatccttcaattttgttttgaaatgatgtcctaaaaaaaccattgctcaatattttgttggattttgaaaggcattgtttaatttgtcataagagttcatgaaagtctctcaatttgttgatgataaaaaaaaaaaaaatctggtcttatagcatgaccaaaatttagtaactggtttagcacgatact

SEQ ID NO: 16891 - DNA, 604 bp, Glycine max
  Clone ID: PAT_MRT3847_115258C.1
tgccccatgcatatgggaaggcagcagagcagctgcaaaaggaaaatgtttccccgcaccttattcctcacaagacattcagtggcaatcgaccttctctcagcctactgcttccatcattgaatgcttataatattggacagttgttggcaatctatgaacacagaattgctgtagagggtttcatttggggaatcaattcttttgatcagtggggagtagagctggggaagtcgctggctactcaagtcagaaagcaacttaatgcatctcgtactaaaggagaaccaattcaaggctttaatttcagtactacaacaatgttgacaagatatcttcaggcaagttcagatgtcccagcggatctgtcaactgttttaccgaagatctaagcacctttttgcagattgttattgatgctgaattaataagaaaataatctggtgaatcttgtatatgctatatatacagcatgactacgacatgtttattaactggtttagcacgatacttggttatctttttctcttgccgttgagttatgttctgctgaaaagtgaaaagcattttggattctaaatttgtatggagcttgccctctgac

SEQ ID NO: 16892 - DNA, 227 bp, Glycine max
  Clone ID: PAT_MRT3847_115259C.1
gccacacgttcggctggccagatcaaagtacaatgtgacgcgttataaacagcttgtacatgtgctatagcttctaaccgatctgagatggctgaataggggatagagtgctatgctgtacttagtgaagaggatatgatgagctacataatcttgaaagttgcctgtgcttgatacaatgcaaggtgcaaggtcaatttgcacgtatactatcaggcgtatacatt

SEQ ID NO: 16893 - DNA, 1928 bp, Glycine max
  Clone ID: PAT_MRT3847_11525C.1
gccactgctgccaaagaaccacaaaaaggaggggtccactttgttctttcttttgttatgcctcatggctgcaactgcaaccgcaaaaaccaacaatgacaacaaccctgaaataacaagggaggaaatccaaactgccatagccaaagcagtggaattaagggcccttcatactgcattaacacaaggaagtagtccaggcacaaacaatgctagatttccgtcaccttccccggcttctcacttctccgcccaagactaccctgtgttcacaccaagtgatgacaactaagaccaacaacccacagatggcaagcgagtgaagccaaaggagcatagccgatgccggggagttaagagcccatggtgcaaccatactccaagaaagtactacagtcccgattagccgtccatcactctcacatgtcccttgttgatcatgttgccgaatctgtgactgctttttcagcaaacctcatcacggttctccaaacatcaacgccgcccgccgcggaccactactccaaagccgtgagggacaatggtggggcgggcacgaagcagcccctttccccccgcagttgacaaggccctgttccaataaagagggggcctaacattccgagtcccaaagctcgatcctcaattgttgtcctcctcacaggctcccatgcctctttccagatccagtgaagaactaaagagcggatttcaaggctgttccctaggttgaagaagaagcataataaaaatgagggttcccaacacagaacggaatctgaggaagtctctcaggttctcaaggacatggggatagtgtcagttgaggcactgaagagggaactgatggatgcaaatgagagtagagatgctgccttggtggaagtttctgagatgagatcttcacttggagaactgaaacaaaagttggagtacttggagagttactgtgaagagttgaagaaagctttgaggcaagcaatactcacaagagaaaccacattttctgaaaagcttaatagccctcctcagagaggaacaccaccctttgatgggaatggggaaaatttgatgcctgtgggtgaggatgttatggttgagggcttcttgcagatagtgtcagaatcaaggttatcagtgaagcaattctgcaagacccttatatgccagattgaagaaactgatcattctttgatggacaacttgaacttgcttctccaaccatataagctctccttgaattccaaatactcaaaggcagttctataccattttgaagccttcataaaccagtccttctaccaagactttgagaacagtgtgttccaaaagaatggctgcacaaaattcttagaccctaggcaagatcgccaagcacaattctcatcctttgtcgcgcttaggaatttgagctggagtgaggttctcagaaagggtactaagtattacagtgaagagtttagcaagttctgtgaccagaaaatgagttgcatcattactacactgaattggactaggccttggcctgagcaactccttcaggctttcttcgtggcagcaaagtgcatatggttgctacatttattggcattttctttcaaccctccattgggaattttaagggtggaagagaatagaagctttgatcctcactacatggaagatttggttactgatagacagaggtcacaaggtccaagccgggttaagatcgtggtggtgccagggttctatgttcaggatatgatcttgaggtgtagagttatttgcaggcacaaatctgcaccataaattaagtgaaatggaacttggaaattgttttaatttcactgtccattttatttagattctctcttctctgtaagtttgtaaaatccaaatgtatccggtaataaagtataatcgctcaaattggttaaaaaaaaaaa

SEQ ID NO: 16894 - DNA, 626 bp, Glycine max
  Clone ID: PAT_MRT3847_115260C.1
ctcggctttgacagagtgcaagacgatgacttgcaaaatgtcgcagctggaacgcaacatagagaccatcatcaacaccttccaccaatactctgtgaagctggggcacccagacaccctgaaccagggggaattcaaagagctggtgcgaaaagatctgcaaaattttctcaagaaggagaataagaatgaaaaggttatagaacacatcatggaggacctggacacaaatgcagacaagcagctgagcttcgaggagttcatcatgctgatggcgaggctaacctgggcctcccacgagaagatgcacgagggtgacgagggccctggccaccaccataagccaggcctcggggagggcaccccctaagaccacagtggccaagatcacagtggccacggccacggccacagtcatggtggccacggccacagccactaatcaggaggccaggccaccctgcctctacccaaccagggccccggggcctgttatgtcaaactgtcttggctgtggggctatgggctggggccaaataaagtctcttcctccaaaaaaaaaaaaaaaaaaaaaaaaaaaaaaaaaaaaaaaaaaaaaaaaaaaaaaaaaaaaaaaaaaagggggg

SEQ ID NO: 16895 - DNA, 2015 bp, Glycine max
  Clone ID: PAT_MRT3847_115261C.1
ccggattaccggctcgacccacgcgtcggcttacatggaacgcacaaagcgagtcactcactcatggcatcctccgctctcatctccgacacccagcaatggaaggacctcaaggcacatgtggaggacatcaataaaacacatcttcgcgatctattgagcgatgataagcggtgccagtccatgctcgttgaattcgatgacattctgttggactattcaaggcaacaagccactcctgaaactatccagaagctatttgaattagcggaggctgcatcgctcaaagaaaagattatccgcatgtacagtggggaacatataaatagcacagaaaatagatcagtgcttcatgtcgctcttcgagcttcaagggatgctgtcatacagagtgatgggcagaatgttgtccctgaagtttggaaagttcttgacaagatccaggagttctctgagcagattcgcaatggttcttgggttggtgctacaggaaaggctttgaaggacgttgttgcaattggtattgggggaagcttcttaggtccactgtttgtacacactgcacttcaaacagaccccgaagctgttgaatctgcaaggggtcgtcagctgcgctttcttgcaaatgttgatcctattgacgtggctagaaatatcacaggattaaatcctgaaacaacacttgttgtggttgtttcaaagacttttacaactgctgagactatgctgaatgctcgaactcttagagaatggatttcatcagcacttgggccctctgcagttgcaaagcatatggtggctgttagcacaaatctcacgcttgtggaaaagtttggtattgatcctaaaaatgcttttgcattttgggattgggtcggtggtcggtatagtgtttgcagtgctgttggaattttgccattatctctacaatacggtttctctgtgatagagaagttcttaaggggggcttcaagcattgatcaacatttctattcgcagccatttgaaagcaatatacctgtgcttctgggtttgttgagcatatggaatgttacatttcttggatatcctgccagagccatcttaccttatagtcaagctctggagaagtttgccccacacattcaacaggttagcatggagagtaatggaaagggtgtctcgattgatggcgtccctctaccatttgaggctggtgaaattgattttggtgaacctggaactaatgggcagcatagcttttatcagctcatacatcaggggcgtgtaattccttgtgattttattggagttgtgaaaagtcagcaacctgtctttctaaaaggtgaagtggtgagtaaccatgatgagctaatgtccaactattttgcacagtctgatgcccttgcatatgggaagacagctgagcagctacaaaaggagaatgtttccccacaccttattcctcacaagacattcagcggcaatcgaccttctctcagcctactgcttccatcattgaatgcttataatattgggcagttgttggcaatctatgaacacagaattgctgtagagggtttcatttggggaatcaattcttttgatcagtggggagtagagctggggaagtcgctggctactcaagtcagaaagcaacttaatgcatctcgtactaaaggagaaccagttcagggctttaatttcagtactacaacaatgttgacaagatatcttcaggcaagttcagatgtcccagcggatctgccaactgttttaccgaagatctaagcacctttttgcagattgttattttgatgattaagaagaaaataatctggtcttgtatagcatgaccacggacatgtttattaactggtttagcacgatacttggttatccttttctcttgccgttgagttatgttctgctgaaaagtggaaagcattttggattctaaattttgtttggagcttgtcctctgacatgtttcgatatcctcattatttttttaaaaaaaactggtttagcaggat

SEQ ID NO: 16896 - DNA, 441 bp, Glycine max
  Clone ID: PAT_MRT3847_115262C.1
cccacgcgtccgaaaaaaataaaaaaaaaaaatttaaaaaaaaaaaaaaaaaaaaaaaaaaaaaaaaaaaaaaaaaaaaaaaaaaaaaaaaaaaaaaaaaaaaaaaaaaaaaaaaaaaaaaaaaaaaaaaagggggggcccccttaaaggaacccaggttaccgtccccgggcaggcaaggaaaaacctttttaaaggggcccccaaaatcaaatcccgggcccggggtttaacaccggggggccgggaaaaccccgggggtaccccacttaaagcgcttgggagaaaacccccttttccccagtgggggaaaaaccaaaaagccccccccggaggccctttccaaaaagtggcccacccggaggggcaaggggacccccccctgaaggggcccataaaccccgggggggggggggttaccccccagggggcccgtaacat

SEQ ID NO: 16897 - DNA, 528 bp, Glycine max
  Clone ID: PAT_MRT3847_115263C.1
cccatcccccaaccaaagggggcttttctttgtttttggccccaatttttaccataccccccccggaaattaaatttaatttttaattaaaaaaatcccccccccccttagggccctatttcaaaattttgccattacctttttggcccatctgggggccatagggcataaaaaccaccccacccttggtttattatttcccccaagttttcttccccacaaacccccaggcccctcccaaaacggggggaaatatccacctccccccaataaagggcaaaccatttaagccctcccccttattaaattcattttcccccaggggtaaaaaaaccaaataacaaatgcttttttttttttccaccctgctatccagaaaataacatgtctcttggccccccagttttcctagttgcctgctccccacgttcccctgcccaaatttttataccatctgaaacgggaaccaaaaaaattttgccttccccaatccccccagtttttggccccccaaataatttttgaaaa

SEQ ID NO: 16898 - DNA, 268 bp, Glycine max
  Clone ID: PAT_MRT3847_115264C.1
aaacacacccaaccctttccggttggggggtgggatccaaacacaaccatgtgaaattttttaacatccacaggacacaaagcacagttagttatatctaaactgaaacatacaggcgactgttgaaactcttgacctctgcgcaagccgtgccgcacacatgcacctactcctacaaaagtcggtgtcgagaaggtgcatggcaactggagacaacccatgaacaagcaggggctttttttacacatgcaaactgacttgtaaagga

SEQ ID NO: 16899 - DNA, 356 bp, Glycine max
  Clone ID: PAT_MRT3847_115265C.1
aatagcaaatcattttcttttatgaataacaataatgcacactgaaaaactatgtcactacatgcgaataaaccaccgacggaaatgagacctacacaattgctctcacttacgcacacgtgctgaggtaaaacatcatagacaaggacaaactaaacaggcgatgaacgctgtgagttaattggcgtcaacaatgcagctaactacgcgtggaaatactcttgatctacattcccctgtacagggtacttatacctgtcatagagacataccaggtcacttctagcgaccacgaaatgattgagacaatcaccaaacccgtgcagacgacgcattgtaaaatatgagctgtcaag

SEQ ID NO: 16900 - DNA, 324 bp, Glycine max
  unsure (1)..(324): unsure at all n locations
  Clone ID: PAT_MRT3847_115266C.1
ctggaaccctccaaccttgacctctaatctgctaaatatcaccattaaaaacaccccaattcataagctcatttcaaatcccctaacgtggatataactcctaaaaaacgcctcttctcccatccntacactaggtccaatgcatctgcacagttcgataacggacaaagaatctaaatcttacttttccaacatcacatatcaggagcccacatacctaatcctgactcaatccaattaattacatcaattttcttttcatcaccctataatcatatgcaaatacatagttcattcgccattgcaaggactgcatacagaatt

SEQ ID NO: 16901 - DNA, 386 bp, Glycine max
  Clone ID: PAT_MRT3847_115267C.1
ggctcgagcactgtgtcagtcatgtcgaattttaccgttattgtggtgactcacggtccagtacggggtaagggtgctgctgcatctaccgcgactctagtgcattgatcggcatatcctattctatcgccaatctgatcttggacaaacctgtcatgctaattcctccgctcctacgcgaaaacgctccctattcttcattgccattttaccaaacgcacatataccctctcgatgagaacgacttttagactttcgctgtcttctcatgctggacactccatacggagtcctaccttcgtattatcataatcatcaataatatcaatagactatggctgcatgaatatagagttcggacatcttagaataatgattagtgattc

SEQ ID NO: 16902 - DNA, 124 bp, Glycine max
  unsure (1)..(124): unsure at all n locations
  Clone ID: PAT_MRT3847_115268C.1
cttctctggggagggcctaccangaccctccaccagcaccactcattgaggcggaggaggtaaaagggggcttttacagggtctattgggagatattcgactttgctcttcctctacacttact

SEQ ID NO: 16903 - DNA, 338 bp, Glycine max
  Clone ID: PAT_MRT3847_115269C.1
cgattccctagatataggaactgacttctgttagatgcaagtgtacacaccacaatactatttaagaatcaccggactattctgttaccactagtctgatgaaaattgcatcgactcgctagacatatgacaatgccaacttgccggtgtagatgatgtttttccttactgggctcgttagagactctgattgaaagaaccactcatgaatggtgctttgacgactaacgctatccagtgcatgaatgacaaggaggctgaagttttcttcaaaaatctattatttggaagctgtgtaatgtcactgctggacctgtttacatcccatgcctcgacaa

SEQ ID NO: 16904 - DNA, 288 bp, Glycine max
  Clone ID: PAT_MRT3847_11526C.1
aattggacgctatatttctagatttgtgcttcgatgtctctcgagttcatcgactcgtaaattcttactccgtgcaataactataagtttatcttcttcatcttcttcgcatctggtcttctccaattggaattgcaccctcttccgtccctttcttcacatttccttcagaccatttccttcgtctttctctttcgcattaattcacactatgtccacctcaaacgtcaaatcagtctaatattatagcgtctaagttatcttttttgtttatgttttgcatattca

SEQ ID NO: 16905 - DNA, 267 bp, Glycine max
  unsure (1)..(267): unsure at all n locations
  Clone ID: PAT_MRT3847_115270C.1
aaaaatattcatatttaagtagtaataactacagaaaaaattggtacagataaaaatcncctatacacaaactgacaccagaacctaaatagaaagttgatactagctgttaagaaaaagttgaaactatagaacctcgtataccaagataaaatgttaaccttgaggaacctagaatcctagccagttgccacctatccaatccagcttgttctaccttggaatcatagaggacccgtgaagccaatcacgagaatagattgcatc

SEQ ID NO: 16906 - DNA, 169 bp, Glycine max
  Clone ID: PAT_MRT3847_115271C.1
tcgtcgagttaattttgtacattaggaatgtgttgtaatgtattaatctgtgcgagtagaaagatttctgactaaaggtgtcactttggaggtgtaactgtacgttaatactaaacgcgatgctattgcaatttcagttttattttgaaatacatggggttttagtggc

SEQ ID NO: 16907 - DNA, 169 bp, Glycine max
  unsure (1)..(169): unsure at all n locations
  Clone ID: PAT_MRT3847_115272C.1
aaccacaaacaaccacacgaccaaacaagaaggcacacgcaaaagacaaaancaacaaaaagcggacaacacgnaaanaagacgccaaaacttttagtacacaaacnncgcaccacaaacaatcaaaatgcattgtatgaaaataaccatacacatactttctaattcg

SEQ ID NO: 16908 - DNA, 255 bp, Glycine max
  Clone ID: PAT_MRT3847_115273C.1
gtttctacaggtgaaaatgttgaaccaggagaacttgaagaagctgccatgaggagtagcctcatacatcaaattgttgttattggccaggataagcgacgtctgggggctgtaattgttcctaacaaagaagaagtcttaaaggccgcaagggaatcgtcaattatagattccaacagttcatatgcctgtcgaagaaaagtgaccagccttatatataatgaattgaggacatgggcctttcaggttgctccg

SEQ ID NO: 16909 - DNA, 399 bp, Glycine max
  Clone ID: PAT_MRT3847_115274C.1
cactgagcatgcctctagctatctcgatcgaactgtccaaggtcctgtcacgtagcacgcgcagttccaacacgtcgccactagcgcaggtcccaggcgaatccgcccggcagcattatgctagggcacgatatatgtaacctgccgccatgaagctcacaaccaccaggagtttgatatgccaacacgattcgccttttgctaaagggcataacactaaaagtctgctggttgccctgaagggtaacaccagggtttggcagcaacaataaagcgtgctaaagtgccgtacaagccgttgtggctacgccgagtaacgtacgggggacgtacatagagaggccacctcgatgtacatttagatagtgcatctaacctagggccagtacccctggtggg

SEQ ID NO: 16910 - DNA, 445 bp, Glycine max
  Clone ID: PAT_MRT3847_115275C.1
ggagtaatgaatttttattatacaagaatttatttgctgtcattggtggatgtttcagattattgtatctaagtgaggtgaattgccaagaatttcatgggttcccgtggttaatgtttggccatgatatatatatatatatatattgcattagctttgtttatgagctattgtattttttatttggcctttaaattgtgaacactaagactcaataaatgtgaaaaatgagtctttcttttttcctatcatacctactgttagagaattttctccagctgtgtttgaaaacatatttgtgcttttcttggtttgaacaggcgctgtcttgtattaatgactttttcttttgcaaattgtattgactattgaggcgaggccaaactgtcaacgaacaattattgatgttccttaaatttctaacttcacttcttttttttcctgg

SEQ ID NO: 16911 - DNA, 284 bp, Glycine max
  Clone ID: PAT_MRT3847_115276C.1
gaataaatggttagaagtccaaagaaggcacttaagagaatcaatgcccccaagagccggatgcccgaacaattaggcggcatcttcgccaacaaatttcccaggtccacacaatccgagaaagtcttcttctcaaagttgtgccccagcaccgtcttaaatacgcctcttcctggaagagaagtccctttgatccgtcaatgaccaggaaggaaaccatcgctgtcgatggcaagatccaaaagagaacctaaattccccgctggtcttatggatgtcatcag

SEQ ID NO: 16912 - DNA, 297 bp, Glycine max
  unsure (1)..(297): unsure at all n locations
  Clone ID: PAT_MRT3847_115277C.1
tnttngtacgcgtacgtaagctcggaattcggctcgagngtattccttgcgttgtgcggcagaggagaagtgcctggccagcacagcctatgctcctgaggccaccgactatgacctccgagtgctgttacgattcccccagcgtgtgaaaaaccagggcacggcggacttcctccccaaccggccacgccacacctgggagtggcatagctgtcaccaacattaccacagcatggacgagttcagccantatgacctacttgntgcatccacgggnaagaaattgcngagggaaaa

SEQ ID NO: 16913 - DNA, 149 bp, Glycine max
  unsure (1)..(149): unsure at all n locations
  Clone ID: PAT_MRT3847_115278C.1
atccctctaatcactctagctgttgcaaatttctacnatttntcaatggcttcngcagatgtngagttccgttgctttgtctggngggcttgcgtgggtcaccggcaacgntgccctcnagaangcnttttcaatctacggcgaatcgt

SEQ ID NO: 16914 - DNA, 1344 bp, Glycine max
  Clone ID: PAT_MRT3847_115279C.1
ttcctttcgtccgcccacgcgtccgcccacgcgtcggccaaagctagctattcattaattattagctcataatggaagtggaaagaatacaaaccttgtctttgaaccagctcaaggagcttccaccccagttcatccgtccagccaatgaaaggccagagaacaccaaagccatagaaggtgtcattgtgcctctcatctcactgtctcagtcacatcatcttttggtgaaggaaatagctgaagctgcttctgagtggggatttttcgtcataaccgaccatggtatgtcacaaacattgatccaacgtttgcaagaggttggtaaggagttctttgccctccctcaagaagagaaagaggcttatgcaaatgactcttccgaaggtaagtttgagggatatggcacaaaaatgaccaaaaaccttgaagaaaaggtggagtgggttgattatttttttcatctaatggctcctccttctaaggtcaactatgacatgtggccgaaacacccttcttcctacagggaagtgacacaagaatacaacaaggagatgttaagggtaacaaacaaggttttggagcttctgtccgaaggcttgggcttagagaggaaggttttaaagtccaggttgggagatgaagaaatagagttagaaatgaagataaatatgtatccaccatgtccacagccacatctagctttgggagttgaacctcacactgacatgagtgcccttaccatactcgtcccaaacgaagttccaggcctccaagtttggaaggagaatagttgggttgcggtcaattacttgcaaaatgcactcatggtacatgttggtgatcaacttgaggtgttgagtaacggaaagtacaagagtgttctgcatagaagcttggtgaataaggaacgaaatcgcatgtcatgggcagtgtttgttgcgcctccacatcaggcagtgatagggcctcttccttctctcatcaatgatcagaacccacccaagttttcaacaaaaacctatgctgagtatcgttatcgcaaattcaataagctttcccaataagggaccaaaacatcatcacttgtgttgtcacggtgaaataaatttgtaagccatgatggaggataacaaagtaggagctaactctccattttggttaacaagtgtagctaatttctattatgcttttgaagtaaacagggctttgtccccttggcatttggtacatgccatattccttaagaatacaataaggctatattcctgttctacttcattaagagtcactgagtgagattcgtatgcacttttttgatgggctaattttacttttgttatc

SEQ ID NO: 16915 - DNA, 431 bp, Glycine max
  Clone ID: PAT_MRT3847_11527C.1
agccggcggcccccaagccttcgattttggacttatttttctggctttacttggattcttggcccaaacggaaaaaccatggggtttcttgacgcggtggaccaactggaccttgctttaccaaaggcaaaccaacgcccaagaagggagggttagatacccaatcccagccttatgagaaagggaaagccccccaggatattggctgatggttggagggacataagggctaaccaaagttggttgtttacccgagttgcaactataaccttaaaaagggctgttaatccaccagaaggctttaggcctccatgggaacctggccaaataaaatgtccagatccaaccaatgccataacggttccttgccctgaagaagctggggtatccgtttttaaaccaaacacctacagcagctgccttgattgtaa

SEQ ID NO: 16916 - DNA, 1144 bp, Glycine max
  Clone ID: PAT_MRT3847_115280C.1
gcgcgcgtacgctagctcttaatctggagtcgagacggctgcgagaagacgacagaagggggatccaaaccaaaacaaaatccctttaaaaccctagtctcgcaatttcgaaatttatcactcaacgacctcagtcgctctcatcatccactcatcttattctcaggccagaaaagagaagaagaaatggtgttaggcgtgagagagataagctgtagcggagagccagtccttgacagtgataacggggaggagttgatgcaggtacaaccgggcatagacattgtcctcggcgatcttcctcggcagtcccccggcacgctctatatcactaacaagcaagtaatatgggtgagtgatttagacaagactaaaggatatgccgttgattttttgtctatatctctccatgcagtctctagagaccctgaagcctatcctcttccttgtttatatacccagattgatacaggagaagctgatgatgaccactctgattctgaatccattcatatcccacaagatttgtccaacatcgcagagatgaggctcattccctctgatcctactcaattggattctctctttgcaatattctgccagtgtgcagagcttaatccagaaccaaatgatggggaaggagaagaacatggttgggtttttagtgctgatcagatgggagatgaagaagcagaggaagaaggttatatctttcacaatccagccaactctattggtcactcaaatggaaatcatgacctaactcgtacgacacttgagcttcaaatcaatgatcaaagatttgaggatgcagaagagatggaggacaatggagatggcaaccattattgagtgtctttgttttctccaaaatagcattttctagtctttaccaaaagtcatcaactgtatgttgtgtagtttggtactatatatgtaatcctattatgaaacatctgaccagaggcttagagtggtttatcttagaccttttttttttctttcctgcagtagaaagcagctggatactgagtttaaagctgtattatgtaggacagtagaagaaatttgaacattgtttgcataatttattgagaatgttcatgcaaataattagtgtgtttggttctccaaaaaaaaaaaa

SEQ ID NO: 16917 - DNA, 1072 bp, Glycine max
  Clone ID: PAT_MRT3847_115281C.1
attctcagcagtatgaaccttgctatggtgtttgaatttttaaactaattggtctggttcacttcatttcatctccctctctcatgctctagtctccttgttatatcaacagaaaagagaagaagaaatggtgtcaggcgtgagagagataagctgtagcggagagccagtccttgacagtgatagcggggaggagttgatgcaggtacaagccggcatagacattgtcctcggcgatcttcctcgtcagtcccccggcacgctctatatcactaacaagcaagtaatatggttgagtgatttagacaagactaaaggatatgccgttgattttttgtctatctctctccatgcagtctctagagaccctgaagcctatcctcttccttgtttatatacccagattgatacaggagaagctgatgatgaccacactgattctgaatccattcatatcccacaagatttgtccaacatcgcagagatgaggctcattccctctgatcctacacaattggattctctctttgcaatattctgccagtgtgcagagcttaatccagaaccaaatgatggggaaggagaagaacatggttggttttttagtgctgatcagatgggagatgaagaagcagaggaagaaggttatatctctcaccatccagccaactttattggtcactcaaatggaaatcatgacctagctcgtacaatacttgagcttcaaatcaatgatcaaagatttgaggatgcagaagagatggaggataatggagatggccccaatcgttgagtgtctgtgttttctccaaaatagcattttttagtctgtaccaaaagtcatcgactgattgttgtgtagtttggttctaaataatgtaatcctattatgaaacatctgaccagaggcttagagtttttttatcttggaccttcgtttttgtttttttttttcctgcaatagaaagcagctggatactgagtttaaagctgtattatgtagaacaggagaagaaatttgaaaattgtttggatagtttattgagaaagaatttgcaaataattttagtgt

SEQ ID NO: 16918 - DNA, 211 bp, Glycine max
  unsure (1)..(211): unsure at all n locations
  Clone ID: PAT_MRT3847_115282C.1
ccttcggagactgtgaagctgtcatangagagggtatataaatactctgttgtggtactttatccgtgatggattatgaagaggtccgatatgtgcctaaggggggctcgtgatcccgatgcagatgcaatctgatgccgggatatatgcggatactccgggtgcgtaaggctaacaagtggaaagcggagccggcgatgcatgatgaaaa

SEQ ID NO: 16919 - DNA, 477 bp, Glycine max
  Clone ID: PAT_MRT3847_115283C.1
ggctcgaggccggatatacaagatgaccagacaatgctgtatctccagccggacagggagcttcgtcaacactgtacgggatcaacgagcagttacactaagtcgcacgattaggagctttatcttataccaccttgtaccaatggctggagatcaccactactcttgcacctccttatgagaccacagctgccatgacctacacacttttatcctcgaccaaccttttggatgctacagtgtagttcatgctcatgaccatgttatctgagagtcaccactccaatacttaccgtactacttgcgaaggcgtaatcaatcatggcgagaatctggatcaggatattacccggcatgattactacgacaacaacaactgcactagctacgtgcttcagatgagcccttctcacatggtaatcatggctaggtcaacacgccacctttgaaacatggatcatgaggacaacatgctat

SEQ ID NO: 16920 - DNA, 508 bp, Glycine max
  Clone ID: PAT_MRT3847_115284C.1
acggtgcgagaagacgacagaaggggtctttgcaaagattcaatagataaaatgcatgaaaccttgattctagatgtgtgctttaatgcatgggcataacattatcatcctatgtctagcaatggtttcattataatatcttttccttttagttctattagaagttatcctctgtcaagcgcctaacctctaaaactaatgcatgcatatcttctttatatttttattaaaagtaattctctgtcgagtatctaacccctaacataatgtaaagatgagtaatacatgaaatataaatagaaaaagataataggatagaaaacacctgttgcattgataaatatggaatacatcgtacatctctttgactttttaggcctgtcaagccctaactaggggtttagtctcttatagtcatgagaaccttacactaagatggagatataagaatttgtggaggagaagggatggaagaagggaataagaaaatgatgagagaggaaagaat

SEQ ID NO: 16921 - DNA, 242 bp, Glycine max
  Clone ID: PAT_MRT3847_115285C.1
gctggaatcggtcggggcaccggtgagaggcatgcggaagcttctcgcggttcggctgccgagatgccacccccaaccgaacaactgaccgctcaaaaccggggtgctgaacgtaaccgtgcccaaggtggaaaaaaacccgaagaccaggaccttaaggcaaatggaggtggttggataataatggaccatcatgaggactggaaaggttggaaggagtttggggtaaggggggggtcccc

SEQ ID NO: 16922 - DNA, 297 bp, Glycine max
  Clone ID: PAT_MRT3847_115286C.1
ccacgcgtccggttattccaagtcgatggcagcggagacgttggacttgtcaaaaccatcttggacttatactcccaaacttaccccgttgccaagagctacgggcacagaaattgtatcggctctaaccatacagacagtgcaaccgtgaatagtgcgactgcttatgttccactacctcaacttcgttgaacgcgggtaatgtcaacaactgcgatgccacgaaccctccactgcgctgtcttttcccacataggacattagtgcgtgctgagagggtaaaaggatgatagctac

SEQ ID NO: 16923 - DNA, 504 bp, Glycine max
  Clone ID: PAT_MRT3847_115287C.1
cggccgctcgagcggcgggcgggaatgtcccttatcgaatgcgatacctgtaaaagatgatgagatgtggttcgagggagtatgatggaccttgttgagtgtgcaccttatcgtctctgagtggagtgtagatccctgacttgatagttctagcctcatataagcccaaattgtttcacagacttgcacttcgaacctcgacccttcatctctatcacgttctacaacaggttgtccgacctctagcatgagcgtgatgagacaatatttgacatttattgctcaaacgaaccctcttgacatctctatcgagcgcttcgtgcacacaatgactgatgccgctctcgattccgttgaggaggggcgctgaactcatcgctgatcatagaccctttcctatcccgcatgtcgctgcgaagagagggatacctcctatgacaacgagtgtctgcgtcagtacactcagactctacatgactgactctgcagatcgctgctcatcaa

SEQ ID NO: 16924 - DNA, 312 bp, Glycine max
  Clone ID: PAT_MRT3847_115288C.1
cgcatgagttgcaggtattttcttctctggaagcttctgcgctatcttctggctcagaaaacgaggactcatgccgtggctcactttctcatacgaactcatttttcaccaccaaaggctacactgcgatttctcgtgactgctatactctctgctcaggcagaaactcaccgaggagcgcgtgacgtagattgtgaggtacgccgtggatattgagcgggagtgtgtgtgcgacgcgactgcctgcgcgttggtggagatgaacggagatttgattagccaatacattgaattcgtagcaaatcggttgct

SEQ ID NO: 16925 - DNA, 461 bp, Glycine max
  Clone ID: PAT_MRT3847_115289C.1
cggctcgagctcgagccgaatcggctcgaggagacggtgacaacgacgatgagtgatgaagcgaaagagagaatttcagagagactgtcatgtttggagaacctctactttccgcgtgctctcgaatccaccgtcactctcccttctcaacgcaaggccatcttccgcgaccttctctctagagacgttgctcttttcttagaacgatatgggtccaaactcacgtgcagcgagcttagtgaatttgattcgatgaaagacgattatgagattaattggcacataaagcggttaaggagcataatgagtccgacgtcggaggagctgaggatgaggtcggtgacggtgaagaaccggaggcgcgcctacttggataaactggtgtgccaagggcattacttctctgaggaggcaatgagggagagagagtctatctgcatcatgagtttgtgggaggtttc

SEQ ID NO: 16926 - DNA, 367 bp, Glycine max
  Clone ID: PAT_MRT3847_11528C.1
agagtttgttgtgagctataagcttgtttatcgtgaggagaatatgaagttgtttgttttctttgttgcggcagtagttttggtagcatgcccatgccatggcgcatgcttccaaaagttccctctcccaatgaaaactggctattgtgagcgttcttcagaagtaaaatgcgcaagttttaagcttgctgtggaagcacacaacattccaacctttaaaaccattccttaaaagtgcgtttgaccaaccatagactacattaatggctaacaatttatatcataatcttaaacaagtaaccaacaagctttcttttattctaatgaaacactaatttcattatcaaccacatatttatattcagca

SEQ ID NO: 16927 - DNA, 588 bp, Glycine max
  Clone ID: PAT_MRT3847_115290C.1
gtggattgcgccggacttattaatggcccggctcgactagcttactgctcgcgggccgcccttttttttttttttttgtcgttattgagatcgttcgtttatttacatatgtcatcaactgtacttggattcgaatagttgacagattacatcaaaaacgtgcttggcttcgtcttcattgaagaacgcaaacgcattatatcctccagtcattgagaacttgtggaagtatggagaggtctcttcgtattccaacttctcatcgggaacgcgaaggagaaacaaagcatccaacgtctcgagatcggaaacttgaaagaagagcgtgttcttcttatctcgcaataatgacaataatccgacgatggacgtatccttccattgcggatccttctccaagaactcgaacaactttacagagccaaaagccagaacctctaatccattgtctcttgcttgactcttaaccttggattgaacttgcatctcgaaatcaatgtcgtcgactgcttcaccggtgatactcatcgaaggttgggttctcgtaatgacaggttccgcaacttgctgaacaatcgaactcttctg

SEQ ID NO: 16928 - DNA, 1708 bp, Glycine max
  Clone ID: PAT_MRT3847_115291C.1
cgccgagacggtctttgccttcttcgactctgcattcgtcttcctcagattcgaacaatggcaacgttcaataaaaccctgtacggctgcgagaagacgacagaaggggagagtcaatgtctttaaattttcttctgtattaagctgaccaaagacaaatcctttttgtatctgtagctggaattttcttccttcttactttaccttcgattgtcaccttctaattctgcaacaagttccaaaccttcaaatctcactgccccaaaaatcctttcttttttaaatagccatttgacttcagcctctacagcagagtcccagatctctgcattccaattcccatggctggtcgctatgacagtaaccccttcgatgaggaagaagttaaccccttctataatcctggaagtgttcccgctgccactaattcaaggctttcacctctgaagccagaacctgttgattataattatggctttggtgcgacagttgatatacctcttgattcatcaacggatttgaaaaagaaggagaaggaacttcaagccaaggaaactgaattgagaaaaagggaacaggaagtgagacggagagaagaagctgcttcacgagctggaattgttcttgaggagaagaattggccgccttttttcccaataatccatcatgacattgctaatgaaattccaattcatcttcaaaaattgcaatatgttgcatttactacactgttaggattagtgttgtgccttttttggaatgttatagctgttactgcagcttggattaagggtgaaggtgtaaaaatatggtttcttgccattatctacttcatagcaggggtccctggagcatatgttctgtggtatcgcccattatatcgtgcttttaggaatgaaagtgctttgaaatttggatggtttttcatgttttatctgcttcacataggattctgcatcttagctgcagttgctcctcctatagttttcaaaggcaaatccctgacgggcattctggctgccatagatgtgctgggcgaccatgctttgattgggatcttctacttcattggatttggattgttctgcattgaaactttgatcagcatttgggttattcagcaagtatacatgtacttccgtggcagtggtaaggctgctgagatgaaacgggaggccgcaaggggagcactgagggctgcaatatgattcatcagtcttgtggagaaggaagtgtggataacttgtgtatggatcaatgttgtatattagaagccacacacagaaattgtgaacaaaaatatttcactgagcatgatttttgtttacagctgttatttgtttatttatttttctgtttagcatgctacctattaatgtggtttgttagtgtatatcgaaagctgagagcttggacatactagtggctggtagaaacatgctataatttatggaaattaatcctctatatagtttaaaaaatcaactaataaaaatatttgttgatgtatattttaagtagaaagcatacacatagtacactatttcatatatgttctctatttaacatgctaatattgctcatatggctttatttttgtcacaagaagactaagcattcaaattcattttccttgcacaagatagttttttttttcattcccttctcaaaaatagaagtaaatgacaaatctattggtcattgatat

SEQ ID NO: 16929 - DNA, 269 bp, Glycine max
  Clone ID: PAT_MRT3847_115292C.1
cttcaatcatatcagcttcactgtcactgtaatctccccaacacttgcttggctttttcttactaaaatgattaacacaaaggataggaactggctccttgcaagatgcctgtcgagatacctaaaactgatgccaaggattgactggactgaggaggtctttgaggcacaactgattacttatgaggatttctgaaaggtttcacacagcttggtacatacttttctatcgcggttccaatttatagcgtgtttcgtgaaagacgctc

SEQ ID NO: 16930 - DNA, 258 bp, Glycine max
  unsure (1)..(258): unsure at all n locations
  Clone ID: PAT_MRT3847_115293C.1
anaggcgtctgtnagatcacccaaggtcttgcaaggtcaaganaatgcaggttttgggtcactctactacggatgtgacacagtaaccaanccaccaggttttgagatgagctctcaaagtcntccaantcttggatcagctgaagtaagacnnttacctctnctganctgagtagtgtgcaccctttcagttntgcaggctttgtggaaaccaacaggtttccgagggtcttgcaaggtcaagaagtatgtccattg

SEQ ID NO: 16931 - DNA, 452 bp, Glycine max
  Clone ID: PAT_MRT3847_115294C.1
ggtatggggtttgtttcttttttatcattatgtttttgtttttttaaaacaagagttcaaaaatgatcacttattcatgcagttcagcatataccttcacatcaaactttttcactaaggcaaaacataaatgaaggacccaaatttttcattttttttcttacaggtgaatggggctgaaatcaaacttttatgaaactctttcctagggaaaaagtcctaatttgaaaaggaaaaaaaatcctgccattttaaaggaatgctgttttcaaaagaaataaaattttttaaccccattaagggtccatcgtttgatatggggaacaaaagacggagggttggcattaatgcttcctgtgcccaacttaaggggcctgatgcatgcaatgcctcaattgtacaacgataggcgtgcaactctcacctatgaatttctgctgccaattcctctt

SEQ ID NO: 16932 - DNA, 121 bp, Glycine max
  Clone ID: PAT_MRT3847_115295C.1
ggcagcgttccagaagatcaaggtctcctaccccatcgctgatatggtctgagatgaaatgactggggttatctgtaagtcaattaacgactagctcattttgcccttcttggagtgggat

SEQ ID NO: 16933 - DNA, 363 bp, Glycine max
  Clone ID: PAT_MRT3847_115296C.1
aatacaaaactgtttcttgtggtttaccaattttttttatagcgagaacctaaaacgtagcctatattaagttttagacattgcctgtttgaggtgtgaatttgtttaaattctgaataccatacatttaaggatgaaaaggaggaacacaagtgttactttatgagtgaaataactcatcgtttttcttaaggactcaccttacgctttcaagaagtaaacccaaacaatccaccacctattttccaattcataaaaatacaagataaagttagtttgctatcatggcacaattaattggtcctataccccaccggttgaaccggtttctttaacccacacgagttaactggaccctgaaac

SEQ ID NO: 16934 - DNA, 365 bp, Glycine max
  Clone ID: PAT_MRT3847_115297C.1
ctcgttgggggaaattattaggtggtcttggacaaccatggcccctgttgatctttatatgacacttaatagtgatgtcaaggttttaaatattggtcgcagtggcaacgcggtttcgtcgtatttttcttgatatcatggcaaattgaggccaaatgcaaccaatgcagtcgcggacagttagaaaccttgatgttgcggctcaaatcactattggcggaccacttttttaaaaccttgactgttgttaatttttccctcgtaagttgtgaaaatttgaatgttgttctataaaacattagttagggacccatgggattaggtggtgattccaaaacccaatctaataagttttctctttccct

SEQ ID NO: 16935 - DNA, 387 bp, Glycine max
  Clone ID: PAT_MRT3847_115298C.1
ccccttcacctgtgaagccgcaaatgtctggacaactactacagctggctgataggctacttgtgctgattttgagttcgaaatgcttgcttcgaggggttgctgcctcttgagggtgcttctgtggatgaccactacagtgctgcctgcaactatccattgacacttacctggaacttgttaggagcaagaacacccctttgagtgaagcttaagcgactccaggaacccattgaccttcgacgaagacaaggtcagaggcttaagcagtaaggaaatggacgtgcaaagagccaatgatgaagtaaaggagacaagataaagaccagctgatgccttcccttcttaatatgtgacgaacataagacttacatttatatgatacaa

SEQ ID NO: 16936 - DNA, 343 bp, Glycine max
  Clone ID: PAT_MRT3847_115299C.1
tttttgagtttctagctcccaactggagtaccacgaataccaaatttatgttggaaaaatgttgtacatacaccttttatattcgggaaagagtaaatatccagtttaccttttaccaaattgagggtgtggcatgtttctacacctatacaaaattaaataaattggaagaaacttaagtgtataaatttatgaggccaaagtgggattccccggggggaactattaaaccaccttaatatctcacggtgaattttaaagcacattgttgctccgtaatttatataggagattctttgggtctttctgtcaaacaaaatttgaatggccgtcttcatttatg

SEQ ID NO: 16937 - DNA, 264 bp, Glycine max
  Clone ID: PAT_MRT3847_11529C.1
agccctacgcacgctcatgtctgaagagtaacctaccttgcgcccttttctctcgggcgttacgatggaagaatcaaaagtgctttctgctacgcttccgggccccactctcctggtacatacaaccctggcttcttaggcggctaagccagactgctgagattgctccgagacctccaaagacccacccacgttggggatacgcagtcctgagaccggtgtattgctaaatgcgatacgagaccctacacccttaccgacaca

SEQ ID NO: 16938 - DNA, 247 bp, Glycine max
  Clone ID: PAT_MRT3847_1152C.1
tcgaccactcgtccggtcaggcttcatagctaatatatgttcttacttttacatctcagtatatgttcacatgctacagaagttttgcaaaatccaatacactgttagattaacatgcatcttaattgccaactacttctccttaatctgtaccagtttgatataacaatctaccacaagaatcaatccaatatgttaaataatgtccataatcaatccaaatctatcatttttccattataactct

SEQ ID NO: 16939 - DNA, 311 bp, Glycine max
  Clone ID: PAT_MRT3847_115300C.1
cgtaagcgcaagaattgggtcttagttcacgttttgattaaagtgttattgtggtgatagaaacctcaaaacaatgtaatgttatgatagaggacaagcgaatgtgagtagtgtggtcacagctatcatggtctctcgactctgctttctccacaatgttactatcattatgatagtgatagaggccgtgaatggtcatttcaagttttggttgttcagactcaaacactcactttcttgggacaatcatgaggaggagtacaacaaaaactgggcgggcgctgacctgtgaagcttccgaccccgtgatt

SEQ ID NO: 16940 - DNA, 713 bp, Glycine max
  Clone ID: PAT_MRT3847_115301C.1
cccacgcgttcgcccacgctttcgcggacgcgtgggtgaagctgaaggattaaaatacataattgcttgtctatacaatattgctgtagttttatacagaaacaggcaactgaaaaagacttcaaaggtgctaaacttgtgttgtaaagcttcatggctctgtattaaatatcattgtgctaatctgtcagaagctgctttgaaagagtttgtaatggaggcttgcaccagaagtgcttttcttttagatattatctatgatgtcaacaatctaaagataaacaaaaaaatgattgacatcctgaaaaactggttcactgctaattatttgtttgataggcttccagcacctatacctgtagtaaagcagtgggtaaagatagtatgtagacgtgctacgcaggtggatgagacaattgattctcttaccttgtatagcctgctgtcatcttctacagaattgtcaaagaggaataatgccatgatcttggagcaggagcttactgcatatgaggaaatgggttttaaatacccagaattttgccagaaaatgcaaatgaaaataacagacattctcctgcaagatatatatatcactccagatagtcgttttcaaaaggcacaaactctagtgagaaagggaaaggcaattaaggttaagggcataggtggtctcagggactgcattcagtgtctgtcagaaacaataacta

SEQ ID NO: 16941 - DNA, 352 bp, Glycine max
  Clone ID: PAT_MRT3847_115302C.1
gttaatgtattaaactacttccctttttggggtatttgtgcgtgtttaattaccttaaaaacctaaagaggcaatgaatcattctcccttttcatcaaaaaaaagggaaccccctccaaaaataactaaaaaacaaccgccaccaggggggaaaaaaaaaaccccccccccccaaagggggggccaaaagcgaggaaaaaaaatacagaacccgggccccaaagagaggcacacctaaatgtttgctgcaaaatgccaaaccaaaaacccacttgtaagtttccataccgacaccagacaagccgacagtataaggcgggaagcggggccctgccctagaaaaggggggggg

SEQ ID NO: 16942 - DNA, 378 bp, Glycine max
  Clone ID: PAT_MRT3847_115303C.1
gcgtgtggttcgtccacaggtgcgaacctttcttttttaatgtaaaccggccagatgatagaggggacctacttgtgtaacacatacagaggcaaaaaaattgaatcgcgaccaggagcctgaatcaacaaaggctagggttgtgtttaagactttcatgtttaggtggcgtgtgggcattgggcaagcatattttcatagaattgcataagcaccaccattagaacgggtatgaaagtacacattcgagcattttcacctactcagactatcctcgcctcaccgataagtagaaaacttttgctgagatgcgttcgttattcagagggaactatctaactttcgtgatatccttccttcaatcccaaaagcccttga

SEQ ID NO: 16943 - DNA, 506 bp, Glycine max
  Clone ID: PAT_MRT3847_115304C.1
tctcaccgcaaattaaccatgagcttcctcagtatcaccttcataacactcttcctcctttcccaccactacatacaccacccccaagcgaataccccagtggaccgttttaccatcaattgtggcgcctccgtgatatcctccgacggagaaagaacttggatgggggacacagactcaatgcttttatccagtcaagatagcaccgtttttgctaaaccaacatcacaatctccatctaccaatcatgttccctttaccactgcacgcatgtcacgttcccaattcaactactccttccccgttaccccaggccccaaattccttcgtctcttcttctacccagctgtttatgcttcctttccccacaccgatttctgcttgaaagttcaatgcaaccaatttcttctcctcgacagttttaatgcctctttaaacgtcgatgctgtaaaaaaggaaaccatcttcagagaatacatcgtctatgtgggcgacaatcagatgct

SEQ ID NO: 16944 - DNA, 487 bp, Glycine max
  Clone ID: PAT_MRT3847_115305C.1
gtcggttgttctgcaagacaaaacttgcagtgtagtcatcactctccgtgagtgcaaaacaaccccacactgttccttttttatgcggcttgatgcattgctaggaaacaaaacaacaccttcattctatgccctcataaattaacattcagaattcccacttgtctctcttattctctgccaaaacttgttacaagtctttaatttccaggtcttctctttctctctatctacttcaaagttttgctgtgcaattaagcttcttagcttgctcttcaaatcttattagtgtttaatttagctgccaaggtgtgtcttaattgaggctccctagggacccagatgataggctcatctcaaagttttcttcaatttctaatagttttgcagtttttggcctttctctctctctctctctcttaagatttttctttttcatacaaaaattgtatcactaccttgtttccactttttccgtgctagtggt

SEQ ID NO: 16945 - DNA, 445 bp, Glycine max
  Clone ID: PAT_MRT3847_115306C.1
cccctggaaggggaaaaaaaataaaagggccttttgaaaaaaggttaaatggccaaggctaataaaagtaattgggcccaaaggcataaagagctgtttcaacattattaaaggggtattttttggccttgacaaaccgggtttttttcaaaggtcctttggggtggaggggggactagggattctaaccgggcttgggcttttagaattggccccgtttgttttaaataaaaggtcctgtgttgctccccatttggaaataaaaccttttgatggcgacaccttaaagctttttggtgacctttcaaataaaggcttgccatttttaaaaaaattattattccccggcctttttttgttggccctttttttttaggtcgaagctttattttgccacccttttttgggccaatttttttttgggctctttccgctttttttggcc

SEQ ID NO: 16946 - DNA, 820 bp, Glycine max
  Clone ID: PAT_MRT3847_115307C.1
ctcgagccgctcgagccgaatcggctcgagcattgttcgaatattggaatcaaagcaaagcgtaagaacatggaatatctctgcatcgatgaatctctctttgattacaattagtttcagttttaattttctgattgcagaggagaagatggaaaacagtgaggagcaacaaaagtacagagtccggagattagagatctcagacaagggaaaaggcttcatcgagttactgcagcaactcagcgtatgcgattccgtctccgacaaggaattcgaggatcgattccgagacctcagtgttctcggcgacgagcacgtgatcggcgtgatcgaagacgaggcttccggaaagatcattgcgacggggagcgtgtttatcgagaagaagtttttgaggaattgcggcaaagttgggcacattgaggatgttgttgtggattctagcatacgcgggaagcatttggggaagagaatgatcgagttcctaacggagcatgcgcgggatatgggatgctacaaggtcattcttgattgcagcgtcgagaacaaggcgttctacgagaaatgtggcttccagcagaaatctgttcagatggctatgtattttgcttgaacattagtatttttttctttacttcctttccttttgcttatgaatatttacctaacgccattgatgatctatctatgagtacattccttgtcctttcattttccagcttttagcatgtgttttcacttttgagttcttgttggattaaattttttaactgcttactataaaagaagtagtagtaaaaaaaaactatatttacttccc

SEQ ID NO: 16947 - DNA, 402 bp, Glycine max
  Clone ID: PAT_MRT3847_115308C.1
tcttacattacaattcaacaccttaccactatctctactcataatcactcttaaaaataatactcacagaacttatataaataacggaacaacataacacttctcactcttataatttcttatcacaatcacttcaacataactcttcaaaatatcataaatatatttacttactttccaaacactgataaaagaaataaaaaagcccacacattcaacaattatatattaatcaacaaaatatttctacgattaaactctatcatcattgctcttacaaaccccaaatcatatactatcatcaacttataattactaaataacttctataaattatccttttcattatatcttgaattcttcataaaccaatatatatacaattcttccttcataatatat

SEQ ID NO: 16948 - DNA, 391 bp, Glycine max
  Clone ID: PAT_MRT3847_115309C.1
aatactaatgataaataaaccaagttccataaactatcaaattcggggtaacgcgacaccatcaatcattacatcaagacaatttcagggaggaaccaaaatcctccctcctaaaacaatcaaacgcaattaattatctaatctcatcatcttactaatttaacacaacaaaaaagaaattagcaactatagagtaataaaaaaaaaccgtaggtcaggagtctacgttgttgccgagcacaaacgagaagatttcccgaaccggagagaactgaacgagagcgatatccatggcgtaaccggaaaccggaagcttgagttccctcaagagggagaaagcctcaggcattctgtttttggggacatgtgggggcaacggagcaataaggga

SEQ ID NO: 16949 - DNA, 567 bp, Glycine max
  Clone ID: PAT_MRT3847_11530C.1
ctacaacatttttagaaccacaacctccttcatattcggctataaccgaatcataccatgcatgggtgcttgcattgccctgcattgtccagatagaactcatgcaagcattatcatcttatatgagccctctctaatttaccctatcaatacgtgctacttgctcataactaatctcatagaaacatgattcgcaggcatcaaagagacgggaatccactgagaaggcaaacaaaagggatctgggtattacactctttatacatacggatccatcagatgcatgatgtcaccacctgaagaattaggggctgttgtacaacacctaatggggtggttaccgaggccaaaccagactgatactgaatcctatgcgaccatccctgcattgagaccacacgctcggggctaccaagcaagaactggcagagaccaagctgctctcccactttaacctaaagggagtccacttgaaccttgacgaaggcttgcccataccctggcgcggtctgaaatcggcttcctctctgcttcgccaacggggtaccaagaattaccccattcgca

SEQ ID NO: 16950 - DNA, 269 bp, Glycine max
  unsure (1)..(269): unsure at all n locations
  Clone ID: PAT_MRT3847_115310C.1
gcacgtgcgcccacgcgtccgaaaagattctaaagaaatataactaatattctttagaataatcaaaaagaatattaaattcaaataaattttagatagaaaaaagacttaaaaaggaggatttgaaatgcgagatcttaaaacacactccntcgcggggggggtagnaagcactctatggttcggggctaaaacgggtctcttgggggggatcaatgcggtttttacacatgcattgatattcccttttttttcattctagttattga

SEQ ID NO: 16951 - DNA, 192 bp, Glycine max
  Clone ID: PAT_MRT3847_115311C.1
ctagttttttttctgcttgcttccacacttttggggggtttgtctcctcctcaatcttcattgaccacggcttcccctaggtgacacacacacgcagagatcatggcttgcgttagtgaggttagaagattaagaaagaatggcatttgcaggaacaacccacacatctatgttctgtgacaaaactgttta

SEQ ID NO: 16952 - DNA, 244 bp, Glycine max
  Clone ID: PAT_MRT3847_115312C.1
tccatctcataatctcatcacttttcaaacatgaaagacaccattgttctataccctaatgttctaaggggacacctagtttccatggtggagctaggcaaactcatactaactcaccacccttcactttccatcactatcctcatcctcactccaaccaccacctcttccaccaccagcgtctcctgcaactctaatgctcgatacatcgccaccgtcaccgccacgacccccatcatcacat

SEQ ID NO: 16953 - DNA, 538 bp, Glycine max
  Clone ID: PAT_MRT3847_115313C.1
caaaatattctcaaggaatctcaaaacctggactaagagccaagtgtttttccaagcactgatggattactcaaaaactccattacctgtatttcctagctcatccccaattacctgcaaggaattgaaaatagattcactgattcagcaaagagttatcatttttacgaaagcaaaatcaagattctattttttttttctttcatataacagcatagttggtcctgcaaagtgcaatgagagcagaaaatgttgtaagtgtggaccatggtaaaagcataaagtgatgattctcaggaaggtaaactacaaaagccaaaaacatgatctttgtcagcaaaagctcatggaattttagatctctagaaagagctgaggctaaagcaagtaaagtacaactagaaaagtggcaaattgtgatgataattcaggttgggtctagaactgatttaagagatataatcccaagaaaaaagaaaaaaaaatcaccatttacaggactcatggcataacagaaacagtaacaggagacaaacaa

SEQ ID NO: 16954 - DNA, 264 bp, Glycine max
  Clone ID: PAT_MRT3847_115314C.1
aattagacttggaacttcaaccacatttatgcttcccttgggccttttttattttggggggaatccaaaatttaccggggctttggccagaacaatgggtaaaacccaaaaaaccttttctgggtttaaggcttaattgataaaaaccaggtcttttatccaaatattccaaccaattaaaatgcgcattggcaaatttccttacttttattaaaggaaaggcctttgtcccaattatatttgattaaacaaaccaacttatcc

SEQ ID NO: 16955 - DNA, 317 bp, Glycine max
  Clone ID: PAT_MRT3847_115315C.1
cccacgcgtccggacatatcctgagcagatatgtaactgactatgtctgcgtataaccgtgtttgagtaatagccacaccatggccacactaacgtcacctttgactctgcactctgctcgtctcgactctgcttcgctatcgtcctcttctgcttcttatccaactttttccctcctttgcctttggcggtttccttttgccctttagcttttaattttgaaaggcctaaccatttattctcaaaaaatggaatcgcgttggtaaaggcagtggaagatgagaccaagcttgaactcaccgctatggatgagtctt

SEQ ID NO: 16956 - DNA, 117 bp, Glycine max
  unsure (1)..(117): unsure at all n locations
  Clone ID: PAT_MRT3847_115316C.1
cggntcganagttgccgcancttanaacngganacnnaagcaatcgtcacttgtgtttcaagantttctacaatgncttccnatttctttgtgtatgatttctcaatggaannanaa

SEQ ID NO: 16957 - DNA, 538 bp, Glycine max
  Clone ID: PAT_MRT3847_115317C.1
ttccaatgaaggctttcccgatcgatcacgtgctatggacgatccgtcctgtcgtttgggcgggcgggggggcggaaagaagttcatgggcacagggcaccacggtgggactgacgttgaataagacggtgcacatgtataccacggcgttgagagtaaaccagcgttgataccaaccagatggcaagaagatgtacgataactagggggaaagacgcgcaatagagctaagaaacgccaaaagtaacacaagccggccagcatacaccatgaagatataaaaaggtagaacggctacagcaaacaaaaaaaaacctaagcaaacaaatagccagtaaatgaagagataacggttggtaagaggtgataacacataggtaagaagcggtaaacggtgtggtaaaatgaagtagggagcatatactgcaaatggcctaaagtaagcgggaggaggtgtacttctaggtgtggtgggtttacgctaattatgatgggtggtaacagccaggtctgccggcagcacaaggtgaatacttgg

SEQ ID NO: 16958 - DNA, 144 bp, Glycine max
  unsure (1)..(144): unsure at all n locations
  Clone ID: PAT_MRT3847_115318C.1
gncggagtctcagagatnaattccnacgncctttntnaccanaacctancanctcgtcgacgaccaatccatcgacgacgntatntcctggaangacgacgggtcaacgtntatcgngctggnaccctancgttttngccatag

SEQ ID NO: 16959 - DNA, 574 bp, Glycine max
  unsure (1)..(574): unsure at all n locations
  Clone ID: PAT_MRT3847_115319C.1
gatgatgttcaacagatatattgtgctatgaacactatttagtgtttggtcgcaagaccttcaaaatttgtgatgtactttgtgttaacaatattttatgaaaaataatcctattgcatttttgacattctgacaacaaggatggaagagagatatcacgttaaaatttgtaaaacatagggtgtacgtgtattatttgtaaaacatatgagatatatatgtaatagttttaaaaacatgggatacatgtgtaataatttgaaaagttcagagttacatgtgtaatttaggggaaatcgaaagaatttttccttcggaccacttaaaatcaggaacaattttgggttttcataaaataattaaatttaatgtaaatcaattttaaaaacaaaatggaaaattaacattgtgacaataggaggtgtaaaagaaatgattttaaaaggatatgtaattagtgcgaatcttacgaggattttgntgnaatttgctcttttcttaataacttatctatttcaaattaactatcattttaatctttgattttttaaaattgaattctaatatttttttt

SEQ ID NO: 16960 - DNA, 446 bp, Glycine max
  Clone ID: PAT_MRT3847_11531C.1
acgagaggattgacaacgaaacattgaaggcaatgtgatttgatgtctggctcaacttgttgacagcacaaaaggaaagtcgaatcatcaagcttatgcgcaatcaaatgaggaaaagaagaagaaagagacatggtgctttgtgcagccatggacaaccttaccaagcttctaacagatcatagaagataatttgagagagaaaagttttagacagaagaagtgaaaaatgaatattggccacttaactgagtatttagagacttagatagtttgttatgactaactaactcactaactaacttagagcatcaaactaactcctaactgacttaactgagagtgcagttgaatactgcaactctctgtacaataatatatttattataatggattctgttgtgtatgattggttattttcttataatcatggctattttgtatat

SEQ ID NO: 16961 - DNA, 345 bp, Glycine max
  Clone ID: PAT_MRT3847_115320C.1
gcatgcaagagtaccccaacaaacaatcctatcaatattagccttgtcagttaccttccattaagcattggtatcagaaagaaggaccacgtaattgcattgcatcacccatcaattaattagtaataaataccgtttatgtgagaagaccaaaacgaggagcatgatgttaacttggccttatgactaacacacacattgattgattacacaccaatattaaagtccttcaatcattctaaacctagccaggacaattcctaggaagcaacacccatattaatagtatcctaccacaaccacaaaaaccaattaactacaagaaaaaaaaacgcctcaaaataa

SEQ ID NO: 16962 - DNA, 297 bp, Glycine max
  unsure (1)..(297): unsure at all n locations
  Clone ID: PAT_MRT3847_115321C.1
tgtgagtcaattcagcgatntctatcaggnggagcatttnattaantncgtgantcctgntatgcnggtngtgaggncggcttcctaaggagcnacnatctttggacttggaggccnttgagtagtgnngtgacagatgtngacatggngaaggangccaagccnagtttttacttgaaanacatcntncctattatacttaaaaatcaagtngttcacttngttgnatttggtaatcgcctggcttntgatccganagcanttgagcngcagatgtnatttncatgccctnnaatt

SEQ ID NO: 16963 - DNA, 1320 bp, Glycine max
  Clone ID: PAT_MRT3847_115322C.1
cccacgtgtccgggtgtgtgtaacaggggagagaggaatctaagcggatgtgtgagtttgcatggttggatagcaatggcagcaaagaaggtgtgtgtaacaggtgctggaggattcgtagcgtcttggcttgttaagcttcttctttccaaaggctacattgtccatggaactgtgagagaccctgaacctgctactcagaaatatgaacacttgctcaaactccacggagcttctgaaaacctcactctcttcaaggcagatctcttgaactacgaatctcttcgctcagcaatttctggatgcactgcagttttccatcttgcttgccctgtaccctcaatcagtgttcccaaccctcaggttgaaatgattgagcctgctgtgaaaggaacaactaatgtacttgaagctagccttgaagctaaagtgcaacgacttgtctttgtatcatctttagctgctatttccaatagccccaatttgcctaaagataaagtgattgatgagtcctattggtctgataaagattactgcaaaacaactcagaactggtactgtttttccaagacagaggcagaggagcaggtccttggactttgccaaaagaactggcctttgatgtggtaagcatttgcccttcccttcattttgagagtctttcaactgttaatgcaagtagcctggctctcctcaaacttttaaaaggtgtcaactcaatggagaataagatccgttggatagtcgatgtacgagatgtagctgatgcaatacttttggcttatgagaagcttgaggcagaagggagatacatatgccattcacataccatcaagacacgggatatgctggagaaactaaagagtatatatcccaactacaaataccctgcgaagtatactgaggtggatgattacataagtttcagctcagagaaactgcaaaggttgggttggaaatacaggtcactggaggaaacactcgttgattctgttgagagctatcgggaagctggccatctgcaatcagaataaatgtgacttagtagaatagaataaaactaagtgctatatgatagtagatacttcagttttttaaaatctttattaggattcgattcgattctagtgtgagtatgaaaaagactatataatgagggatgttgtaggtagtttggtaatctcgggttagtctccagcgtccggaggaatattctagtgtaaaccaagaaaaagtacattttcatactactcttctaaaactttttataagaatacaattgacatcgtcaatgtctaatgaaaaaaaccctaaccaaaa

SEQ ID NO: 16964 - DNA, 930 bp, Glycine max
  Clone ID: PAT_MRT3847_115323C.1
cagctccccaagcttaacaggactgagtgcaaactatttgtcttctcaatcccccattgccattgatcaagcatcacagtttaacagtgggagcttgttgggacagtcatttaaccatcaaccacttggtcaaggagtacatgcttcacagagtgctgtttctcaaccgcccaaggacaagtttgagacaaaatcgacagtttgggcagatacactaagcagggggttggttaatttgaatatatcaggacctaaattaaaccctttagcatatattggagttgactttgatgccattaataggagggaaaagaggatggagaagcccaccacgacaacggtaacgtcaactgtaaccatgggtaaagctatgggatctggttccggtatgggccgggctggcgtgggtgctctcagacctccatcaaacccgatgatgggtatgggcatgggaagctatggaggcgtgaacgcaccaatgggtatggggcagatgccaccaccacctagtcgatttcctcctggaaattataactccatgatgggaagaagtggttatcctcaacatccttatgggggctaccgatgagattgaccattatacctaatacctagatagcaatgtcaaactgtatacgattgatcactatacgtagatagcaatgttaaagtgtatgagatggagcactatacctagataagatcatagcaagtgttttgttaagagtttcgagaaacggcaccccaatacctctggtctacatcttgcacaatacatgtaattctctgtaaagtatgtgtgcttattcttgttttttgtactatgctttccattcatttttataggtgttttgttgtgcaccagggaccccatcaaataaccttacttgggttattggtgtttattttttaattaatacccccaacgcc

SEQ ID NO: 16965 - DNA, 579 bp, Glycine max
  Clone ID: PAT_MRT3847_115324C.1
aaaaaaaaaaaaaatttaaaaaaaatttaaaaaaaaaaaaaaaaaaaaaaaaaaaaaaaaaaaaaaaaaaaaaaaaaaaaaaaaaaaaaaaaaaaaaaaaaaaaaaaaaaaaaaaaaaaaaaaaaaaaaaaaagggggggccctttttaaagaatcaaattttactaccccgtcattgcaaggtaaaaatttttttttggggcccccaaattaaaattcattgcccgttttttaaaaacgccggaatgggaaaaaccttgggtttcccaaattaaatccctttgaaaaaaatccccttttcccaagttggttaaaaaccaaaaaggcccgaaccatttgcttttccaaaaatttgcccaccctaaatggcaaatggaacccccctttaagcggccattaaaccccggggggtttggggtttacccccaggggaacctttaaattttcaagcccctaagcccccgtttttttgctttttttcctttcttttttgccaagtttcgcgggttttcccgtgaaagttttaaatgggggcttcctttaagggttccaattaagggtttaaggaaaccttacccc

SEQ ID NO: 16966 - DNA, 461 bp, Glycine max
  Clone ID: PAT_MRT3847_115325C.1
ccggctcggaattccgggtcggaccacacccttccggtacctactgggaaaataagggggtattatttttgaacataacatataacaacggggcggggtagttttaaggttgcctgagcaaaatttgggtttatagattgccggggatttgggatggtttaattctttagtggttaactattttttccattgtttaaatattattttttaagtgtaaattctaatattgccttgtgtagtattagtctctttatatttatggattttttttgttttattttttttctttctttttttatttttttttttttaattttaatttatttttgggtgttggtgtgtttgttttttttatattttctcttttattaatttttcttatttatactattattttattttttttgatttctaaccttctttaattttttttaatttttctctttagttatttttttttt

SEQ ID NO: 16967 - DNA, 1962 bp, Glycine max
  Clone ID: PAT_MRT3847_115326C.1
ccgagggcaagctctcaccttgggtccgcgacaagctcaagcaagcatgcaccgcaagctctcacctttgaagccccaaattttaaaagatataactggcctgacagaaactgagaggatgaaacgtaatagtgtttatccctctgcacttaactgtgatgacatcttgcatgagatcctacttcgaataccaccaccaactatctccaaattaattatcgtatcaaaaatatggttgcgtgtgatatgcagtccttcatttcgtcaatgctacttgaggcaatggggacaaagttttcgacttttgggtttttttgtttgcaactttttatatcttggaagacctcgtgatggctatcgtcgccctcgttgggagcctgcgctcccaatcttgtccacttgcaaagatggtgatgatttgaaactttctggaatcctcaaacatcttgggtacttcattgatagttccaaaggaattattctttctggtttccatccaaagacatattatgtgtacaatactgtgaccaagcaaaagtatgaactcccagaacctcagcagttctataaagttctgtgcatggcattgattgttgaggaatatcttgatagtgacatatgctacaaggtgatccgtgcaagatgtgaatgcaaacttaaggaacgcaacactgtctcaattgagacttattcatcaaaaactagacaatggaagcaatccactctgatgtgctccacaacttttgcattgtgcccaaggacggcagctatggtggttggaggggttgtacactggtttgcaatgtggggaaaacttgccatttatgatcctcgtcttggagacaggtatatagccttgattaaactaccaacaggtgtgttaacacatgagcatgaggaatctgttcttggggagtcatctgatgggcttttgcagtatggccagagcaataatttgggcctggagatatggatacttgagaaggaatcaggagccaactcatctatttactgcaactgcactcatctgaagtacaagtggattctgaggtggagattaaactttaaagtattatggaagcagatgccgtctttaagcacacattctaaagaaacccagatattgtcattccttcctcagaattctacttctatcttcattaggtcggggtggaatattttgctgtgtgatttggagaccaaaacggtggaaattgtcaattatcagggtcgtggaggaaccatttcatgggaatctagcaaagtagttccttactttctaccagcttggccacacacttcctcggtgtcggtgtcatgacaacatggaacaagggaaaacttgtcgtttttcaatctagaggcacttggtcttttccattctgtttttgatctggatatgatgaaaattaagggtctgttttattttctgtgttcacttttaattacaatcttgttttcaatctaaaagttgttttcactagtttctattcaaatctttgaaaacaggaaatagattgaaaacaaggtaacaattttataattaaaagtaaaaaccaaaaacattttgtcaaagtaaacggaccctaagcttttagcttctttgttctgttttgaatagccatagtattagtaggaccttcatttctcttacagtttcagtggtgtactgtacatgcctagaggttgctgtgttatcaaaacactgaaaaatattactcttctgattactttctctttagtcttttcgtagaagaattcagaattgcagcctgatacagtcacaacaagctgcatataacggttttcaaagatgaagatgcaagactcttgttttacccgtttttgtttggttttgctaaagtagaatttgaatatagttttgtttgattatggtaactatgtatatgaatttcatacattgaaaactgatgtcctttagcaaaacacattcggtgtgct

SEQ ID NO: 16968 - DNA, 133 bp, Glycine max
  Clone ID: PAT_MRT3847_115327C.1
ctcttcttcgtctcaaatatcttcgttccttcgattcgttccatttcttccaaaatggccaaagacacagttcgcgttctcgacactggagctgctgggtgaattggttacgaagttggccccaagattgaaa

SEQ ID NO: 16969 - DNA, 114 bp, Glycine max
  unsure (1)..(114): unsure at all n locations
  Clone ID: PAT_MRT3847_115328C.1
gtttttggaaattatgttatacaaaaacatcagtcatcagggcancaggatgaggtatgatctcaggaaatatcttggtcttctcggctactgagatcattcctcatgctcgtg

SEQ ID NO: 16970 - DNA, 316 bp, Glycine max
  unsure (1)..(316): unsure at all n locations
  Clone ID: PAT_MRT3847_115329C.1
gggggggggaaaaggaaaaaggggaggggaaaaaccttttacggggaatcaagcagaaaggggtccctgaattaggctttcttaaaaagggggggggggccgggttaaaaagcgtccccgcgggaacataacaggtgacccccacctccctcccccaaggaagggggaaataacaggggccctaaaaaacccaaagggtttattgggcccccccccttcccccaacaacaaaacccggcccctttggggtgggcagggggtggacttaaaggaaaaaatttttgtgngtagaaaaagggtgttaaaaggggggaca

SEQ ID NO: 16971 - DNA, 277 bp, Glycine max
  Clone ID: PAT_MRT3847_11532C.1
tcattttcaacacgctttttgacctgttggcccgggaagagccctgtcaaaagtctgggactaaaataatagttttttacagataaccagggctcagaattgaatggcatcttgctgggccaagaggccggtttaaactagatagattcctggacttacatgtcctaaaaaaaaacgttgaaagatcttctattaactcaaaaagggaccttaccaaagacaattgttgaaaattccagatgtcccagatggactactttcaagttatgggcaaaaa

SEQ ID NO: 16972 - DNA, 413 bp, Glycine max
  Clone ID: PAT_MRT3847_115330C.1
agggcagaaccattgttggcagcaccaccaggttttggtcctttaaaagcaactcttttcttgggccaaggaaggggtgccaatgccaatgtttttagggttgtggtttccatgggacctgggaagtccaccatggccattgtttgggggtttggcccaaccagagggaaatacttgggacctttttaagttaaaaccctttaatacttgaagggagaattccttggggattttggttgggccactgttggttaatttgttgccccaaaaccatttgccaagaccagggtttttgaggtgatccatgggcaatgggccatgcttggagcattaggttgcttaaccccaaaggtgctaaaaaagtggttgaaagtggacttaagggagccagggtggttaaaagttggagccca

SEQ ID NO: 16973 - DNA, 357 bp, Glycine max
  unsure (1)..(357): unsure at all n locations
  Clone ID: PAT_MRT3847_115331C.1
cctangcgtccgaccgggcagtcccacaggcgatcgtttatggtgccggcctcgcatcatttttgggaacaaccaggtggaaacttggcctgtgctataaagaggctggtaaggggggaggccaggtcggaaatgtacaccaagtgctcacaacactgagagtgctggaagcctaatggcacaagcccaacgactatgaagtttaccacaacagctatcgcagagggccaatgaagggcatagcaggggctgacggccagatgtcgtgagatcagtcgggagactggatggtctgtcaacgcaaagccagaaggagaaggggcaacagtgaggctcaaatcctgatgggaacagggc

SEQ ID NO: 16974 - DNA, 1407 bp, Glycine max
  Clone ID: PAT_MRT3847_115332C.1
gagcaaagcagtaagttcagaatttcgatgctggcacataaatgacggttcaatgagcacgaatccatggtggaacaattagtgacgggtacacgagtctggtttgatctgaaggtgtcatcaatggcagatctgaagaaaaacggttttctgacctacgcttacattcttctccacaatattgtttccattggccaaatcttcaacaagttagcagcagagcagaagaaaaagaagaaggtgattgttgttcggtggtttgcaaggatggggaacacgttctgcttcttctgtggttgcgttgctcaatccagcgtcggcgtggtcgagcagtggggtcgcttccaccgcctcgcccaaccgggcttccactttttcaaccctctcgccggcgaatgcctctccggtatcctctccaccaggatctcctccctcgacgtccgcatcgaaaccaaaaccaaggacaatgtttttgtgcagttgctgtgttcgattcaataccgagtgattaaggaaaacgctgatgatgctttctatgagttgcaaaaccctcaggagcagatccaggcttatgtttttgatgtgactcgtgctattgttcctagaatgaacttggatgaactctttgagcagaagggtgaggttgctagaagctgtcttggaggaacttgaaaaggtgatgggagaatatggatatagtatagagcacatactcatggttgatattatacctgatcctgctgtgcgtaaggcaatgaatgagatcaatgcagctcaaaggatgcaacttgctagtcagtacaaaggagaagctgaaaagattttgctagttaaaaaagcagaggccgaagctgaagccaagtatttgggtggggttggtgtagcaaggcagcgacaagctatcacagatggtttgagagagaacatcctcaatttctctcacaaggtagaaggcactaacgctaaggaggtgatggatcttatcatgattactcagtactttgacacaatcaaagaccttgggaattcatcaaagaataccactgtttttataccccatggtcctggccacgttagggatattggtgagcagatacgcaatggactgatggaagcagccagtgctcaagtaaatgtagaggagtgattttgtaatattgccttagaaaatagaaggtatatctctctatctgtcacacacacacacaatgatattatagtattattattacttgtgtatgtagtatgtttctgctaaattttgtggaagaaaagttttgttcagttggaagttgtaaaataagatgtttttcagtcgtattaaataatatttgcagtcatgctatatgtttgaaattcaaaagagtggaaaaatcttgctttatagcaagaggaaaaaaaaaaaaa

SEQ ID NO: 16975 - DNA, 645 bp, Glycine max
  Clone ID: PAT_MRT3847_115333C.1
tggggatgtgttaaattatattgagtttatagccttcacgagtgagaatgctgacatgcagatgtcacaagtttggggatccggtcaaaataaaaaaaattgataaaatttcaggctcgagggcagcgttacttctcaaccaatgctgtaaactaccgtcaagagccccaaacctctgtcttccaccgacgatgagtccttcttaccgaatgaactgatcttggagatctttcttagggttctggtgagatccctgctgcaaatcacggaaaaccctaatttccgatccccaattcgccaaggaccacctacacctacgtgcctcaatcgccgatccaaacatgacccacctactattggtctctcccaaatatagtgacccctccaaaatcttatctttctcggtgcaatcgctgttccaaaacccgtcaacccctgctgaaggccgttgcttcaggttgagacgcagttgccaaattctaggttcttgcaatggcttactgtgtttgtttaatgttcatacacgttatgtcaaattgtggaaccctttcaccagattgacgtcattccaaagattgtcaatctggttatactcgtgatgcgtattttacttaccatggtttttgctacgatcacgtgcatgac

SEQ ID NO: 16976 - DNA, 145 bp, Glycine max
  Clone ID: PAT_MRT3847_115334C.1
tttctctcctgggatcgaacataactttaggggagggtttctatgtggtgaagacaattctgaagagtacgtagatatcagtggctgaggtataatgggaggcagattgaatgaaaacttaatgtcctcgcacaaaaacgtggct

SEQ ID NO: 16977 - DNA, 292 bp, Glycine max
  Clone ID: PAT_MRT3847_115335C.1
aattcggctcgagctgattgctaagaattgcaaccattttactgatgaagtttgccaacagctaactggaaagcctattcctgcatgggtaaatcggctggctcgtgttggtgaggattctctttgcttgattattctgataccagataagctgtattttgtctttactatgaattcaacttgcccgtgtaatgtgcataactatgttccgttccgttgtgtccctactcccttgttcatgttttaaatgatatgctgccatgaatgtgaaaaataaatttttatattattg

SEQ ID NO: 16978 - DNA, 481 bp, Glycine max
  Clone ID: PAT_MRT3847_115336C.1
cacgagaaaaaagaaaaataaataaataaaaaaacgaaaagaagatactaataaagatattaataataaaaaaaacggaaataataaaaaaaaacacttaataaaaggaaaagaaaagaagaaaataataactaaaaataaaaaacaataaaaagaggtaaataaataaataataataataaaaaaggggcgtcttcaaaacaaaaatgaggtattttaaaatacctccctgccgaaattcatctgaaatgatagaaatttccggcttaaaagacgagaaaaaagaaataaaaacgggtcaaaaatggggtatgacaagtattatcaaattattgttactatattttttaaatatatgaatttgtggtaattgcaacttatgggagtgactcttaattgtcttttatatacatgtatcttttatgaataaaatagtcaattatttgataatttatttatatttagtatatggaaagaaatt

SEQ ID NO: 16979 - DNA, 402 bp, Glycine max
  Clone ID: PAT_MRT3847_115337C.1
gacagagatagaataaaaacagaggccccatttgcgatcttaaacaacctataccctaacgcccttatatcggttcgagcttgctgtactcgacgacttaactgtcaaacggacgccacagtatttatataaagctgcacagccctttacgctagtgcgttaattaatcagcaataccatgaccaactgccgaattatgagtccctcaattgtctcaccttatattttccaaggatataatcggattcccgaatccgcaggaaattcatggggcttttgacttttctatcgcgatcatatgttatcacgagatcagactgttgatggtgctgcataagtatctaatctcactaacataactgcagatgtaagattacatagagatgatgcgtgatatacatc

SEQ ID NO: 16980 - DNA, 478 bp, Glycine max
  Clone ID: PAT_MRT3847_115338C.1
tgttgtttttttgagagaagacttattttttttgaaaaagcagctccctttggactatactgcagaaccataatggttccttataaatatccccagttgaacaaaaacctttaatatattgtacttcagagaaagcacttttaaatgagggaaaaaactgattaaattgtttgggaccacacaaaacaaaaaattgatttcaaattatttagcaacctccccggttattgaataattattaggattcccatcctccaaggccttatgaagagacttatgtttaatgctttaatcctccaagtttatctgtagaagctaaagttgaagtctttggatctacagatccctatgttataattgctattgtaacagaagaaccatttgattggatctctccacattatttgtgagtacttccctgggcttaagaaaccctttaaatagactgctaagttgggaattgagggacttatgacat

SEQ ID NO: 16981 - DNA, 332 bp, Glycine max
  Clone ID: PAT_MRT3847_115339C.1
aatacaaaacttgggagaggctttcatcgtggcccttggaatattgggcaattaatgttacatcacatagttgtgaaggaaggctgataatttccatacatttttaaaaacccaagtcccctgctaatttgtcatctattactaaaagattgtgtgcatttcatcataattggaaaatacattaagactttgctgttgttaaaggcaacagtaatgtggcaattgggagtcatttgatttttcttctctagaaagagcagcttcaaggattgattatcatttaacaagacagtgttgtttgaagcttcacaagggcaaataaaacctcattt

SEQ ID NO: 16982 - DNA, 808 bp, Glycine max
  unsure (1)..(808): unsure at all n locations
  Clone ID: PAT_MRT3847_11533C.1
ccacgcgtccggggaaagttctaaagaaagttggaagaggaggcagccgagtaacactgacaaagattcaaaaaatgaggagggtgcttttgacgacaacagggattgggagttgcctagacatggttatgagaggatggataatgaaaggcctcatggacggtttggtggtagaaaagatgcgagcaggggggaagctgttaaaacatccacaaagtttgggatttcgaatgacaattatgatgtgatagagatccagaccaagttttatgactatgggaaatcagagtctgtgtccaaccataccaagagaactgaaactcatcagcagtacaatgctaaatcaggtgctaatgatgaagaatgggcatatcatcaagatgaaagaggaaggaagagtgatttatctggttctgggacacctggagaagatctgaaggagagatatgctgatgatgactatgatttttatgggggaagaggaagaggccagaaaggtggtgtatctgcccgtgttactggtggccaaagttctagtactggtggctcacagccccaatatggaaattcggagtctggatcctttaacagagctggtccacaaggaataaaagggaacagggttggtagaggaggaaggattaggcctactgngagagacaatcagcaagttggaataccgttgccaatgatgggatcaccctatggacctcttgngatgcctncgcctgggccaatgcagcctctttcacatggtatgtcacctgctcccggtccaccaatttcccctggagtcttcatgtcacca

SEQ ID NO: 16983 - DNA, 324 bp, Glycine max
  Clone ID: PAT_MRT3847_115340C.1
ttcccttctttgggaatccccttttttatttacttcctcgccttcttcttcttcttcttcatctgcatcatgatcatcatcatcatcatattctccatcttcttaataatcttcttcttcttcttaaacttcatcctcatttggagcatgcttggccttctcctcagggggaatcccagaatcgggaacaagcaacgcgcaaaagcccttggggagggggctgaggcgatccaaccgacggccgctcggggacttaaaaaccaccttcgccgcaacggagagacagaccggggccccctcccttccccttattataaaacactc

SEQ ID NO: 16984 - DNA, 312 bp, Glycine max
  Clone ID: PAT_MRT3847_115341C.1
aagaggggagaaaattgtcacactcagcacttagctttttattaacacgtatatatatatagtccagagaaagagagagagaaggggaaagctgcctttggataaggattagacactcagcttctcacacactcaacatgacaacacataaagcttaatacacactcaaaacagccttttacctacacagctgtctacacaatacagctgtatacaatatatatttaacactcaccctcaagctggagcacataaattaaatgctccaagcttggaacatgagctgaagcataagaaagattctttttttta

SEQ ID NO: 16985 - DNA, 271 bp, Glycine max
  Clone ID: PAT_MRT3847_115342C.1
cgccggtcttttccgtcggcatcgccatcagtcatgggccacgaacactccaagttgtcagaaggacaaggagcgcgttgtgcccgcttcaaagagcgactgcgtcttcactttcgtcggccgagaagcggaaatggctcttacgagcacaagcttctccacgccgtgacttctcggaatgggttctagcctctttggcgggagaagttaggattgaggataggtgcttgcctcgagacaacttgcgtacagacttgccgcagcagccttt

SEQ ID NO: 16986 - DNA, 176 bp, Glycine max
  Clone ID: PAT_MRT3847_115343C.1
gaccaacacaaacaatagtgcataacgtttttcaatgggcaataatcaattggcaacacaagaactccaatcgggaacaatgttaacaactgcgttaatgaggaaccaacttatgacaacaagaagcttaaggacattcccaaaggttctttttggcctgaaaggtggacaaggtg

SEQ ID NO: 16987 - DNA, 204 bp, Glycine max
  Clone ID: PAT_MRT3847_115344C.1
acgaggtgacaattacgtccacggcgttgcattattgggttctgtaaatgatggtggccattcacaatttgtctcaattatcatcatgtttaatcacgtccaatccaatgtttttgttatttaaaaaaaaaaaaaaaaaaaaaaaaaaaaaaaaaaaaaaaaaaaaaaaaaaaaaaaaaaaaaaaaaaaaaaaaaaaaaaaaaa

SEQ ID NO: 16988 - DNA, 145 bp, Glycine max
  Clone ID: PAT_MRT3847_115345C.1
tcaattgcccccatgcttctaatttcatccaactgaccataatctggtgttacactatctctgccgattatgcgcatcgcagtctattgacgttcccctcatcactgaaatctacctatacatatactacacttggaacttacct

SEQ ID NO: 16989 - DNA, 405 bp, Glycine max
  Clone ID: PAT_MRT3847_115346C.1
tggaatttggtctcggggtttattttcccttattgggggagggaatagccccttaggcttgggcctcggttgtaatggtggcaaccaaccaccctaactttggcctttcctggtaaatcttccttggttgccactgcaaagtcctcgggggtggaaaccgaaccaggagcttgggttttggcaccccggcccacccttattaggaggaggattgaccccaaccatttttggacttgcaaaagggatgggaaatggaaatggggtaaaacctttttcattaatccctgacagaactcatcatcaaagaagctctaaaggaccagtggcattcttgggcgggatgtttgcggtatttttagactttgattgaatgaggagcccctcaagggaatggttactaggact

SEQ ID NO: 16990 - DNA, 203 bp, Glycine max
  Clone ID: PAT_MRT3847_115347C.1
attaaaatgaagcgcactatattagatgaaaaccatctgtcacatactctcaatctaagacgacatttggataacatttctaatgtattacaagatatagtctcacttagaactacgaataatgaaatatgctagcctgattcatcgaacatttggaatcactgatggcattgaaaagtccacaaccatgatagactacttga

SEQ ID NO: 16991 - DNA, 164 bp, Glycine max
  Clone ID: PAT_MRT3847_115348C.1
cttaccaactttgagatagacgatggataactttatgagcttcataagtgactgataatgctgtgagttgagggtttagggacgagcatccagtgtgtattgtaggtctgcgataattagcctgctgaggatacggtaatattcgtcgaattcgtggacatatg

SEQ ID NO: 16992 - DNA, 450 bp, Glycine max
  unsure (1)..(450): unsure at all n locations
  Clone ID: PAT_MRT3847_115349C.1
ccgcgtcgtggtctcggtttcggctcggtctcctccggctgtgggcctatgcccaacccgctggctcctatcttgcggtctctgttctctccaggaccatcctactgtcgggttcaccatgtctagtgcttggcnttcatagattcgcatttgttagcgtgtcttacgttgctccgggcactcctcttgggctcgccgtcttcttcaaaatccctggcgttttccgtgtgggaagcctttctgacaggccctctggcggtggcatataccttgactcctctgtgctgcatactgactaccgatcatttgtggattttgtcttccttttgacgaagatttcattcatagctatcatctcgatggctactctttctttgtggttggtctggctggatgacagtggacacctgctgtgctgaacacgtacaatcttcgagatgcngtttcgcg

SEQ ID NO: 16993 - DNA, 3106 bp, Glycine max
  Clone ID: PAT_MRT3847_11534C.1
atgaagttgatgttggtagtgtgaggacggtgcaagcggggagggtgggggtggggggtggggtgcgtggcgggtcgagggtgcgggagggggggggggctgcgaggagtgagcatggggagagtaaaacctctggtggtggtgatagggttgtgaagtctactagtaaggaggatagaagaggggattctgagagagggaagagtaaggggaagtcggattcgggggatgttggtcgtgaggagagggttgagaagcccaggcaccatagggcggctgctggttatgatgtggctgaaacctgggataggtcgttgaatgcagaggaggatggacatgtgcgggttagggataagagtaccagggaaagtgggaactcaaacaggtcgaggacgccggagaagagtggaaaacgccatcaagatttggagaactctgaggtggattatgaaagaagtagtagctttaaaaggaaggagcatgaaggtgatggctataaggatgatagatccaaagggaaagatgatacttggaatgataggaggaaggatcgggaaagttctaaagaaagttggaagaggaggcagccgagcaacactgacaaagattcaaaaaatgaagagagtgcttttgatgacaacagggattgggagttgcctagacatggttatgagaggatggataatgaaaggcctcatggacggtttggtggtagaaaagatgtgagcaggggggaagctgttaaaacatccacaaagtttgggatttcgaatgacaactatgatgatatagatcccgagaccaagttttatgactatgggaaatcacaatctatgtccaaccataccaagagaactgaaactcatcagcagtacattgctaaatcaggtgctaatgatgaagaatgggcataccatcaagatgaaagcggaggaaagcgtgatttatctgccactgggacacctgatgatgtcttgaaggtgagatatgctgatgatgactatgattggagactagaactatttggtgaagaccacaatatccgagccggttggctgactgttggtaaagaattatcatcttcaaattttaataaagaggcatatgtgaaaagttttgccgacaaagatgggaaagtttggcaaggaggtgggggaagaaatccaccgccagaggcacctcatctggtggtgactactcctgatatagaggttggtaggccactgccaatgatgggatcaccctatggacctcttggtatgcctccgcctggggcaatgcagcctctattcacatggtctatcacctgctcctggtccaccaatttcccctggagtcttcatgtcaccatttactcctggtgtttggcctggagcacgaggtgtcgatatgaatattataggtgtaccacctgcagtgtctcctgtacccccaggtcctcgatttaatgctgctaatatagggaacccaccaaatcctgtaatgtattataaccaatcaggccctggaaggggaatacccccaagcatttctactcctggttttaatcctacaggatcaatgggtcgaggagccccacctgataaaactccagggggatgggctcctcctaaaagtagtggaactcttggtaaagctccttccagaggtgaacagaatgattattctcaaaactttgttgacactggtatgcggccacagaatttcattagggagcttgagctcacaaatgttgtggaggactatcctaagcttagagagcttatactgaaaaaggatgagattgtggaaaaatctgcatcggctcctatgtattataagagtgatttgaaagagtttgaattatctccagagttctttggaacaaagtttgatgtcattcttgtagatcccccatgggaggagtatgtgcaccgtgcccctggtgttgctgatcacatggagtactggacatttgaagaaataatgaatctcaagattgaggctatagcagatacgccttctttcatcttcctttgggtgggtgatggtgtaggccttgaacaaggtcgtcaatgtctaaaaaagtggggttttcggaggtgtgaagatatatgttgggtaaagacaaacaaaagtaatgcaactccaggactgcggcatgattcacatactttatttcaacattcaaaggaacactgcttgatgggcataaaaggaacagttcgtcgaagtactgatggacatataattcatgccaatattgacacggatgtcattatcgctgaagaacctccttatggttcaactcaaaagcctgaagatatgtacaggatcattgagcactttgcccttggaaggaggagactagaactatttggtgaagaccacaatatccgagccggttggctgactgttggtaaagaattgtcatcttcaaattttaataaagaggcatatgtgaaaagttttgctgacaaagatgggaaagtttggcaaggaggtgggggaagaaatccacctccagaggcacctcatctggtggtgactactcctgatatagaggctcttaggccaaagtctccaatgaagaaccaacaacaactgcagcagcagaattcagtatccatttcgttgacgtcagctagtgcatcaaacagaaggcctgctgggaattcgccgcagaacacaactgcactaggcgtcaaccaagacgcttctagctcaaacccttctactccagctccttggggttcacctctggagggcttcaagggacgtgaaggctctgtattgccttcagatgataaagtaatggatatgtacgggtttcatggaccagcatcagcaaactatctagattttgaatcatacagacaaatgaatctgttgtagcataactcttaaggataatgttccatgattacgtatcgtgtaatttttttccccaccaatataaatgggaagaaaattattcatattttgtatgttcattttttattagcattggtgaatgcattgtttaaccagcggaataaaagaaagcgtcagattactgtaaaattagctatattattattttgtcgaatgcttagaatataatttcaagtcacaagcttcccgtggc

SEQ ID NO: 16994 - DNA, 1070 bp, Glycine max
  Clone ID: PAT_MRT3847_115350C.1
ggtaggttcgtataccaaaccagttgcaggtgccactccaggatatgcatcagaggtgatctttgctgatggaaccttcattgatgggagtacaagtgagctttcatgtgatggaccacttagagagccatttactgtattttgccagggtggcacccattggactcaatggggactagtcctatgagaagttttgaaatcattatgatggaatataattttcaatcagaagtttatagaaaatcagtgtgcaacattcagagcatgacatgattcagattggtacaaatataatggtacactataggaattatttgtggaagggagcacctactaaaacttatttttggaattgtgttccagcgcatgcaggttctgatatagtatataatttttattttttatttttatctcattggtagaattgctagctagtgtgtagctgatcacaccatgtcttctgtttgaactttgaagcagacttcttctcatgtagatacttttaccaatccacttgcctgatttattccagtctgatcataagtggtgatctttgcatatggaaccttcattgatgggagtacaagtgagctttcatgcgatggacctcttagagagccatttgctgtattttgtcagggtggcacccattggactcaatggggactagtcctaggagaagttttgaaatcattatgatggaatataattttcaatccgaagtttatgcaaaatatcagtatgcaaccttcagaggatgacatgattcagattggtacaaatataatgatacgctataggaattatttgtggaagggaacaccaactaaaacttatttttggaattgtgttccggcgcatgcaggttctgatatagtatataatttttattttttatttttatctcactggtagaattgctagcttgtgtttttagctgatcacaccatttcttctgtttgaacttgaagcaaacttcttgggatgttgatactttgtagcttgtacttgtcttatctatttaaatctgggccaaggttgtagaagttcaggtataatattttttcata

SEQ ID NO: 16995 - DNA, 382 bp, Glycine max
  Clone ID: PAT_MRT3847_115351C.1
acgcgtccggcggctcgccgcccacgccttcgcccttattatatcatatatcgaatcatccttaagatggtctttatttagagtcaatattgcactgtttaatttatacatatatcaacgatgccgcttactatgttagcataaccatatttcatattggaaccaaattttacttacacaagatatgtaacatcacacttcacaagacccaaaagaacacaagggaacatatgaccttgaaagtaccattcttgacatatacaacggaagcaaaaatgtcttatatgatcatcacccttaaaagacatatgaacgactatatcaacctttcttatcatgtgactacgaaagtgacactgtgataaaggacaaacacttgttt

SEQ ID NO: 16996 - DNA, 281 bp, Glycine max
  Clone ID: PAT_MRT3847_115352C.1
cgcgctgtgccccgcgccgcatttctctccccgctgcttccccttctcctgggcttcctgctcctctccgctccgcatggcggcagcggcctgcacaccaagggcgcccttcccctggatacggtcactttctacaaggtcattccaaaagcaagttcgtcttggtgaagttcgacacccagtacccctacggtgagaagcaggatgagttcaagcgtcttgctgaaaactcggcttccagcgatgatctcttggtggcagaggtggggatctcagattat

SEQ ID NO: 16997 - DNA, 1103 bp, Glycine max
  Clone ID: PAT_MRT3847_115353C.1
cctacgcgttcgcaaaaaacggagacaaaaaaccaacaacaaaaatgggcaacgatggccatggaggtggggggcgcaacacaaccacaagcagttcaacaatgtggcgatggtccgcctatggattatacgggcagactgtcaaatacacgtttctcatcacaaacgtgttgtccgtggttttctccctgatcacattttcctatggcgcttggctttatcacaaccggtcccaatactatgagctgttggcaccaagtttgtacgtggatgtttgcctgatcatgatggtgatctcatcattggtcgtggctaacagtgtgattgctgtatattctgtgctaaaagagctccgatgcctgatttattcgttttctaccgcatctgtgattctttgtttttcgttgctcattggtggaatcatgggacttgtttttcgccaaaaattagtccaaacacctctgcacttgaagatgaacacatcgttgaaggagttgtacggcttgtccgacatgaccgcaattacattggcctgggacagttgcagcgcgagttccgatgctgtggcgtcaacggcactgaagacttcaccatttggcgcacctccaaatggcacatgcaccaccgggagccaaagcccgcattcccccagtcatgttgtgtgccggaacggttggctgagtgtgtggagcgcagcattaccatggacaaggagatgagcaatggcattcggccatcaatggagcaattagcagccgaagcagcgccaacctcggcagaagcggaagcatctgttgttggcggtggtgaacatgttgcgcaaaatcaacaacaattaccagccgattcatcatcatcatcgtcaacaattttcatgacaaatttcaccggatcagaggcggcggctttctacacaaacacttgttacatgccgttcagaacagatttgctctcggtagttcatgttgcggcttggctgtcaatttcttgcagtttctatctgttggtgccagccttctttgcaactttctttgctaaactggtcaaaaaatgatccttgctttaccattccaattcttaaattgtgtataaattttatttgt

SEQ ID NO: 16998 - DNA, 726 bp, Glycine max
  Clone ID: PAT_MRT3847_115354C.1
atgaccggctgcgagaagccgaatgcccgggtcgactctgcttccgatgagtttgaggaagaagaatgagaagaaagagcaggggcaaacgtaggcgtgcggcatctgcaacaactctgagtccttcttccctctccgccattcccattctttgggatgcgtatgataccatctgcattcactgcaataacaaaggcgaggaggccaaggaggatggacttttgatttgcagcggaatgggctgccccgtcgctgtccatgccacctgcctcgccaccggacctaaatttgacggttccggtaacttctgctgcccctactgctggtacaagcgcgccgttgacacgtgtcgacgcctcagggagaaggccctggaagccaagggagacttgtcacgctttctggacaatcacgaccacgcacgtgcggctgcacatgtggatctggttgttcaggatagtgaagaactcatggaggaaacaggaacacaagcacagtctaaagataataaagatgaggagggagaggcacgtgtgaatcaggttcatgatagggaagaatctgagacagaaccagaagagaataaagaaaaggagggaaaggttcgggatgatgaagaactcgtggaagaaagagaaagaaaaacagtgacagaagcacaatctcaagagaataaagatgaggaggataagtttcaagatgatagtgaagaactcgtggtggaaa

SEQ ID NO: 16999 - DNA, 379 bp, Glycine max
  Clone ID: PAT_MRT3847_115355C.1
ccacgcgtccgaaaaaaaaaaaaaaaaaaaaaaaaaaaaaaaaaaaaaaaaaaaaaaaaaaaaaaaaaaaaaaaaaaaaaaaaaaaaaaaaaaaaaaaaaaaaaaaaaaaaaaaaaaaaaaaaaaaaagggggggcccttttaaaggacccaattttacttccccgggctggcaacgtaaaattttttttttaggggccccaaatttaatttcccgggccggggtttaacaacggggggacgggaaaaccccgggggttccccaatttaatgcccttgaaaaaaatcccctttttgccagggggggaaataaaaaaaaggccccccccgatcgcctttcccaaaatgggcccaccctgaaggggaaggggaccccccct

SEQ ID NO: 17000 - DNA, 285 bp, Glycine max
  Clone ID: PAT_MRT3847_115356C.1
ccactgtctgttcgtccacgcgttcgtggtaggagcaatcctttatcatacatatgtggacatgcagagtatcattattacctattagggagagatgacgtcgtatctgacctataataccctgatctacataggacgaacaggccgagggtactacgctacctacggaaaatcctagtacgggccaaggggcctctacttgatgtacagggccaaagacgccaggagggccctcgccaagatgagcaagagcgacgaagacatctccccctccctcgacggcct

SEQ ID NO: 17001 - DNA, 332 bp, Glycine max
  unsure (1)..(332): unsure at all n locations
  Clone ID: PAT_MRT3847_115357C.1
gtctcaactcatgaatggtgtattggtttgtgcagagcacctgaacttttgctgggtgctaaagaatactcaacatcaattgacatgtggtcagtgggttgcataatggctgaattaattgtcaaggagcctctgttcaggggtaaaagtgaacttgaacaactcgacaaggtaaggttattattactaaaatgacttggttattacttttttcttcnnaaaaaaaaaaaaaaaaaaaaaaaaaaaaaaaaaaaaaaaaaaaaataaaaataaaaaaaaaaaaaaaaaaaaaaaaaaaataaaaaaataaaaaatannaggggggggccccc

SEQ ID NO: 17002 - DNA, 812 bp, Glycine max
  unsure (1)..(812): unsure at all n locations
  Clone ID: PAT_MRT3847_115358C.1
ccacgcgtccgcggacgcgtgggcagacgagaagaggggaactactacctacggtgatggagacagtgctcgtgtcgatcatggagtggtgaagaagaagaagaagaagaagaagtgtataccacaacatggtggtaggggaagatcgcacgtagcttgtgttatataaagcagcggtaaaggactactactactactactacttctgccacaaactccaaggtgtatgtttctgtttctcatcccttcttcttattagcaaactaaaaaccacatcacactactactactactactacttcttctacttcctaatgtcccttgtttgaactcttctggaatccgatgatggctttcatgtgctagctagctaggccttttttcattattattctttcattctttcctgcatataataacaacctcacattcttttctcattacagttcattatttccccccacttacagattcaatattcattataggaaaacacttcgaatttgtaaagataaaaaaccgacgttcgtttgttcattttctccgtttgttaaattaaaattcatcggattcctttttttcttggacataaaagaattcgttagaaatttttcacacactgcattttcttttctctctttcttgacatactcatgcaaaattaagtttttagaaacaacacaagggaagcattttgtgcatagttaactattactagataaagagaaaggggaagggaaaaagaagcagcacaacacatagcattggggtgagtgaagaaagaagcaagcggcgtacanaaaccaaaacct

SEQ ID NO: 17003 - DNA, 206 bp, Glycine max
  Clone ID: PAT_MRT3847_115359C.1
ctcgagaccaggctgatgcacatggaaaaggaattgttggaaaggatacgttcttggaagggattaatacttcgttaccaactttgggagcaggagagtctgctttcatttttattttggattggaccggaaccttgggattccccgggccgttttccttaaggacctccttccaggtggagtctttcttaagaagttgacctttg

SEQ ID NO: 17004 - DNA, 392 bp, Glycine max
  Clone ID: PAT_MRT3847_11535C.1
ggaaaaaacggggcgacccacgcgttcgtgcaaacattattttgttaaaaaaaaaattttttattaaacaaaaaaaatcaattaacgggggggatatttaaaaaggaataaggacaaaaaaaaaaaaaaaaaaaaaaaaaaaaaaaagggggggccgttttaaaggatccaaatttactatcgctggattgcaacaaaatactttttttttagggtcaccaaaattaaattaacgggccggggtttaaaaacgtggtgattggaaaaaccttgggtttaccaaattaaatggcttggaaaaaaattccctttttgccagttggtgaaatagcaaaaagcccccacccaatcctccttctaaaaattttgcaaatctaaatgtcaaatggaac

SEQ ID NO: 17005 - DNA, 1069 bp, Glycine max
  Clone ID: PAT_MRT3847_115360C.1
ggctcgagcgagaaagaaaagcgagagtaacttcgaatctgattttcatcccttaacaccaacgccaacgccaacgccaattccatttagatcacagtcccttcgattcctgctgcaacatactgtcaacaaagccctaaaatggaggggactgtcttcactcctgcactgcaagaaattgagcatgtaaagtctgatcaaggagaaattctgagcaagcctttcttggatgcgtgcaaacacatattgcctgtaatagataagtttggagctgctatggcccttgttaaatctgacataggtggtaacatatcgagattggaaactatgtattcttccaatccatccagatttaactacctgtacagtttggtacaggtagaggttgaaactaaaacagctaaatcatcatccagttgtaccaatggacttctttggctgacaagagcaatggatttcttggtggctttgttccgaaacttaatcgagcatgaagattggccaatgtcacaagcatgtacagattcgtataacaagactctgaagaagtggcatggctggcttgctagttcaagcttcacagtagtcatgaagcttgctcctgataggaagaagtttatggacgtgataggaggcactggcaatatcagtgctgacattgagaaattttgtacaaccttttctcctctccttgaagagaatcacaagtttttggctcgatttggcttagatgatatgaaggcatcatgaatcacagattcagaagttcccgatgagtagctcttgcatgctcacacccatttcatatctactttactagcatgataaataagcatcgactttcatattgtgcctctaagtactctattaagaacagtgtttctatggtatctcaaaatttgttacagttagtttattatgaaggttaatgctagtggagtttagtatcttcttgatgatttaccgattggctagaaccaaactcatccaactttggttcagtatatggatggctgcttggttgtataagtctgattcaattataaaatttataacaactgtttttatg

SEQ ID NO: 17006 - DNA, 497 bp, Glycine max
  unsure (1)..(497): unsure at all n locations
  Clone ID: PAT_MRT3847_115361C.1
gttcggtgatccgggactcactgctgcaggatggggaatttagcatggatcttcgtaccaagagcaccggtggggcccccaccttcaatgtcactgtcaccaagactgacaagacgctagtcctgctgatgggcaaagaaagttccacggtggtttgatcaacaagaaatgttatgaaatggcctcccaccttcggcgttcccagtactgacctcgtctgtcccttccccttaaccgctccccacagctttgcacccctttcctacccatacacacacaaaccattgtatttgttgggccattaccccatacccctgattgctgccaaatccacatgggctgaaggccaaagctggatggacagacacctgcccctacccatatccctcccgagagtggatggaaaacttttagtgtctagaggatttttcttttctgaataaaatagattctactnacgttgaacttagcaacgacaggtatggtcttcacttaat

SEQ ID NO: 17007 - DNA, 1138 bp, Glycine max
  Clone ID: PAT_MRT3847_115362C.1
tacggctgcgagaagacgacagaagggggaggattaccgtggcaagaggaggaaggatgaggaatatcttaggagggagcatattgacaaagaagaagttctgcatggctacagggaaattgctagtagtcggcgcagacgagaaagagatgaagtattggatccacgaaagagggatgacctgcaaagagctagagataaccctgatgatcaatatgctactaggcagaaagatgaggcctgggtactaaaggagaggggtgataggcagagagatagggaagagtggtaccggatgaaacagtcccatgaagaacacctacccaagcgtgaaagagaaggacggagttctgtaagaagtggacgaggggctgaacataaactttctgagaaagaataccaatcccgagaagcaatgcgacacaatgaccaattgaagagaagggatcgaattcaggatgaaagtccacatcataaggggcgagatgatgcttctgcccgtggaaatcaatatactactgaggaaaggcgatctaggctagaaaggtcaagtagtcgtagtgatcgtgttgctaatgtttctgataaccaaaaagtcaagcatagagaaggctcaaggaaaagcaaagaacgtgatgttagtgaccttaatagtttaggcctgtccaagagaagtcaagaaaatcaaagtggtccaaccaatgagaaggtatgcacacttgcatgtaaaaacgtgaaactatctggagagtaaaataatctttacatgaaaatgaagtattctctatacgtgactcttagaatcatgaaggtctagaattatgtttagttgcaacttggtgacctgttatattagaagtgttggttcaagccacataatgtatgtcaatgcacgcttgatcatgaataactagcttgtgcatttttattattcctccttcccctcttaatatgttgggaggaggtggaaattaaaagatatgttcttttgaggcattgttttgtcttttttgtcccagtaggtttgccaactttgaagactcaacttttggaagaaagtagttaggtggcttttaaacagattgtatgatgatgtttaataaatccccctagtgttaattggaatttattccatccc

SEQ ID NO: 17008 - DNA, 473 bp, Glycine max
  Clone ID: PAT_MRT3847_115363C.1
gggtgggagattgtgatagtccaagagaagaggggaatttcagctatcattgcatagtgtagctggattcacatcaagaaggtccctcatattgtggggcagtggctggaagaaattgtgctaatagactgtggagcaacacacaattgtatcgcatatcaattggtatcaaagctcaaaaagggctacttatggagggcttggcaataaagactaagtgaaacatcatagtatgcgggtgccgagatgtcaactcttaggggcaggtgctataataggaacttgggtattatagggtgcctaattcctgtatcaagtaatatagtatgctcaatggacaatttaagttcttggttcttctcccttaacagctagcttttagggaggcttccccaagtactttggtgcttatcacctgtgtatgtgcttaacaagaatctttcataatttggctaatgctttcttgtttggtt

SEQ ID NO: 17009 - DNA, 840 bp, Glycine max
  unsure (1)..(840): unsure at all n locations
  Clone ID: PAT_MRT3847_115364C.1
tttcttgatgcctgcagctcttagttacagagcctacttactaaattacatgtacttcggtcagaaccggtctaacaaaaagaaccaacagggtaacagtgctgaatcaaataccagggaatgactttctaagaatgatatgctaccacagttttgcatgctcgttttggagatcttctgatgtcttcaaatttagttatcagaaatataaacaagcacaaaataaataaataaagaaagaaagaaaaatattaccaatcaaaaatggcacacaaattatatgatctggttaagctcaaagtactcaaatgtggtcattaaaaattatattttcattaatttgtttgatgagtctctagcacaagcatatgtgtgcgtacaacacgtttaacaggcctggaagtaattacgatcaacatcaggtgttcccaaagtataagcaaagaaacacagcagtaagcaaataaaacatccaggtcaaagcatagttaaaggaaacagaactataggtcaattattacctcaataaatgcaggcccaaagagactttcctctgtatgaggaacatatatcttgtataactgattgtcaaaagcacacgaaatattgtcttcagtccagctatgtggagatggcacacaatactcacatttcagatactttccagaaaatgatacaagaagcctgtcatgattaccacctcaatacagtcagaaacacatntgacaggggaaccagatcaaaactagctgtacaaagatgacatttgaaaattatatcaactgaaataaaagaaagtntaaagcatgatcaatttgatattacattagatatgctaac

SEQ ID NO: 17010 - DNA, 250 bp, Glycine max
  Clone ID: PAT_MRT3847_115365C.1
ccttacacactcagggcccgaggccgttcttcttttacccctacaaaccggccatagactgtcgccctatacccactgcacctgagagagctgcaaactgcattccacactggctcgccacccccagcgacattgctgtgggatggtgacttaaccgacggctataacatgtgctgccttcactatacaggtatcccactacctacatctaactgccaactcgcacactgctctccttaatggaccgcat

SEQ ID NO: 17011 - DNA, 470 bp, Glycine max
  Clone ID: PAT_MRT3847_115366C.1
caaccaaggaagatgaaaatggaagagttttcagaagaggaggatgatgatgtggggtttttgaatggaagtgaaagtgagcttggagaagaaagtgaagggttaatagatgagttagattgggattctgatgatttggaagatgagttattgggtgaagatgataatgagaagttggaattggatgggtttacacctgctggagttgggtatggtaacataactgaggagtatttggagagggtgaagaagaagaaggtttccaaagctgagaagaagaggatggctaaggaggctgacaaggagaaagaggaggccaccgtgtgtgcccggtgccattccttgagaaactatggccaggtgaagaaccagacggtggagaatctcatacctgattttgatttcgataggttgatttcgacgcggctgatgaacccttctgggagtggcagtgctactgttgttgtcat

SEQ ID NO: 17012 - DNA, 435 bp, Glycine max
  Clone ID: PAT_MRT3847_115367C.1
caactacactaatattctctctctctctctgttgcaacgccatcaacaacgtcaccatgatggatgcggaatcgggcaagcgctctgcttccaccttttctccttcttcatcttcttcttactcctcttcctcgtgcctccgtttggatcggctcgtcgactccgaggagattgaggcggcggagactctggcgcagttggcaaactgcaacactcactcctccgataaatggtgcaccaaacaagacacaacccgagtcatgcgcgagtcgccgactcttcgtcactcggatctctctcttgggcctggggtcagcagccagatgaaaaaatatccactacatctgtagaaacagaaatgtttcagcaagatgactgctcgaggcacatgaaggtcgagcaggatgctgatgtattacctaacacaagttactc

SEQ ID NO: 17013 - DNA, 196 bp, Glycine max
  Clone ID: PAT_MRT3847_115368C.1
gttacgattaacactggatcttctgagtgggaccattcatcggcgcatctcttgcaacacgctaccaccaggtcgtaatcagggccattcccttcaagtccaagtgattcaatcaaacatttcatgcttaatcaatttgggaacaacatcaacaccaaaaatcaagccaatgcttgtggctattggtttcatttca

SEQ ID NO: 17014 - DNA, 777 bp, Glycine max
  Clone ID: PAT_MRT3847_115369C.1
ctgcgagaagacgacagaaggggaagcaacaaaccaaaaactcaagtagcaactatattgataaaatctgttccaacaactccaacatttatggcacctcctcaggcagacctatggaagattggcgcagaaggctttgctctgatagacaagttctatggtccatcaagggggaacagtgccaatgatgcattccatgggccaaggggagaacattgttgggtggtttataatgtgtccaatgatgtgatggaagaatctgctgtagacccatgaaattctaagctttttggcttatgcatgttaattattaggtatcttcaaatgggtctttgctgtttcatgttaggttactctcttgtatgatttatgtatagaaaaaaactcggggacctgcaactatatttgaatcaaggtcttctgtagttatggaagggatattataacatataagtagttggggtggtaggcccatgaaattctaagctttttggcttatgcatgttaattattaggtatcttcaaatgggtctttgctgtttcatgttaggttactctcatgtatgatttatgtgtagaaaaaaactcggagacctgcaactatatttgaatcaaggtcttctgtagtcatggaagggatattataacatataagtagttgaataaagtactctatagtttgagtacccaaaaaatcatgtactgtgtactttgtgttgtatgaagccttaagggatataattaatgaaatttcctgttatgggttgttcttcccca

SEQ ID NO: 17015 - DNA, 257 bp, Glycine max
  unsure (1)..(257): unsure at all n locations
  Clone ID: PAT_MRT3847_11536C.1
ataaagtggcaatgatcacagttactttatgaagggngctccantnnattnnnnanancaacngcatccatganattctaagaactatgtccacgaccatggctatgaagtagaatttcatggatgcagttggtgtttgaaatagattngagcccccttcataaagtggcaatgatcacagttacttcctgccttgagantattcgccgtggcatttggaacttctttaggttggagaatgagcactangaacannc

SEQ ID NO: 17016 - DNA, 461 bp, Glycine max
  Clone ID: PAT_MRT3847_115370C.1
cgagaagacgacagaagggcagtgtctagtcatactattcttagatgataaacaaagttaatgtccacatgtaataaacattacaaaaacaaatgatgtgcatcctatatagcaaataatataaatcatgatggatattttcatatgacattgaagtcttgagccatccaatgcaggatcccttaaattatgtaaaagctaagtctttagtctatttatcaaacaccaaataacctgtacacaattctgattcagaagtcaagtatgttcccttcatcctcagaacaagatgtaaaatttgacttcaggtttatctatgaattattgcagaaataatgtgtacctctgcttcctttcttcatctggagtccagtacttattccaccaggtgataaaatggatgacactcacaagttgtaaaagaagaaatattctgtgtaaaatatgaaccacaacatgca

SEQ ID NO: 17017 - DNA, 525 bp, Glycine max
  Clone ID: PAT_MRT3847_115371C.1
aaaaaataaaatggttaaaaaaatataaagacgttacattttttttgtgacagattactccgaaaattatgaatcctaattattcaagaaggatacaacaaagagagaatgaaactgccgggttctaaaccctaccatgccgacaaaagttatatttctggacctgccatcccaatggcctatgagagtaattgagctgaagttcatagccaatgaactagtcacaaagcaaattatatacacctagaacaagcaagaaaaacacatatatatagtataatgctaccaaaaaggtatttcctaaagataggccttgaatcttacgctcacctgaactcatctgaatatatatccatataaataggccacaagtatcatgtacatatttatgaccattgctgtcattcagctaaaatccttactaaaatattgaagtgccttcaaaagtatacttcaccttaagctggaaccagcctgagcagtgagcatggaataagaagaccacgcggtaaaaaccatactgtg

SEQ ID NO: 17018 - DNA, 326 bp, Glycine max
  Clone ID: PAT_MRT3847_115372C.1
gggaaacaactcacacctgggggttgccttttttatatctggaaatacttaataatacattacaattggcctcgttaaaggagggcgacaaaacccccaaaaattaacaaatttggagcccaatggtttgttcttacccactatttattgggccccacaaaaggagattttaagactatatcttatgctttttcctttccatcaaccccaacttttacattatttgcactcacaagctttttttctgcatcggcattaggctttatggtgggctgaactttggaccgatgcctcattggtaatacaagaaaaagtgtgaaattcag

SEQ ID NO: 17019 - DNA, 382 bp, Glycine max
  Clone ID: PAT_MRT3847_115373C.1
caatattaactcataattatattcaattatcaagtaaaatggccccctaccattataaaagaacattttatttatttactataaaccataagtttcatgcctcaattgggtcaacttttcacattaaccccagcccaaaacctccccagcaattttttaccggtaatcacaggcttcaaaaattaccttggacctcaacctgccctggtgaaatcccctggtggctggtattagtccgaattcttaagggcctccatttttccaagaagaatagcacttcgtgaagtcgaatgccacccattaaaaaccggcgcctgaatgaaatttcttggaaaatctaaacctgcgttaaaagggaaccccaaattcgggttggtggacc

SEQ ID NO: 17020 - DNA, 700 bp, Glycine max
  Clone ID: PAT_MRT3847_115374C.1
gaggaattcaccgaactcgaaagcaccatcaacacgcaccacaagttcgaggcttcccctgaaatctgcagctccatcatagcgcagcgcatcgacgcgccggcgcacacggtctggcccctcgtccggagcttcgagaacccgcagaagtacaagcacttcgtcaagagctgcaacatgcgctccggcgacggcggcgtcggcagcatccgcgaggtcaccgtcgtgtcgggcctccccgcctccaccagcaccgagcgcctcgagatcctcgacgacgacaagcacctcctcagcttccgcgtcgtcggcggcgaacaccgcctccacaactaccgctccgtcacctccgtcaacgagttcaagaaccccgacaacggtaaggtttacaccattgttttggaatcttacgtcgtcgacatacccgaaggaaacaccggtgtcgatactaagatgtttgttgacactgtcgtcaaacttaaccttcagaaactcggcgaggtcgctatggctactaccacactgcactgaattatataagcacataattaatattaatttgttcctccatcactgctataagtattacattaattggttgattagtgttgcatcagcatgctttatttgatcatcaagcaggtggattaatatttgaaagaaaaaaatttattgtctataataattttattttgcttgg

SEQ ID NO: 17021 - DNA, 397 bp, Glycine max
  Clone ID: PAT_MRT3847_115375C.1
aattaaactgttttaaaataaaaaaaacattttttaggaaaaaataaaaaaaatctttttatccaaaaagaggggggaaaaaaaaaaaaagtggtggttgccttttaaaagaacccccccccaatggtaaaaagaaacccccttcctccggggtgcggattgtggcctttcccagagtccccacccgagaggatattggattcccttttaacgaatttggtctgacggacccccaccaccttttatacagaatcattatttattcacccataaaaattttattctttttaaacaaaataaaccccaactgaattaaatatggactttgacactccccgcttaaacgttttggcgcaaaactacaccttgcaaagcggattaaaaccttacgatttat

SEQ ID NO: 17022 - DNA, 1165 bp, Glycine max
  unsure (1)..(1165): unsure at all n locations
  Clone ID: PAT_MRT3847_115376C.1
gtcattactnttgnngcagnaanagngnnggcactngactttgtattactgtacggtctatatgtcccagagtggcagtttgatgtatcagcctcgacctcttcattgcctcctattggtggaggtgatatttacatggtgaatagtccagagagaggtgatcttggacctgcctgtaattctgctggaatgattgatcgctatattcttggtcttgaccatctgtatagaaagcctgtttacagaaatctcaaggggtgcaatatgtctgctaacggtctagtttctgttggctctccttcatcctgccacgctccttctgtccctggtggctttttaagctccataacagctgcagtttcgtgcataattggacttcagtatggtcacgttcttgcccatctacaggaccacaaagggcgcctatacaactggatgtgtttttccctttcatttttggctcttggactgtttctggcattaataggaattcctctaaataaatcgctgtacacagtcagttatatgctactaacttctgcagcttctggtctcacattcattgctttatattttctggtagatgttcatggtcacaggcgtttgacagcgttgttggagtggatgggaaaacactccttgagtatatttgtcatcgtatcttcaaacttggccgtgattgctgttcaaggattttattggactaaacccgaaaacaacattataaactggattgtgacacgttttgaccacacataacgtcctcgtattcaactgctgttacattttcatgcctcgtcttgcatggtgtatatattcaaagtaaagcgacgaaaagaggatcaagatccagccgtaagtgcttattgaattgtataggtataggtatactatcgaattttgcatgaattcaacaatctcttttcattacgtactattagtgagccttggtagtgcaatagtcctcacgctcacacccttttctgttgggctggcccaggtcgtgttgtcctaaaagaattacatgggtaccaaacaaaataattattacatagttccttgcaactcggatttcttctcacgcgtaggcgtgggacatgttcgataaactggaatgtttatatatatatatatatatataaaagaaaatattttgcttttaaaa

SEQ ID NO: 17023 - DNA, 163 bp, Glycine max
  Clone ID: PAT_MRT3847_115377C.1
ggctccaggaaagatgcatatcctcatgatagagaactccacctaccgccaagtcacttattctatactaccgaatggccttttcaataacgccaacgagctcaccgatctatgcgacgccaacggtgctatgatcatgctctccagaactgggaaactccag

SEQ ID NO: 17024 - DNA, 147 bp, Glycine max
  Clone ID: PAT_MRT3847_115378C.1
attttgtcacttatcacattggccatggaggctaacctgtgcatatatcaatagccagaatgtgataagtgacacttctctctcttattgttatcgccttgcacttgcaacattttctttttggtatcacaactggatttggtttgt

SEQ ID NO: 17025 - DNA, 1020 bp, Glycine max
  Clone ID: PAT_MRT3847_115379C.1
ctcgagccgcttgcctagagtctcaagacctgctgcatattcccatggtgtctccgattcaacaacttgggggcgccgggttcactcgcccttccccgtcccgctggctttgcgtcgtcgttgtcggcccgggtctctggcgagggcaggggtggtcttgctgcgttcctcattttaggtctggaattttgattctagataaggacaagggttgctacttgttggtgttgtgctgtagtattggtttgacaagcttttgcgttgagttgagttgggttgagtttagtatctgcaatgagttcgttttctggagccattcaaagacctctggtggcggctgccgcagttgctgttgcttctttctctgctgatctctccgataaattgccatcacgtgattgttctacctccgatttggcacattctactccttgtagcaacatacaagaatcagattcatcctgggtttctcatatttcggactctaaacttgctaacctatcttttgtgacccagattccggtgcctgtgcctaatgttcaattccgggtaccgagtttgggacagaattgtgtttcaaatttgtaccattcttcggttgcttcatcaccacttcttcggaatttgtatcactctgctgacttgcctagagtctcgaggtctgctgcatattcccatggtatctccaattcaacttctgaggctgaggtcatgtataaatggcatttacccgaactgaatgctttggatgattctagttgttcattgacaaagtcaaggacagtggtggtcttgctgggatggttgggagcaaggcagagacacttgaagaagtacgcggaatggtacaccttaagggggtttcatgtggttacctttacatttccaatgggggagatcctgagttatcagccgggtggaaaagccgagcaaaatgttcatttgcttgtcgatcacttggctgagtggttagaaggggaaagtgataagaatcttgtctttcataccttcagcaacact

SEQ ID NO: 17026 - DNA, 339 bp, Glycine max
  Clone ID: PAT_MRT3847_11537C.1
ggctcgagcaaggctcttactcttatgcttgcttgttcatgaacgctgccactcacacgccggcgactctctcagcagttccgggggcgataatggctcttttaatatgaactcacaggctcccataacgacactttattaaacaccacctacactgtctgggcactccatataaccattcaaacctgaacaacgactcgcactataagtgcgacatatgtgttcggaaccggttatcacatctcatacgcgccacctgatagggtcattctctcacaaacacacaattgccgtgcaaacatagccaccgtgtcatatagccatcccaccatgcaaccc

SEQ ID NO: 17027 - DNA, 222 bp, Glycine max
  Clone ID: PAT_MRT3847_115380C.1
acgggatgtatcaacaagatacaaggagtcaatttccaagagcacaagagggaggaaggagagatggttatatcggaacaacaatatgtctggcattggatcagaagttaggcgagaagttaatgcagggattgcaactgtgtcacgcaagatggaacgcactggagaccagcgacaataatagaggcatggcaattctgcccccagtaatgtggaggaagg

SEQ ID NO: 17028 - DNA, 435 bp, Glycine max
  Clone ID: PAT_MRT3847_115381C.1
aaggactaaaccaaaattcaatatgaggtccatggactcaaatatcctcctgctaaaaggattaaatgtagaaatacaaacaattccaaagaaaaacagacacttctccaatgataggtcctttggattttaaaaggagcctttttcaaaattgcagcttcactgctattggcaaaacaagggaacctactaacaaggaccggcggcaaaatccaatggtggactaatttaagcatgagtgaaccaaagccttctacttagaaagcttttgtgcacgccaagtacaactagttccttgagaacttattaatggaaagctcttaaactagtgcccattccccaatgggacaaccgacggggaataaatatataacgtccacctggaacatttttagaaccatcaaaaaatactcccattgatacccaattgccctg

SEQ ID NO: 17029 - DNA, 1032 bp, Glycine max
  unsure (1)..(1032): unsure at all n locations
  Clone ID: PAT_MRT3847_115382C.1
taagnctcggtaattcggcttcgaggaaagaacaagcagaactggctcgtgcaaacttttcaactttgaggaaagaagctcagagcattttgaatctggtcgtaaaagatgcaacccatggtagtgaacctggaaagacaatatcactttatgttcttgatgcattgattaatatagatcatgagcgctttttcttgagccaacttcaaagcaggggttttttaaggtcttgctttacagccataagcaatgtttgcaatcaggatggtagtctttcactggactcattgcagagggcatgcacttttgaggctgaacttgctttactactaagaatcagtcacaagtatggaaaatccggagcacagattttattttccatgggcatattggagcatcttgcatctggcagagcaatcaatttacagggaagtttaaggtgggttgagacaagacttagaagagatatggctgtggatgttgatagacaacggatgattattactccagtcttgagattagtgttttcactaacttccttggttgatacatctgactttttggaggttaagaataaaattgtccgtgaagtaatcgattttatcaaagggcatcaatcactgtttgatcaagttctccgtttagacattgccgaggcagatgaactaagaacagagcaggtcaatttagttgttggtattcttagcaaggtttggccatatgaagagagcaatgagtacggttttgttcaagggctttttggtctgatgcatgctcttttctcacgtgattcaaagattcctagttttgctcaatcaagagtatcacctgagaatcagaggaattcagaactacagatgtttaatttgtgctacagcctgagctcttacttgtattttctagtcacaaagaaatccctgagattacagccttcagatgcctgttccagttacgctgcttctgttgaacttcaacaacccacattgaacttgcttaattctcttcttttttctgtcacaactgcttttgaaa

SEQ ID NO: 17030 - DNA, 794 bp, Glycine max
  unsure (1)..(794): unsure at all n locations
  Clone ID: PAT_MRT3847_115383C.1
gctggtacgacctgcaggtaccacggtccggnatattcccggtgtcgacccacgcgtccgaagcgaagtgaagttgaagtaagtaaagattaacacagcagtgaatgactaggcaccagattcagatccagcgtagccataaccccaaacaactcttttcctttctgtgacattcagatctcagaagaaaaaaatgaaggactcaaactccagcagtagcagcaacagaaccgaacccattgcccaaaacatcatcaaactcattagcaacctctgcttctccctcttcgtcttctctgtcttaatcttcaccgtcatagccataacctaccagcccccagacccatggctccagtccaccccagccctaaccaacctcttcacccaatcagaaaacgccactttccgaatcgactcctccgtcctcagaaccggcgaagacctctccccctccccgcaagaccctcccctcccgccaccgcccccctccgaacccctcatcgatataacccaacagcaaatcgccaattccaccgttaattccaccgccgactctaccgcttactccaccgacgcgcagcctccctctctccctgcctgcgatgaaaccctaaactgctctaaccctcgcgttcttattgccgttcagagattcaacctccgcgcgttcaagtccattggcttcttcgactaccagccgccgatgaacggctccgtccccggcgagtgcgacgtcgcatggcgcttncggaacaagcgcgagncgctctggcgcaagtaccgcgactttcgcc

SEQ ID NO: 17031 - DNA, 383 bp, Glycine max
  unsure (1)..(383): unsure at all n locations
  Clone ID: PAT_MRT3847_115384C.1
atttagaactattctcccctattttccctccggggggtggcctccccttccactcggcccacccctttttcttttatgtcctctctgttgttacaatctctcagtcacgttcacagcccctacacacctccctggtttttttttttcccccctcccccttttggaaagaatggggcttcatacctaaattaaaaacctttnnctccccatcaaaaaaacaaactccaattaattnnttcctccttctttcccttttccccccatacaaccctttacacccttctccttttataatccaccaaccctcctntatataccnttttctctttctcccccccattttcttttttttttccccctnaaacanccacaaatttttttcc

SEQ ID NO: 17032 - DNA, 584 bp, Glycine max
  Clone ID: PAT_MRT3847_115385C.1
acatgacagctgttactgccatagacacaagtggaattgatactctatgtaatgtgataaaagttgcatcagtcatagtactcagtaaggtgggggaaaaaagatttcagcgtgttcaaatcctgttaaatgtgatggaaaagttgcatcagtcaaatattttggattcctttgggttgaaaggagtctatctctcagtaggagaagctgtggctgacatttcatcttggaaagctcagccttgatttccataaataaaaaattttaaaacaaaaaggaaaaagatgacggcttctaacttcttggagaaaactcttaaaatgagaagttttttacctctctgagacggtctatgttttggtagaaaccttgacaaacaaggcatttattctttcagtagagcgtttcttatcccatgatgtaactttaatgtattcagttacttttgtccatttttggtttttgtaagagggaaagagcatccaagcaaagaatattgggatgactttattctgtgaacattgataaatataaatagatattttaatagcaaagaagaatcaaagacgagcgttccagtcttc

SEQ ID NO: 17033 - DNA, 421 bp, Glycine max
  Clone ID: PAT_MRT3847_115386C.1
ggatgacatgaaattattttgttgaatttgaattatgttgttatgctctgacatggtgtaagacccttctcacctttcaattctcactttcatagctcctcagttgcattaccaatggctcttggtggtttggtttccaacagaaacttcacttgtttcattggaccaggaagtgtatatcaattgggaaaggatctatcacctcaaagagggggaatttcttgcgcatttgttgcacgttatggtggtcagattgcaaaggatcctttctcaagatgctggcatgggatgtgttttcatgctaaagaacctttgaatgagaaagtttcaaaaccaataccaacatttcatgatgaagtgcagcattgttctccactatcccagaaatccattcactgcatgaacatgaaacttaacgcca

SEQ ID NO: 17034 - DNA, 643 bp, Glycine max
  unsure (1)..(643): unsure at all n locations
  Clone ID: PAT_MRT3847_115387C.1
aatacttgtaaacatggtaatttggcttttgtgccaagcatctaagctgatcttgtctctagaaggacggttcttaagataagaaattggaagttcttaaagaaggttcattcaccatcaatcatatagaggtggctgaggtggactggaatgttcctgatggctggaacactcttgaatatgaaaggtctgaatcatcacttagtggtggtggatacaatatggcaaagtgcaagaggtctgtgacagaacctatgctggttagccactttggtgaagctatcattgaataggtttttaaccgattccaagaaatattggctgatagtatgttcaaggagaaaactgggttcaacaatgttaccatattattgactagaaaattataagcaagaagtttgcgtctatatatggtttctcaaattttctttgctttttatttagtttttaagatgaaccaacaaaacattataagcttaagaaaaataaaagctaggtgtattttgttgcaccttatgtagtagtcttttctttctatatatactaatggaaacacaaaaggtgtcacaactggtgtctccatatttctattttgttgntgtatttttatgtgtngaaattgataaatatattatgtatttaa

SEQ ID NO: 17035 - DNA, 261 bp, Glycine max
  Clone ID: PAT_MRT3847_115388C.1
ctgccttacgcttagggttttaagagtaagaaatgaaatggattgtctcttcttttttaaattttactggtaactcatacaacatactttttgttgttgttgaaaatacaacatacttcttttgcaactaacttgtacatttcccatgttatccgtattgcttccaatatagttatcctatcagtttattatttatttatatataaaagagtgttaacaatatattctttaacaccaccttaaaggacatatgtgatattt

SEQ ID NO: 17036 - DNA, 375 bp, Glycine max
  unsure (1)..(375): unsure at all n locations
  Clone ID: PAT_MRT3847_115389C.1
tncttcctgagcgattgtctgagttgccatataacaaaaaaagagaaaaataaaaaaaaaatataaatcaaaaaaaaacaaaaaaaagttaaaaaaaaataaccaggaccgcactaagaggaacatccatcataaaaaaaataatcaggtccctaggcggttcaaagctctaaaatcaaaccctaaacccaccccccaatttataggttgacgttaaagaaaaggacctacacgagaacccagggggaccccctgaatctatgtctgtcttgcaactccagaggggggccccatggtgagggtaaccgcggcacccgcgcccccacttgctgtttgtctcaggtgcacctgcggaaaccattcaccacccccccc

SEQ ID NO: 17037 - DNA, 111 bp, Glycine max
  unsure (1)..(111): unsure at all n locations
  Clone ID: PAT_MRT3847_11538C.1
atgggttctttagcattgcaaacaatttagtcctcaaaagggtgttgtttcagctcctaggtttccctanattaatacacatctcaacaatttattaaacaggtgaagcat

SEQ ID NO: 17038 - DNA, 160 bp, Glycine max
  Clone ID: PAT_MRT3847_115390C.1
cccgcctacttgcgacccccaggaccctcctcagccggtcaggcctcgattccgtcgacccacgcgtccgatgggaaatgtctaaaaactagacgcgttacttatcaccagtcaaatcccaaaactatccaacctattacaatcaaactcacggcctcaa

SEQ ID NO: 17039 - DNA, 437 bp, Glycine max
  unsure (1)..(437): unsure at all n locations
  Clone ID: PAT_MRT3847_115391C.1
ggctcgagagatttagagggttgtctttgagttgttcaatttctctgagactaagagcacaaggagtagttggagttaacgggaactttcacaatccgtttctttagggggctaatagattttactatgttgatccttgcaatgagcgccatttcaagccaagggggccaaggcattggtttcagaattctagacatatttttgttgctgagatggttggtagggttttaatcactgagttttttgggaacttggaaacagttccttacaccaagcgaacccatttgattctgttgtcaaaagccatggagatgaagctaggggagtgccagntagaacaaatcaaagctgattttgaagggaaaatattgcctcctatacatcccgaaagtgtgagggtgacaatgatagctaatgaaataattgatgcattgctg

SEQ ID NO: 17040 - DNA, 2416 bp, Glycine max
  Clone ID: PAT_MRT3847_115392C.1
cggtccggattccccgtcgacccacgcgtccggttttatacttttttctcttgtttcttctaactccaaaatttgagttttgagtttttattcatgcacgtaccaccgcttctcctcctttttccacccgaaattctctctctttttttctctgtccaaatctcgttttctgctgttgttgtttctgtctcaattactcgttcttgttcttaacttaccaacgtaagaagagggacacagacacacaacaaatcaacccagccacctattttgtctgatcaaaccccttccctctttcatttctcttgtttctcgccgatctattcaacttgttttccagcaaatttttcaagggaaaaaattctgggaaactcgtaagagatgaagagggcaagggatgatatgtatcctgcctctcaattcaaacgcccctttgcttcatcacgtgctgattcctatggacaaaaccaagtccctggaagcggagggggaggaggaggtggcaatggaggtgttgttggcgggggagcaaatacttcccaaaagcttactaccaatgatgctttatcctatttgaaggaagttaaagacatgtttcaggaccaaagagagaagtacgacatgttccttgaggtcatgaaagatttcaaggcccaacggactgacactgccggtgtcataaaaagggtgaaggagttattcaaagggcacaacaatttgatttttggatttaatacattcctgccaaaaggttatgagataacgcttgatgaggatgaggctcctccaaagaaaactgttgaatttgaagaagcaatcagctttgttaacaagataaagaaacgattccaaaatgatgagcttgtttacaaatcattcttggacattttaaatatgtaccgcaaaggcgtccgggacattggtgaggtttatagtgaggttgctaccctttttaaggaccatcgagatttgctcgaggagttcactagattcttaccagatacttctgctgcaccttccacacagcatgctccatatattcgaaattcattgcatcgcttcaatgagcggggttctatggcccctatgatccgccaaatgccagctgacaaggcacaacgttatcgacgagacaggcttccttctcacgatcgtgatcatgatatgagtgctgaacgccctgagctggatgatgacaagacaatgatgaacatacacaaggagcagaggaagcgtgaaagtagggagaggagaatgcgtgatcaagatgagagagaacatgatcttgataacaacagggatttgaacttgcaacgctttcctgacaaaaagaaatctgtcaagaaggctgaaggcatgtatagtcaagcattcagtttctgtgagaaagttaaggagaagttgagcagttctgatgattaccaaacgttcttgaagtgccttcatattttcagcaatggaataattaaaaggaatgatttgcaaaatttggtaactgatttactcggaaagcattcggatcttatggatgaattcaatgatttcttggagcgttgtgaaaatattgatggattccttgctggtgtcatgagtaaaaagtcgctgtctactgatgctcatttatcaagatcatcaaaattggaggaaaaagacaaagagcacaagcgcgatatggatggagctaaagagaaggaaagatacagggagaaatacatgggaaaatcaattcaagaacttgaccttagtgactgtaaacgttgcactcccagctaccgacttctgcctgcagattatccaattcctacagctagtcagagatccgagcttggtgctcaagtcttgaatgaccattgggtatctgtgacttctggaagtgaggattactctttcaaacatatgcgatcagtatgaagagagctcagatgtggatgacagatatgagctacatgttattggagtctgtgagctcagctgctaaaaaagcagaggaattgtataatagcatcaatgaaaataaaatcagtgtggagactctgaaccgtattgaagatcactttactgttctaaatttaaggtgtattgaacgtctatatggtgatcatggtctggacgttatagacatcttgcgtaaaaacccaacccatgccctgcctgtaatattgactcgactgaagcagaagcaagaggagtggagtaagtgtcgttcagatttcaataaagtatgggctgagatttatgctaaaaatcactacaaatcacttgatcatcgtagcttctacttcaaacagcaaaaaacatgttcgttgctatagaggtgaaaaagccttacagactttcttgaaacgtcgccaatgggatctactactggattcaaagaacttgagcaacaactctttactagagaataactcttcac

SEQ ID NO: 17041 - DNA, 272 bp, Glycine max
  Clone ID: PAT_MRT3847_115393C.1
gcatgaatgtgggtcaggtaattaagctacagggttatccatgtttgtgggatagcatattttaagggtagggacctgtgatcttataggtgccataccttaaaaatcaaacaaataagcgtaaaaataaatagcgtgggttaaatcttggcaaggactaagcaggaaggataaattaaactataatacttacagaagactcaatggctaggagctcttcttctgtgaaggttcttccgaactccggctaccatgggacatccttttccccc

SEQ ID NO: 17042 - DNA, 140 bp, Glycine max
  Clone ID: PAT_MRT3847_115394C.1
agaagattaaggatcagatagtaaatgaatgtcaaacatatagatctgtaacccttttgtatttctgaacaaaaggttcaagcacaagggttcgtttgtatttatcaacatatttgtaattgtgcctacatggctacatt

SEQ ID NO: 17043 - DNA, 924 bp, Glycine max
  unsure (1)..(924): unsure at all n locations
  Clone ID: PAT_MRT3847_115395C.1
ggcccgttatccccgggccgcgccccacgctcctaagggatgaagatcaaatcgtcgagtcatcagaacatagacaagtatccccaagctctccatcagaaacaaaagcaaaggaagcgaacatatttgtgaaagctaaggaagagattaaagccatcatacaccatgataagtcagaacaccatcatcataaagaaactcatggaaggaatgatgatattaatgacaatacccctaccgatgaagttaagggtccgaatgtctttgaaagagtaaaagaagaatttgaagctgttttccaagctatacatcccaagaaggaaagctgacaattttccttccttaccatagaaggatgaggaatcctgtttgattagggatgttatgtgcatgatagtgcatgtttgaaaatcaggtggaaaagttcgaagtacttttgcaaaaagattaggacccttaattttgcttttattcgtcggatctgcattagaatgagtgtcataacaatttcaactgcaaaccaaacgtgctcataaaccgtataaacatgtttatatatatatattttggaattttgctatcctaaagtgggccctccttttagagagagaagtaaaagcttgtgtgtgtgtgtagggtgcctcaccaacttagattggagctccttcaatcaatcttggtggtgtgtttgatgataatagaaacaagttaactacatatttgtcttgttgtataacatgaatatacaaaaaatgtgttaaccaacttacataggtcaattgagttcgggtgtcaacccaagatcttgactttctcgttaggcaagaacaacttggcggggtcaacattacaccaaagttcccaagcctaaaaaatcaaaacacatctataaatgtgaatgttctgactataaaaaaaaanaaa

SEQ ID NO: 17044 - DNA, 611 bp, Glycine max
  unsure (1)..(611): unsure at all n locations
  Clone ID: PAT_MRT3847_115396C.1
ccacgcgtccgtatgtatttattttattttatttttgtatcttatttaaggaagtgaaaaacaacctaaacaagaattatgacttgattgtatcacatagttttacaggtgtaagtcacattgtgcctgttctagaatatttgacccagattttttctttatttattattttgagggttgcaaaataaccatgtgtataacttgctatgcacgcttaatattacttgacatcgggcctgtttgggtgtaagtttctctagaaatacttctagaagaagaaaataagaagaaaaaaatgaaatgagcttctccattagttaaaatgaatttttcattagttaatttgtaaatgtcatctcatttttttagagaagttatattggtgagcttctaaaaattaactcatgaagagtttatttttatatatgaaaaaattcatttcattntttatttttttatttttntttttttagaaatgcgttctaataaacttacccaagcaagtccatttttttggtgggaagtggaaacgtcaaccctgagactgattaatagttgaagttcgctctatttttttaagtaattcacctagatctctcattttgtgcaat

SEQ ID NO: 17045 - DNA, 319 bp, Glycine max
  unsure (1)..(319): unsure at all n locations
  Clone ID: PAT_MRT3847_115397C.1
bngttgnatgcangcntacgtnaagctcggaattnngntcgagantggnnngcgcttcatanncagaatnganantaaccacaagaatgagggnngatatntgnangtngnaangtgggnaatgcngnnanaaaatnggttccaanttctgggaagtgntatgtgacgaacacggcatngatcnnancnganagnacancggcgangaggnttcngatctgncaantctgagangannaacgtntnntacaaagannnntanaggngganggtagntcnacngntcntgntcatggatctagaggncngnacannannn

SEQ ID NO: 17046 - DNA, 108 bp, Glycine max
  Clone ID: PAT_MRT3847_115398C.1
cttaattatttattgcatgtatggccttatatcaaagtatgacgtaatattgatatttgcagtcgctctgtctcttacatttatgcacgcatgaaaaggttggtccaa

SEQ ID NO: 17047 - DNA, 580 bp, Glycine max
  Clone ID: PAT_MRT3847_115399C.1
tcttcatctaccaacagagaaagaaaagatatccaaatccaaaactacacactaatgcttcttctgccaacaactcagaaaagaaacaagaaactgtttcaagacaagatgcagaggcaagaactataacaccttcacttccttgttcctgcttaacaatcaaagaagaagaaacttcagaagcaacgagctccgacagtgaccgcgagagcaacaccgcagtggacatcatggcagcacaaaacgggaaccttccgagacacggcactcttgtgaccgtggacggggagacaaatttggagcttgagactttgctcaaggcttcagcgtatattttgggaaacagccacttcagcattgtttacaaggcggtgctggaggacggaagatcctttgctgttagaaggatcggtgagtgtgggattgagagaaggaaggattttgagaaccaagtccgtgccattgcaaagcttcgccatccgaatttggttacggttcgtggcttctgctggggccaagaagataaactcctaatatgtgactatgtgccccatggcagcctcgctaccatagatcacag

SEQ ID NO: 17048 - DNA, 223 bp, Glycine max
  Clone ID: PAT_MRT3847_11539C.1
aactgctcccactggtcgtcgaatgcggcatgctgcagctatcgcgtggggctggcaagggcactgcacaagacaaacttataaccctcatggaagctagtgacacaggtgacaagtcatttgccaatatagcagctgaaatgctagaagaatatttgctgatggccacggatcagtattatgcgtacatatctagcgagagtatttggctcttccattatta

SEQ ID NO: 17049 - DNA, 179 bp, Glycine max
  Clone ID: PAT_MRT3847_1153C.1
ggggtttcttccccttcagtgccagcaaactcagaatcatctgatgctgctgcttccaagtctcccattcaggagcaagtttcaggcaccaaagagtacaaagttatattccctgtaagctacaaccaacatgtgatgaaatacagaaggggaaaccacacaggatagtacattgatta

SEQ ID NO: 17050 - DNA, 965 bp, Glycine max
  Clone ID: PAT_MRT3847_115400C.1
cttcctttcctttccctctctttggctctactcaaatattctgaccttatatagacaccttttcaccaaacctctcgagccgattcggcttcggccaaaacagaaacaccagaggccgctaaaaggttctacttctacaagccatggacatcaaaatagaaagtgatgattctcagaatgaggagaatgaagaaaggctaccactcctgagaaatagtgaggtgccagaagcagagaggaatctgattcagaaagccattagccagacatttcagagcaccgcacatttgggcaaccttttaccaactggcacagtccttgctttccaacttctgtccccaatcttcacaaatgttggcaactgtgactctgtcagcaaggccatgactgctgcacttgtatctctctgtggtgcctcatgcttcatgtcatgtttaactgatagcttccgagacagcaaggggagcatctgttatgggtttgccaccctcaggggcttgtgggtcattgatggatcaaccacccttccacctcaacttgccgcaaaatatcgcctaaagttaatagatttcatgcatgcagtgatgtcagttttggtatttgcagcaattgcattgtttgatcagaatgtggtgaattgcttctttccagcaccctcaactgagacacaggaaatcctcacagcattgccagtgggtattggcgttttgggcagcatgttctttgttgcatttcctacacagagacatggaattggcttccccctttcaacagattaatcgtccagttctgtttatattaatctttgttaatgtcaccgatttcaaaaatttagttggttggattcattcttgtgcttggaaccatttacttatattcaattgaaatttattatttaaatcgtatattattcaatttaatttttcaatgcttttgtttaatgtatttaaacctggcttaacctt

SEQ ID NO: 17051 - DNA, 365 bp, Glycine max
  Clone ID: PAT_MRT3847_115401C.1
accggtcctatataccgatcgacccaactttcgaccagcttttagaaaacgcggaaaagcggggtgggcgaggggggccttttaaacagagagataacgtatccaaaggggaatcttcttcctaactcaaagataggagatccaaagggcttccccatccaaccaaccatttacagggacactactgctacttttaactacccttactagacttataccgttctcactacaaacaaaacaaatctcagactggcaccttttattggatgctagatgccacataatacttgcagtttagttttatttgaccctaaaggaatagcctttggcataaatatcactactagactaaatggccaataaaa

SEQ ID NO: 17052 - DNA, 541 bp, Glycine max
  Clone ID: PAT_MRT3847_115402C.1
ggctcgagatcagctcgcagaagaattgggcagagctttctcagaacgagcaatattaaaaacattcatggaggctgagtcaactgtacctgctggttcattgaaggtaaatcaaattattgcttgctgaatattcctgacatagaagaaacacactattaggagttatatggctggtttggtggtaaaaggagaagggaggaagggagggaaagatcatggttcgatttctcccgctaacaatactaacaattaacaactaatatttgcctataaaaaaaaaaaagaacacgctatcttatacactttttctaacacatttttattattaaaatttattacaaattacacaatcataagtcaagcatattaaataacaagcgagactcactcaattgtgatttccaataaatttgagtttttaataaatagtgagtctaataatgtgtttgatagtgtgtcaaattttcgttatcaaatttcttctgctatatatacctcttctattcaaaattttcaattttaccaagaaaagaattta

SEQ ID NO: 17053 - DNA, 323 bp, Glycine max
  Clone ID: PAT_MRT3847_115403C.1
cgtcttttttttttttttttttttttatttatttttttttttttttttttttttttttttggcacaaaaaaatctggaggccctggcaatggttacaaaatttttgtttcaaaattccaaacgcgcgggaaaaaaaaaaaaccttttatacaccttttccaacatttttttcttaacacttttgttgggaggacattttcttttggggctcacactttttacacataaattggctagggggggaaaaaacatatgggcggggttccgccccatcccccattggaaaaaattttctcttaaatgggcagtggacccggcagttt

SEQ ID NO: 17054 - DNA, 111 bp, Glycine max
  Clone ID: PAT_MRT3847_115404C.1
cttctggattctgattggtagtgaacactaggaatctaagggaattggacttgcaggagagtgaagtggaggaccttagtgggcactggctaagccattttcctgattcca

SEQ ID NO: 17055 - DNA, 227 bp, Glycine max
  Clone ID: PAT_MRT3847_115405C.1
ggaaggagagtattagagtgggcgctgtgtattcacgtgtggctttttcattgatttttctctctcttttttttcatcagttatgggaaatcaagaaaaagctttttttgctttaaatattttttatagcaggactccactgctgcacattcgtgtgtatgtttgtattttttttttttttttctgcatcttacattgttttgggttatttaaacttgtaaatggta

SEQ ID NO: 17056 - DNA, 914 bp, Glycine max
  Clone ID: PAT_MRT3847_115406C.1
gacctgaaaaaccatcatctgtgtttactaagagaagttcccagactgccacattacaacataagaaaccagcttctagtgttgatgctgaaattgtaggtggatcaacgataagttctcaggctatgctgaagcaagaggtttctactgcatcgtcaaagggcactactcttaaagagggtgatcgagtaaaatttgttggtaactttccttctgccgtctcatcactgccaaattatccttcaaggggacctagctatggctcccgaggcaaagttctgcttgcttttgaagataataggtcttcaaaaattggggttaggtttgataaatcaattccagatggcaatgatcttggaggcctttgtgaggaggaccgtgggttcttttgttctgcaaatcatttactacgggtagatggttctggaggggatgacgcggacaaagttgcaatcagtgatatctttgcggctagcgcgaatcagagtaaaagtggtccactggtgttgttcattaaagatatagagaaggcaatggttgggaactatgaagttttgaaaaataaatttgaaagcttgccaccaaatgttgtggtaattggctctcatactctgcttgacaatcggaaggagaagacccaacctggtggccttctgtttaccaagtttgggagcaatcagacagcactacttgatcttgcttttccggataactttggtagactgcatgatcggagcaaagaaacccctaaagtaatgaagcaacttggtcgtcttttcccaaacaaagtgacaatacagctgcctcaggacgaggctatactttctgattggaagcaacaattagaacgtgatattgaaactatgaaagctcagtccaatattgtcagcattcgcacagttctcaacaagatt

SEQ ID NO: 17057 - DNA, 610 bp, Glycine max
  Clone ID: PAT_MRT3847_115407C.1
gtggtggtggcctcgatgaaaatgtacctgtaagtttttacatgaactcatgttttgattgaaataagcatctataaactgtattaattttctttcttcatagagttcagaacaataaatagaggttgttttgatattgtgctgcagtctacattgagtcactttttttttatcagcaaaagtatatatattatatagaccattaaaattagtacaagcggtactgttgtatatacctcctagcatttgcaaggtgcagaactgtggtgacctaatacatgttaaccaacttgaattaggaaaccaaagatcactgtttttttgcttgcaatttttggttcattattaatttgttaatgttgttgttattagttgttatttgattacttcaggaaccctaatgactagtatacatactgtgtgcataggttttgaataattttgatctttttttttcttttactaaaaattgagttctaaaccactttactttaaaaacagaaattaccagtatagttatcatgcatatgctaaagtttgggatagaactatggttaaatggttgaaactgaaactaagctaatcaatccaaaggcagggaatgttttgt

SEQ ID NO: 17058 - DNA, 246 bp, Glycine max
  unsure (1)..(246): unsure at all n locations
  Clone ID: PAT_MRT3847_115408C.1
gcatttccaattntntgtgtagaagcnatgtntaagggtnntggtgtntantctganattggcaagaaagncagagatctantgttcaaggactaccacagtgannagaagtttaccatcantacatantcanccactggagttgctataacatcctcggggannaagaangggtganntttttgtgtcagatgttaacacccagttgaagaanaagaanatcancactgatatcaaagtgganac

SEQ ID NO: 17059 - DNA, 1841 bp, Glycine max
  unsure (1)..(1841): unsure at all n locations
  Clone ID: PAT_MRT3847_115409C.1
ccaaatgatgaactgtgcaattgggtacaaagcccccactttcaattaattcatcacagttccggtaaggaacttatcaagagtcattatattttctgctcaaattttgcgatactttattttggttagtggaaataattctagctgaggtttgaattcatgcagtgaatgagtgttttacagagatcaatttattctttttagtgtctcattctgcaggtgaaggttaggcataatgggaacctcctattggatgaagaaggtcatatcatacatatcgattttggcttcatgctttccaattcacctggtggtgttaactttgaaagtgcacctttcaaattaacacgtgaacttcttgaggttatggattctgatgctgagggtgttccaagcgagttctttgattattttaaggttttatgcattcaaggcttccttacttcccggcagattccttatggacagcacaagaagcatatcgcgttaccaatgatagaatgtccagatcaactgccgagtgtattgaccaggcaatgacccatgcggctgacacaaaagtcaaatttgttagtgtaaatctttctgtggaagcacaattacatgattagccagctgggactgaagcagatctatgtggtggatatcggcatcctgcttcaacttacagagatggtatacaagaagtggcaaggtcaggacatgacagtgatattgagtgggtgcaggtagtgtaaaaagctgatcctggggttggaatggaagatatcgaggatcaagcaccaagacggcggaaggaacatcgtcgtgttccaagtacagtggcaatagaggatgaataggtgggggcgtctgcggcagcaaagggagaagcaccccttggactccctttgaaaggtgctgttcaccaggcaatatatgcaccaccaaggtcttatggaattatccccaaagctagtgatgccttgtctggtgaactttttgaggtaaagaaagagaggatacgtaaggcttctatccatgggaatttacctggttgggacttgcgatctgttattgtaaagagtggggatgattgtaggcaggagcatctggcagttcaacttatttcacacttctacgatattttccaagaagctggcctacctctctggctgcgcccatatgaagtattatgtacttcttcttacactgctcttattgaaacaattcctgatacggcttctctacattctatcaagagtcgatatcccaacatctcaagtttacgtgaatttttcattgccaaataccaagaaaattctccgagttttaaacttgcccagaggaactttgttgaaagtatggccggatattccctggtttgctaccttctgcaggtgaaggataggcataatgggaacctcttaatggatgaagaaggccatattatacatattgattttggcttcatgctttctaattcacctggtggtgttaattttgaaagtgcacctttcaaattaacccgagaacttcttgaggtcatggattctgatgctgagggcattccgagcgagttctttgattatttcaaggttttatgcattcaaggcttccttacttgccgtaagcatgctgagcgtattattcttcttgttgagatgttgcaggactctggtttcccatgctttaaaggtggtgctcggacaatacagaacctacgaaagcgattccatctcagtttaactgaagagctgatcttatggattcggatgctgagggcattccctgcgagttctttgattatttcaaggttttatgcattcaaggcttccttacttgccgtanacatgctgagc

SEQ ID NO: 17060 - DNA, 792 bp, Glycine max
  Clone ID: PAT_MRT3847_11540C.1
ggatgagaaaagtagaaggggaatacgcgttagggctagaggttctggttctggactgttaacgttgtcttcttctcttctagaacttattatataatccatgttttggaaggaatctgtttgtttcatactcgtgtcgtgtttcctcgaaaatcacttgaacttgattcttcatctcttgcctcctaataaatcctctaacagctttgcgtgatttcaaactccgacaaagaacaaccttgtcgacacggcaaagcaaagtaacatattaagagaagaagatgtgtttggtgtttgtgtgcggggaagatgagagggtggtgtcaaggcagccagcaccgggggcctgtccttactgcagagggatgatccaagctatggacgtagagagtcagtggaatttctgtttcctacctttgtattctaagaccaagcgcaggtattactgcaccatgtgcaccagaaaactcgtccttcagtaatactgcatgatgctgatgctcatcttactttttttcccgggttttatttactacttaatttccatgtatatgtagggttttcataggatcattaggatcagcaccattaagatcaacttagaagtggatttttggttgtttacataaggtctagccttgtataccaaaaaggcaaaaacaaaatagtggaattcgtattacaatgttgaagaattcgtattatcattgtgtggataacatgctaaattagtcttcgacattgtattttgttggatattttagtaaatcttccttgagtcgttatatatac

SEQ ID NO: 17061 - DNA, 2187 bp, Glycine max
  Clone ID: PAT_MRT3847_115410C.1
gagctctagtgttaaccatatagcagtgcaaatcatgccatataatgaatttggacctcctctttctaatgttacaaaactcacatttgaaggaagaactgatgtcagtgatttgggtctccagtacatctccaaattatgtgtttcattgcgtcacctgaatattaaaggatgcatttctgtcactgatattggcatatcagatctcatatccacgtgtaaaaaacttaattcaattgtggtttgcgatactttatttgggatctattcagttcaagctctttgctcagctatttctggtagtggcaacttcccctctctacattctagagataagcgtttgaaatctgtggtgtctaattttgaaatgctgcatatgggtggctgcaggggtattagtgagtcatctctactagagcttatgtctcaagcacaagttttgaagagtttatgcctgagatggactgacctggttgaccaggcactgtacaattttgtaggttcttccttggagatgcttgatgtttctgataccaagatttctggagctgcattagctcatattattcatggaaatccaagtttaaagtgtctgagagcaagaggctgtcaaaatttgtttccaggaaacaattgtatagaaaagagaaaatctagctttccctctttgcatgaaaaactgcatgctgagttaggaaaaatgtgtagattggaagaaattgaatttggatggggattttcttccttctctttgagtgctctggaacctttactgatgtcattaaagaccatcaatataggtttaggtggaacgctaggtgaagatgctttgaaacaattacctgcaatctgtcccttgctagaaacaataatccttcattttcaggtgataattatcttccctgtgatttgaggttctatattgctccctaaagaatataaaaaaattatgagttaatcataacatggaaaaccaagggagactttttccttcagttaatttcatggttagacttttccattcaacatctacagtccatgaagttccgttattattgcctccaagtattccaccagatgagtcaaggtttatactttgaattagtctcatcaattatggctaaattgttgtctttctgattcttctcatatcgatgtgtaggagatgcatgtttcttatactatactttgaattagtctcgtcaaggtttattacttgtgctatactctatgtatgcttctgctttcagttcagatgttgtatcacatttctaaaattatattttttctatactttgaattagtctcgtcaaggtaatatctgatatgattgtgatgaactttgtcacatccttgaaatacttgcaagtattagctctgtgctattgttttggtgatatatccatgtcaagcttcaaattccctatgcaaaatctaagaaagttgaggcttgaaagaataaccccatggatgacaaatgatgacttggtggttctagctcaaaactgcagaaatttgttagagctttcattgctagggtgtcctcttctcgacccagattctctacagataattacatgtggatggccaggcttggtctctatccatttagaggactgtggagaagtaacggctaatggggcttctgctcttcttgactgcaaagctcttgaagatatcctgctgcgtcataatggccctgggctacccagaaacttcatttgttatgctgcttcagagatgccattgcttcgaaaattgtcactggatatatgcgatgcaagtgaaggtgattttgacattccaaatcagtatgcagacaaatactttttgagtaccttgaagatagctagatgcaaatctcaaagatgtgcttttaatctcccagcccctgccccaggggttcatagaagatctgtgcatgttgaaactctggtgcttgtgtggaacagcagagatctcatcagaacagtggtgaaggaaaggctttagtaaatgtatgtctgagcattcatcatccttctcacatgttgatgagttagttttacaagtgatttggtggcagtaagtaaaacgcttagtgattaagatgatcatttgtttgttaagtagtaaacatctgacaaaacgatgtcaagttgattgagaatccagccgttgcactttgataacagtccttgtttatgt

SEQ ID NO: 17062 - DNA, 1684 bp, Glycine max
  Clone ID: PAT_MRT3847_115411C.1
cctccccccaattggaccccctccgcctccgatcagttgccattggcttcgcctctcttcaccccggcatccattcatcagttgagagagtgtgccccgttggttccgtgcatctttggagcagggttgttcttataatataataatttgtgaattggtctttgtttgattcggtgggagagaatgggtttgtttatgagaatgtatagtaaaaggttgtccttgtaatattaatagtttgtgaattggagtttgggtttatagcaagacaataatggatgagtcaaaaaacaggcataatgataatttgggtgtgaacaaaatggggaaaaacattaggaagagcccattacaccagcccaattatggtaacaacaacaacagcagcatgaatgggggtagacagcaacagcaacagcctcagcctcaggtttacaacataagcaagaatgatttcagggatattgttcagcagcttacagggtctccctctcagtctcaggatcatcctcaatccaaacctcctcagaatcagaacaattccccaaaacctcaaagtatgaggttgcagaaaattaggcctccccctttgccctatgtgaggcctccattgcacaccaccttgccagcagctagacctgctcactttagacaacaaccatcaccaaaccctaataatatagctgagtcaccaatctctgcctacatgagataccttgaacattcaattacagatcccacttcaaggggtgcccaatttcaaccccatcgtcatccagcttcttctgctttgcttcctaaccctcctatgatgcctttgaatgccacaaaccctcttcctcctcctcctgctatagctgctgttccttctccacaaccaaatggacctcctattttacctttaccttctccaacctctcagtttctcttgccttcaccaaatggctacatgaattttctctcccctcagtctggttatccaccactgttgtcccctggatgtcagtttccacctcctttttctcccaatttccctttctcaccctttgcacagtctgggcatttaggccccgggccgcatcctcctctttcccccgggctgagtccggtgttttaggcagcggtccgcagcctccactttcgccagggctgtttcctttgtctccttcaggttttttccccatgacaagtcctaggtggtgatcatggtcccttctaactaaactgatctttcttctcactaaagctttgtgcattatcatgtaaagtacaagcaagttgtaagattgtaaggtgtattttttgctgttcattctcttcatttcctgttcccttgcttaatttttcttttgctgatgaccataatggctgcaatcctttttacttttactagttttacacattaggcgttatattgaagatcaggaactcaattggatggttggacaggagctgtaagatggaagaatggggtgtaacatgaaaggaagtaggttttacagacaatatttgttatgtagggtaggtcttgttcttttgtaatataagggattgcatgttaaaatgcatagttagcttcatgttatcttttactctggaagatacttttaagtacttatcctatacttgcttccaagtgatttgcaatttttaaagatatctgcttcttcagcgtttacttttt

SEQ ID NO: 17063 - DNA, 611 bp, Glycine max
  Clone ID: PAT_MRT3847_115412C.1
gggtcaaatatctttttggtacttgtaaataagatattgttttagtctctatttttttagttttgtattcaaggaaatatattagatatgatgattaaagtaggctagtcaaaagtctttttagtgacactattaactaattaagttgaaggaaaagatagagattacagctaacacatttttatgaataagaaattaaaaggaaatcattcattgaggatatttgttaattgataaccaaatagtaattccttcattacataaaaattaaccccacccccaatgaatttttttttctatatgctcattcaagagtcaaatatttatcaacataggtttcaagtttaaatactccatatacaattatattaaatgtatattaaatatcagaaaaaatatctttattgactacaatgattctaccaaaaatcttgtaacatacttatagatctaattatttatcaattgtgtcgaattagattgatatcaaatatagaaaaattaggcaaattacgagtcatacatgtgataaaagaaaatctataaatcatactgattttaaaaccaatttatattatttagattttttaaatataatttgatttgtatta

SEQ ID NO: 17064 - DNA, 1641 bp, Glycine max
  Clone ID: PAT_MRT3847_115413C.1
tttagtttttacacgtatcatattagttcatgcttggattaaagtttacagacgggaggttgcaaaagcaagccaggcctggccttttcataacatattttccaggctaaactctattgttcaaacgttctttttagatgcactgaaccagaacgcagacttgatcccgcgtttacagcactacagttccacagcattagccattagcactataaataaatagagaacacgcgaaacacctgattcccctccccagacgccgcagagtcagagagagagattcactgaaacagagcgcagaagaaaatacataaactaatccagaaaatgagcagcggcgctggaaaggtggtgtgtgtcaccggcgcttccggttacattgcttcctggatagtcaaattcctcctcaatcgcggctacaccgttaaggccaccgttcgcgacacaagtgatccgaaaaaaataaaccacttggttggcctcgacggtgctaaggagaggctgcacctctacaaggcgaatcttcttgaagaaggttcctttaactctgtcgttcaaggttgccatgctgtgtttcacactgcttctcccttttatcacaatgtcaaggacccccaggctgaattgttagacccagctttgaaggggactctcaatgttctgaaatcgtgtgtaaacttgccgacgctggaacgcgttgttttaacctcttctgttgctgcagttgcgtacaacggaaagcctcgaactcccgatgtagtagttgatgagacttggttttctgacccgggtttctgtagggaatcacagatgtggtatacactttcaaagactttggccgaagatgctgcctggaaattcgtaaaagagaacaacattgacatggttactattaacccagcaatggtgataggacctctcttgcaaccagtccttaacacaagtgctgcttcaattttaaacgtaattaatggtgcacaaacatttccaaatgcatcttttggttgggtcaatgtgaaagatgttgcaaatgcccatattctagcatatgagaatgcttcagctaatggaaggtattgtttggtggagagagtggcacactactcagaaattgtgaagattttacgtgatttgtacccgacattacaacttccagagaagtgtgcagatgataacccatatgtgccaatatatcaggtatccaaagaaaaggcaaagagcttggggattgaatatactcctttggaagtgagcctcaaggagactgtggatagcttgaaagaaaagaagtttaccaacttttaatttgtgatatctcctagaggagaaaacgttaataatagaaaccttgtgtggttggtcacttggcttgtgatgctcatgcttctgaacaaacttactattaaataagacttaaatcaagattggtataagtactgaaagaaaccattcttggtctgatttgtaccggtgacaattaagtttcaaacatgcgtttccaagtagagtttgcattacaaattgtatccccgtttttattatattactaggaaatgtctgatgcaaccaatgttgttaaataactgttatggttagcgccataacactataatgtggcgattttggacccctttgcaaaaa

SEQ ID NO: 17065 - DNA, 650 bp, Glycine max
  Clone ID: PAT_MRT3847_115414C.1
ccacgcgtccgcagaattatgcctcaacaaatcttgggtcggtgttagattagcattttcttctctttgacatcaaaaaagagatgcccttgagcaaaagttgtgacttttttgtgggaaaatttgctgctaagtagtggcattcctctgaaagagtgtgtgtggtgtttgatggacaattttgtaatctggttcttgtgagggaataatgacttggtggtgaaattgagattgagagagtcataagttttgattcttttttttggttctgatggtgtgactttgtggagagaattatgtgtagatgttttatgttacaggtgggtaaggatttaatggaacttggatgcaccacatactgttattttcagtagctgaattgttggaggggataaatggctattttattgcaggcatggattcagttgcgtaaaagtaatgaatcttggtgcttgaattggggattttgagagtgctaaggataagccttttttgtatgtgccttgaggctttggtgtggtggggtgtgatttattatcaacctttttatcacgtttggtctttgagtatggttttttaattggaagaaggggagatcaatgggcttggtattctttgactcggtggtggcaaatggtaaaagctggggc

SEQ ID NO: 17066 - DNA, 415 bp, Glycine max
  Clone ID: PAT_MRT3847_115415C.1
tcgtctacgcgtgcgaaatcccggttctgatgcatggagttaggaataggacaagcgtaccgaatttcattgaaatatcatacgcaacactggatggactgccaccccaatgcaagatgttcatgttacaacagattgggttatttcctatgaggaatgactccccaggacctatagaggtttaaagccacaaaatccttttgagttaaataagaggacggggaaactgacttccacccagggcactgcccacagtgagaaaagaatgcctctttctataaggggaggagctggtgcaaagaatgctagtctcatgaatatgccaaatgcttttctttcaatgtggagaaattctaggggagacctcgtcactaaagtttctaagaagactattccctacattaaatgaacagtc

SEQ ID NO: 17067 - DNA, 229 bp, Glycine max
  Clone ID: PAT_MRT3847_115416C.1
ggggaagaaacacatcaaatttcctgttacaccaaatgcatttgagcaccgatatacaacacttgatttaaaaaaaaaataaaataaacgggtagcctacgcctttttaggagattcagtacccttggatggagacttaagatccttgtgcgacctatccgaattcttaggcaacaaaacaggggtaatgttcggaagcccacccccatgtgccacggtgacaccggct

SEQ ID NO: 17068 - DNA, 423 bp, Glycine max
  unsure (1)..(423): unsure at all n locations
  Clone ID: PAT_MRT3847_115417C.1
aattatcatttcattcagtgagaaactttcccaaacaacaataattgcattcccaaacggttcaaactcaaacctcaacaacctcctcctcaaaaccatgatgggcaggctccagctgcgagctccgataaacaaccccttggtcacacagtccctcgaggacttcctattaaccgatctcggcgacgacgacgacgacaacgatggcgaggaaaccttcgagggacagtctgagctcgcgagagaggaggccaagctagaaagggaagtcatcaagatcatcctcagcggaaacggagagtctgttctcatgcccaattcggggcaagccgtgtcngttcgcgaccaccacatatgcgtggggtttcaagacgaagagggttctgggtatcgcatgtgggagtggcatggccacatcatggc

SEQ ID NO: 17069 - DNA, 197 bp, Glycine max
  Clone ID: PAT_MRT3847_115418C.1
tagaggcagtcttaaaggaatctcaaaatttaagaaaacattcttctgcctctgctacttatcatgcctacatgaactatatgtttttttatttgttttgtgaaagaatttggtgtctagaagtagaaactgagagaaaggccttgtataaggatccttacacgcatgaaatgaattttgagctctagcttctaggc

SEQ ID NO: 17070 - DNA, 689 bp, Glycine max
  Clone ID: PAT_MRT3847_115419C.1
gattgatttccgttttgttcagcccgcagtcgaagcgtaaccaagtctcgtagcacacactcacacactcagatctctcttctctttctgcaattccattgttgttctcttcactctcacaatgcgaatcctcgttgtgctctctctcgccaccctcctcctcttctcctccctctttctcaccctctgcgacgacctcaccgacgacgaggacctcggcttcctcgacgagccctccgccgcgccggagcacggccactaccacgacgatgacgccaatttcggcgacttcgaggaggacccggaggcgtacaagcagcccgaggtggacgagaaggacgtcgtcattttgaaggagaagaacttcaccgacaccgtcaagagcaaccgcttcgtaatggtcgagttctacgcgccctggtgcggccactgccaggccctcgcccccgaatacgccgccgccgcaacggagctcaagggcgaagacgtaattttggcgaaagtggatgccacggaagagaatgaattggcgcagcagtatgatgttcagggtttccctactgtctacttcttcgttgatggcattcacaagccttataatggccaaaggaccaaagatgctataatgacgtggattaagaaaaagatcggacctggtatatacaacttgactacagtggaggatgctc

SEQ ID NO: 17071 - DNA, 281 bp, Glycine max
  Clone ID: PAT_MRT3847_11541C.1
gtagaagtcattatttattaaataatttaaaaattacatatttgaatacagacaaaggaattagaagaaaaaaaatctgtaagcctcccataagtagtttctggatctgtcatgcatgtgaactactggttacttcatgttacttaatttgtcacattacaaaacaataaactaactaattaacgggccttgagcctattttaattatttttaattacgtgttatcggtctaaaccacattacataacttcagcatatgctcgaggggggcctaaatgggt

SEQ ID NO: 17072 - DNA, 2381 bp, Glycine max
  Clone ID: PAT_MRT3847_115420C.1
tggtgcccccctcgggttagggtttggattttcaaagcagaattggaaaccgttattcccttcaaaaaccatttttactgagtaaagaaaaatttgacaattttttggtccaaattgatttattttaactgcaaaaagtgtatgagcgttaaaactggatacttaaggcaagaaactgttcctctctcagttgaaaatcaactaagtctcacagcacactcagatctctcttctctttcttcaattccattgttgtttggttcccttcactctcacaatgcgaatcctcgtcctgctctctctcgccacccttctcctcttctcctccttctctcccaccttctgcgaccacctcgccgacgacgaggacctcagcttcctcgacgagccctccgccgcgccggagcacgaccaccactacggcgccgatgactccaatttcggcgactttgaggacttcgaggaggacgacgcggaggcgtacaagcagcccgaggtggacgagaaggacgtcgtcgttttgaaggagaagaacttcaccgacgccgtcaagaacaaccgcttcgtcatggtcgagttctacgcgccctggtgcggccactcccaggccctcgcgccggagtacgccgccgccgcgacggaagtcaagggtgatgacgtaattttggcaaacgtggatgccaccgaggagaatgaattggcgcagcagtacgatgttcagggtttccccactgtccacttcttcgttgatggcattcacaagccttataatggccaaaggaccaaagatgctatagtgacgtggattaggaagaagatcggacctggcatatacaacttgactacagtggaggaggctcaacgcattttgaccaacgaaactaaagttgttttgggcttcctcaactctttagttggtcctgagagtgaggagcttgctgctgcatcaaagcttgaggatgatgtcaatttttatcaaactgtgaatcctgatgtggcaaagcttttccatattgatccaggtgttaagcgtcctgctttgatcttgattaagaaagaggaggaaaaatttaaccattttgatggccaatttgaaaaagcagaaatagcggactttgtaatctccaacaagcttcctttggttacaatttttacaagagaaagtgccccgttaatctttgaaaatcaaatcaagaaacaattgttgctgtttgtaacttcaaatgatacagagacgtttgttccagtatttaaagaagcagcaaaaattttcaaggggaagttgatctttgtttatgtggaattggataatgaagatgtaggaaagcctgttgcagattattttggtatcactgggaatggtccaaaagtacttgcatacacaggaaatgatgatggaagaaaatttttgcttgatggagaggtgactattgacacaattacggcatttgggaatgatttccttgaagacaagctaaaaccttttctcaagtcagatccagttcctgaaagtaatgatggtgatgtgaaaatagtagttgggaataactttgatgaaattgtcttggatgagtcaaaggatgttctgcttgagatttatgctccctggtgtggccattgccaatcactggagccaatatacaacaagcttgcaaaacatcttcgcaatattgattctcttgtaatagccaagatggatggaacaacaaatgagcatcccagggctaagcctgatggattccccactcttctcttcttcccggcaggaaacaagagttttgaccctattactgttgatacagatcgtacagtggtagccttctacaagttcctcaagaaacatgcatcaatcccattcaagctccagaaaccaacctcaacttctgaatccgattccaaggggagctctgatgccaaagagagccagagtagtgatgtgaaggacgaattatgaggagttaagtgatatatttttatttatagaaactatgattcagacagatgatgacatagtgactgaggtaaaaaataccaagttacttctcacccctggtcaataaaaaacaaacggggagtggggggagagagacaaatgcgaggcacacatgtattactattaacttcaatttgtacaacagtgggtaatttagaattttgattttgggttgagacttcaataaattcccccttaaattcaaaattttgcctccgcctgtaataataaacaaagtttcatgtatacgcgtcaattttattttcggtgtcagattatttggttatttttgcccttagtagcaaaaaaaaaaaaaaaaaaaaaaaaaaaaaaaaaagggcggccgctttagaggattccagcctaaggtagggggccatccaacgtc

SEQ ID NO: 17073 - DNA, 717 bp, Glycine max
  Clone ID: PAT_MRT3847_115421C.1
agtaataactatattaaaagtgtccttgatgggtaaaaaaacctcagcttacattagaccaatacgatcaacatttctgacacacttgcacgtaatatgcaaagattggaaacatgttttactcgtattattatgcaaaaaccacatctaacatgcaaaagctactcgtattagcttctatatgatgcagattggacctgacgcaatggagaaacaaacatgcacttaatcatcaacatatcacgcgtttgcagccatacatgatgcaattttacacatccggattgaagttttctagttgtagcttgtgcatctttatcccatctgtcgtgatttttcgtctttcaaacgtatttccaaacacaaagtaagcagcctgtgttacattgtttctcctatgtacagattcaccctctactgaaaatagtaatatttagccctatactcactgcaatatgttcctgcctcacagtcagcgtagcaacccaaataatgttctgagcacaacctagaatgtattatagccagcttctcctttttccaagagagtagagtactactgggtattttccaaatatacgatatttcctggcataaaaagcttatattctgattacatcattgccacactttccatgaagagggatttcccaccatgcaagttgataatcagaagatcaaactttgatctgcttttcaagctagctctgatctggc

SEQ ID NO: 17074 - DNA, 240 bp, Glycine max
  Clone ID: PAT_MRT3847_115422C.1
ctgcctcgatgcgcccctgttccgcacccgtcaccacataaaattcaagctctcctccgccattggtgttggaaccctgcctagccgtctgcagagtttcttcctcgttggctactttgcggtcaacattggcttctgtgtctggaagatcgactacagcatcttctcctcgggtgccggcgaacttctcagccgctcgggtatcatggctgtcatcaacatgattccattgttcctact

SEQ ID NO: 17075 - DNA, 584 bp, Glycine max
  Clone ID: PAT_MRT3847_115423C.1
caataatttactttgattctgatgcagacaaaatggaatgtttatgaccaagatttgagtccagtcagttccaatcaaaaacctatgatcttttttttcttacttttggggtgtcattacctttcatgctccacattcaacagtgaccacccacttaatgtaccatcttcttcattcactgccaactccactttctctcagtgcatgcatgtaatatagtattcagtttttggagtccacaaagctagatatagccacctcttcaaagttcaaaacttccctttttggttctagtttgcatcttattcattttccctgcatttctatgcttcaaactattcttctttttttgtctaaattttccttctgtctttttttctgactcaaagtttgaacttttcctatgggggtaccttgaattgtgtagaacatcagttttttatgtgaaattttattctagttcaagtatgggctggtgttcttatttttacatggatttcagtttctaggatttttttctgcacaaatcactaatggcaacatttgaagcaaggagtgatctcaattgagtacatttttatgaa

SEQ ID NO: 17076 - DNA, 657 bp, Glycine max
  unsure (1)..(657): unsure at all n locations
  Clone ID: PAT_MRT3847_115424C.1
ccgcactccaccgctttacgccggttatcagggaaggagcagagggcgtagagcgccgtggcggcttcttttctttcccttcccttcccgtcgcggaggagtgtcacgagggcattgatggagcccgggaaggctccgatggtggccttgttgacgtggaggacggcgaggctggtgaggagggtggcggcgagggcgcggcagtcggagggggcggcggaggagaggaggagagagattaaaggggagaggaggccctcggcgacgaggccgaccttggcgtcgtcgtccagggagaggtggaggagcagggagagggcgcggtggcggaggtcggcggcggagatgtgttggaggaaggttaggagggcggggacgagggcgggggagttgaagaggcggcggcggaagagggagtcggagtgggagaggcgcgtgaggtggtggagcgcgtggagtttggaggcgagaggagaggagggagaggtgagggtggagattagggttggaagggtggtggaattggctactaattgatgagaagggttgatggngggcgtaatttggagattaagcctccgagggcgtggttggggatgagagaagagtgttccgggaggggcaggttgggtatctggccagtgcgatggccggcgt

SEQ ID NO: 17077 - DNA, 272 bp, Glycine max
  Clone ID: PAT_MRT3847_115425C.1
gtcatgattgcgatgtttgcgaatgcagcagtcaaaaggagtgagtgggtcttattggtgcaagtgtttttaacaaacaactacattgcatagtatttttatgcatgtaagtggacaaaatcagaaccacattcctgggaattgatcttatcaatagaggtatgtaactctaataattgcttagaaatgtggagtacttattggtcatatcaaactttatggaatttgagtttccttattgacaatgccaaactatctacagtttttgatat

SEQ ID NO: 17078 - DNA, 718 bp, Glycine max
  Clone ID: PAT_MRT3847_115426C.1
tgggggggaaggagaaggatagtagtagtgtggtatttgcagcggaaacagagaggaagaatgactaggtgtgaccataagaagaattttggaaacgaaacctcgtaaaggcttctcactaacaaacaatggcggctgaggctgagcttccggagtacttaaagtgtccgatttccctggaaattatgtccgaccccgtcatcctctcttccggccacaccttcgaccgctcctccatccagcgctggctcgacgccggccatcgcacctgcccaattaccaaactgcccctcccggaacactcttctctcatccccaaccacgccctccgaagcttaatctccaactacgcccccatcaaccctctcatcaatagtagcaattcacaccctcaaaccctaatctccaccctcacctctccctcctctcctctcccctccaaactccacgcgctccaccacctcacgcgcctctcccactccgactccctcttccgccgccgcctcttcaactcccccgccctcgtccccgccctcctaaccttcctccaacacatctccgcctgcgacctccgccaccgcgccctctccctgctcctccacctctccctggacgacgacgctctcttatcactcgtcgccgagggcacgctctcccctttaatctcgccctgatcctcctacttgatacccgtcgacccgtactcacgttaacaaga

SEQ ID NO: 17079 - DNA, 269 bp, Glycine max
  Clone ID: PAT_MRT3847_115427C.1
actcgagccgaatcggctcgagacggctgcgagaagacggcagaaacggcagtggcaaactacgggtgcaagttatgcataccagaaaaaccattgactaattaatctccctcccaacaaatgcaagttgaactttctgaccacttacagtaacatgccaccaacagatagatacattgatccaaatccagatgcaaaagaccttgcagcaatgacttgtagacccatgataaccccaaagcaagaaaataggaaaagctcagatgata

SEQ ID NO: 17080 - DNA, 360 bp, Glycine max
  Clone ID: PAT_MRT3847_115428C.1
actcgagccgaatcggctcgagttagaagataaaaatagaacataaatactttgaattaaaatgttggaaaaaactcaagttgcacgatcactaaaaataaaactaaattagaatataaaaatgagggataattctcaccctttgagttaatttttgggattgaattaggtctaaactcatattctaagatagtaccaggacatagggtcctaaactcatattctgagataaaatacaaaatttttcatctatattatttttcttctctctatcaaacatattgtaagggggtggttttcttgaccttacaaagaagcgcgaggcgttttcttttgtaagcctaattggaacgtcttatg

SEQ ID NO: 17081 - DNA, 272 bp, Glycine max
  Clone ID: PAT_MRT3847_115429C.1
acggctgcgagaagacgacagaagggtgacctaaaataagaatcagtcagatagaattaatatatcagccattaaatgatggatgtcagagtaagtgttctcacttggaatgatcatttgagcttttatccctaagctctgccttcaaggacagtgactcatctcttccatttgaagcctccataactttgaatcaaacaagtgaattttgttaaggctaaactaaagagacattttgaattagaaaccattaaccagcaacaaaaccgaaa

SEQ ID NO: 17082 - DNA, 250 bp, Glycine max
  Clone ID: PAT_MRT3847_11542C.1
tgtagtttcttcttccagcgcaagaactcgcggtctctgatccgaaaagtggaagtttttcagttgcttttggagtatttgcgtgattcccaatcgggttcttcgtgtcttccacccacgacggtactcatctcaaggagctctacctcttgctctaccgctccaagattctcctcgattactgcgcccaatcgagtaagttgtggctcttgcttcagactcattccatctctggtcacttccatgattt

SEQ ID NO: 17083 - DNA, 184 bp, Glycine max
  Clone ID: PAT_MRT3847_115430C.1
atcaaatctagcattacttcaccatcaacaactacagtgattaatgacgaacgggtgcagggcataacttatagggagctcctttaacttctcctttaggcttatcttgctaaatccaaatatcatctactcctattactctttatcctttatttcaaactaaatccccctacgagcactgtat

SEQ ID NO: 17084 - DNA, 495 bp, Glycine max
  Clone ID: PAT_MRT3847_115431C.1
ccaaaggacggctcgctttcaaaataacaccccaaggtatcatcatcaattttacttgataaaaatcccaagcaaaagtaagtttcaaaggaaaacccaacccccccctatccatattatctaaggacggggcaaaaaaaaaacaaacttccctccaaaaaacgttcacttgaatctgaaaacaattttatggatctgctgctctgggcaaaacccacccttccaaatttggcaatgaattcttgtccaaaaaacaccagccagtttaaaaccaatcctttgttaaaacaaatggtttttttatcactacatttttattttaagaagtctttaatcccatttttgcttaaaaaaaagtttttttttaaataaaacttaacagttttaccccctttttgttgctgcttttgtgggtccaccagggaaatttttttatgccaacaaaatcacccactctgttaataacctgcaaggttttgataaggccctcccttg

SEQ ID NO: 17085 - DNA, 1305 bp, Glycine max
  Clone ID: PAT_MRT3847_115432C.1
ggcccagacaaatttaatagcagatgccgcgtacgttgctgtattggccgatccctacagtatttgcaacagttttcgtggggttgtatgtgcttgttcacatttggttggctgcaccaagcacaattcaagggcttgagtttggtgggcttgacttgccagattctattggtgaatttgttgtgtgtattgccttggttcttcaaggtgaaagagtgctgggtataatctcacgcttcataaaggccagagcacaaaagggtagtgatcatggaatcaaagcacaaggagatgggtggttgctaactgttgccttaattgaaggaagcagtttagcttctgttgattctagtgggttgtctgatccctatgtggtgtttacgtgcaatggaaaaacaagaactagttcaatcaagttccagaaatctaatcttacatggaatgaaatatttgagtttgatgcaatggatgatcctccttctgtgctggatgtggtagtttatgattttgatggaccttttgatgaaaagctgcatctctaggacatgctgaaattaattttctaaaagcaaatatagcagatcttgctgatatatgggttccccttgaaggaaagttggcattggcatgtcagtctaagctgcacctaagaattttcttggacaacactagaggtggtaatgttgcaaaggactatttaagtagaatggagaaagaagtcgggaagaagattaatttgcggtctcctcaagcaaattcagcatttcagaaactgtttgggcttccacctgaggaatttctcatcaacgatttcacctgtcatttgaaaagaaaaatgcccctgcagggccgcctatttctatcagcaagaataattggatttcatgcaaatttgtttggaaataagacaaaattcttttttctttgggaagatattgaagacattcaggttattcctcctacattctcatcaatggggagtccaataattgtcataactcttcggaagggtagaggtgtagatgcaaggcatggtgcaaaaacacaagatgaacaaggcaggctgaggtttcattttcagtcatttgtgtctttcaatgttgcacacaggtagacaagggacattatataacatctgacgaacttatttcctatatatctgcaactcgtatgaaaatctctccatagcaaaagtcttataagtgatgagagtggctcattccttggcctggatgatgttagcatgtctgagatttattcttgttctctattaattcctgtaatctctctctcttaccacgcaac

SEQ ID NO: 17086 - DNA, 135 bp, Glycine max
  unsure (1)..(135): unsure at all n locations
  Clone ID: PAT_MRT3847_115433C.1
ggggaggccgcccacgcgnccgntcaatgtcaatatagggccgaacacccggctcgctacgggacagtactccggtgcagagcacactactcttctccatgaacaaccaccaccagaagcacggaaaggagatac

SEQ ID NO: 17087 - DNA, 320 bp, Glycine max
  Clone ID: PAT_MRT3847_115434C.1
ctcatattcattaaaaaaacatgacgatgactcatcgtcatttaagcctcatgatgaatagcaggaagattttgaccaaaaccaagagtagttggatgtagattatagatcgagttcctcatctcataatgagcacacgaaatgcaggtgcctaatagcttcagaaagaggaaatgaggaccccacactaccgatgaaggcaccgtttttaactgtatatctgtataaagtaaaatctggtctttgaaaatgaatgtaatctattgtgtatttttgtgttttaatttgatataattaagagaataaaattacctattctt

SEQ ID NO: 17088 - DNA, 478 bp, Glycine max
  unsure (1)..(478): unsure at all n locations
  Clone ID: PAT_MRT3847_115435C.1
ctacaatggcatctgctctacgactgtcgagcgctttccgcgctgccgcccctctgcggaccacagccttcaatggcctccgctgctactccagcaagactcagtcgctgaaggagaccttcgccaacaagctgcccggcgagatcgagaagatcaagaagctccgcaaggagcacggcaacactgttgtcggcgaggtcactctcgaccaggtctacggtggtgcccgtggcatcaagtccctcgtctgggagggttcagttcttgactctgaggagggtatccgctcccgcggcaagaccatccccgaatgccaggagctcctccccaaggcccccggtggccaggagcctctcccagaaggtctcttctggctcctcttgaccggcgaggtcccctccgagcagcaagtccgcgacctctccgctgagtgggctggccgctccgacgtncncaagttcgtcgaggagctcatcga

SEQ ID NO: 17089 - DNA, 162 bp, Glycine max
  Clone ID: PAT_MRT3847_115436C.1
cgtttcttcctcttactcagtagtgcgattttcgattcgcttctctgcaactatgcctaagcctaaggacttcttcgacatgaccatcgcgggtcaacctgccggccgcatcgtgatcgagctctatgtcgacgtgactcccatcaccgctgagaacttccg

SEQ ID NO: 17090 - DNA, 152 bp, Glycine max
  Clone ID: PAT_MRT3847_115438C.1
aaatgatgttgattaatgcagttggaagaatttggtatattcataaataagtttatattcgccattttccccgtccttctgaaaatgtgtaaagattcaagttattcaactcgaggcaaaggcagtacgtttagaaaaaaaaaaaaaaaaaa

SEQ ID NO: 17091 - DNA, 1937 bp, Glycine max
  Clone ID: PAT_MRT3847_115439C.1
ggttgcgtaatccgtaaagtttcgtgacattacagaaagaaaacaagtatcgttatgtaatccgtaaggttccgtaacgttacggaaaaagaatcagcaaagaaggggggtgaacttatcaagataggggtgtaaatagcaatttgaatctaggcccttccggaacattttggaagttgggttgcttaaggaggaagcaattgggcgacaagctcctccacgtttttgaaaaatggttcctggggcttccctggcttctgtaaaatttctgaaaaccttgggtaagcatattccacttaacattggtgaaagagaagagaaaaaaagatgaaagttaagtcatatatgcttccgtaacttttccgtaaattacgaaagaaggtggggtgaacttatcaagataggggtgtaaatagcaattcgagtctaggcccttctagaacattttcaaagttgggttgcttaaggaggaaacaactaggcggcaagctcctccacgtttttgaaaaatggtttccggggcttccgttgcttccgtaatgcttcgtaaaatttccgaaaaccttgggtaagcatattccacttaacattggtgaaagggaagagaaaaaagatgaaaatcaaatccgaaacacttccgtaaggcttccgtaacttttccgtaaaatacgaaaagggggtgaacttagtaattcgggtgcgcttagaaatcttcttcattaagtctctgggcggcaagcacctcccttttttcctataaataggggagggggggagttgtttcaaaatgttgaagaccccttggctatgcatttcggctattttgggcaaaaaacacgttttcgtgaagaaaaatcgagtcgaagtgcttctgtaacgcttccgtaagcgattatgtggaaattcttcatcgttcttcgtcgttcttcaccgttcttcatccgttcttcgttcgttcttcgttcttcaatgggaattaataaagcattgggcttgggcttgaatccaaaattggccttggacttgaagagggcagactattttattcaacaaaattagatcttatcttatcttatcttgataagatattatttagatttgatctcatctagatcttatcttatctagatttgattttattttatttatgggcttggatttaaaacagatttgtaagctttggggctgaaaaactatataacagcaccaaggttctaatttaggctctctctctctctcttttctccttttttcgtttttacaattccagttctgactttttgttttagcaataaaatttcgttcttcaatctataatttcgctctctagtgattaatggaaggctaagtccccaccgttgttttctcttgaggatcaagcacagttctctttgaggttctattattactgttaaattctgttcagtttttcctcttcactaattactctgaatttgttgctattaattcatgcatgcttagtgcttgattaattgtctttgcgcttaatttacgctcatgcttaatgatcaatttcgttcatgattaattggtgtatgtgtttcttaatcacatattgacagccttatgttaaatttcgcttagtaatttaatttagggttggattaagtggttgaattgataaaggataaattctcgtaacctaggataagagacttgcttgtgaatcaagggggaaacaacgtgttttaattatgatattttctaattaaatttgctcgctatttaatttacaaaaacaaacaacccccccccccccaattcgttactatttaattactatttgttatgaacgtttgattgaccattgctcgttgggagacgacctaggatcacttcctagatactgcatttttaatatttatttgattcgggtacgacctcaatcaaatttggcgccgttgccggggagcaat

SEQ ID NO: 17092 - DNA, 280 bp, Glycine max
  Clone ID: PAT_MRT3847_11543C.1
gcagtatgccaggccatcgcatcatattcttgctccaataattaccttttcactcactccaccccaatatcagaaacttctgttcatgaccatacttacggtaccaataacatctacttgcagacaattttcagttgaccttacagcctaattacacctatacaaacacccttgatcctttattttttttcgagcggaccttacctagctacaatactggcaacaataatactccttgggcatgtgacctatctgcattctttttttcctcctttctttg

SEQ ID NO: 17093 - DNA, 392 bp, Glycine max
  Clone ID: PAT_MRT3847_115440C.1
aatattattttttttgttcctgaagacaaggcaaatatcgcggcacaaattcattatgttgggggtaataatctacaaatgcacgaagcttatcttgtcaatcatcatcaatgtgtcacgagaattgtttttgctcatcccatacaaatctcgccaattgaaaaggaaagctctatctcgctttgaatggctgcaaaaagctgatgtgcctaccatatcacaaattgaaaagttccattcaatgcaaaagatgaagaatgctcctgattcaaatgataaccttgatttactgttgatcattgatttgcctggatttacaacgagcatgtgaagcttttccaaacaaaattgattttaatgataagcttgcgttgccttacacacacaaattt

SEQ ID NO: 17094 - DNA, 343 bp, Glycine max
  Clone ID: PAT_MRT3847_115441C.1
cacagaatcactctctgaggctggaaatattcaggggtttaaatcctatttgactgatttgtcatgggcttgtcagatattgagtaagttggaaattatgagggagtttgtttacacattctttaacctcaagttttatgttgtcatcagctgtcaacaaaggggcatcatcatcttcagttagcatgtactcaagttgctcttgtgccgaagacttaagatcattcaattgtggaggtggagatgcggctcgagccatctttcctaattatggctaattctcatttctctcattattttggttttaagtattgataacatgatgattgggtggctgactatg

SEQ ID NO: 17095 - DNA, 295 bp, Glycine max
  Clone ID: PAT_MRT3847_115442C.1
ggtgaccagatatttcggaagtagcgggggcatagtaacatgctctgggaaatgattctacccaaaatgcatcatccagctcagttaatggtgatctttggagaaagctatggaaaattcctactgctcccaaatgtttgaatttagcatggagggcttgccaaaacattctttctaacagagtcaatctcaaaaggcgaggtgtggatgtggatattttttgtccgagatgtggccaagaatctgaaactgagttacatgctttattattatgttaagaatcgaacatggcatg

SEQ ID NO: 17096 - DNA, 394 bp, Glycine max
  unsure (1)..(394): unsure at all n locations
  Clone ID: PAT_MRT3847_115443C.1
gaatattaanttgtgtgttttctttgctgctggaatgtttttggtagcatggccatgccatggcccaggctaccaaaggntcccttttttaatgaaaactggctatggagagcgttcttcggaggtaaaactcccatgctctaggcttgctgattaagcacacaacatccgaaccttttaaaccattcctgaagagtgtgttgaacctacaagagactacataaatggcgaataatatatataatactctaaaacatgtaaccgatcanctatttcttatgctagtgaacgcgaagtgcatcgtaccgacatcgttgtatccggcatacataacacacgtaatatctactctcccatactataataatatggatatggggtggaggaatatcat

SEQ ID NO: 17097 - DNA, 448 bp, Glycine max
  Clone ID: PAT_MRT3847_115444C.1
gccacgctctccacgctcgtaccgtacgaaccgtagaggtttacatcacttaacttaaattataacgaaaccaatttagttcagtccaaatgcaatatccctaaagagatttgggatggacagcctttacacaatgttagtatgtgcaggcgacgctctaggccaccttacgccacatatctgaactctaaattacttctaacaggtttacatctacttactggctctcatcaagatgctcaaactcggaacgactggtgttcccatgtaaatgatgggtttgatgcttgtataattatgacactaatacaccctacgtgtgagggatgtcttctcaatgccgtagagtgctactggagccagtgtgaaagctagctatcatgggactaagactaatacactagacatgctcaagcaaaccggctgaccttaaatggacgcatgcatg

SEQ ID NO: 17098 - DNA, 607 bp, Glycine max
  Clone ID: PAT_MRT3847_115445C.1
atttttcttcctctatctcaactgtgttcgtgtgtatgcttttgagttcagggacagactcaaggagctgaaagacaagaagaaacttggatttgaatcagccaagatttgagttacacgtaattgcaaagatgagtgttatgtatagtcctgttctcaattactcagatgtggagtatcagctatgggaaaaccaagacatggattcaagtattggacatccacaacaacactgtcaccaatccaattctggactattgaggtactgttctgctccaagctcaatgctggcaagccttattgacaacaccattcatggctgtgtcaatgaggaaccattcacaagtgagaatcagcagcagcagcagcattatcttccatccacgagttcagaaatggagaccatgttgtccaaaatgccaccatccaacattggatggagtaactcagaacctttgcaagaatttggaggcaagcctgtgaagcaggaaatagggcaatctgttccacaaggaccaccaaagcagaatggttattcttatggtggctctcagttaatttaccaatgtgaggggattcgaggcttgccaaatgggggttgcattgc

SEQ ID NO: 17099 - DNA, 1268 bp, Glycine max
  Clone ID: PAT_MRT3847_115446C.1
gctacgccagactcaaaatagagtccaaacatatataaataaaaaaggtgaatacataaaaagacatttgggtccatatgctcaagtctaccaaccctaacctttatttaccaaaccctaggatatatcaaaactttgcagtgacaaagagagaccccgacatacctaacactaattaaacctaaaactaatgtattttctattttcatgagaagatctattcctggttggacaaatgcctgcattatgctcttgattttacacaaccaaacatatctatggattcatggaaaaggacacaaaccagcagaagcttattcgaaattttttactattaagtttgaggatcccaaattactcaggagttgggagatgaagcatgtttaaatttgtcacagaaaagatcacatgtttttcatacaagttccaagatcaggcttccaggagaaagaaagtaattaacaggtacccggaagctacggggaatatttactccaaaatagtttagacaattcctccaaatttccatttcaatttgacagttatacagcatacacgtccactatagatatttgaagccaaaagtttcccccaaagcatcaagcgccactagcatataaccgggtccattccttggctgtttcaacagcctcggcctcattagatttccaatgcttggcaatgttctcagaaagtggatcatctgggttaggtgcacttagaagagcttgaatactcaaaagtacagtgcgaatcccaagggcaggactccacttatctttcagaatgtcaagacatatcctgccaagcttatcaatgttcggatgatatatttttgtcagaaacctaacctttggagcagccattggatattcttctggcaaaaataattccaacttgaaaactcccccttcatatggcgactgagtcgggccaaggatcatcacattgaaataccgcatattgtcctccgaaggggacgcactaattccaggcgctggctcactgagcaaacgctgcgtttccttgatgattcttcgagggaggttactgttggccataagcggggtcgattgcaaagcacgcaatagggttgtgagtcaaagagagagaactttctctcactaacacaaaaagaaagaaagctcaatgaaaatccattatctctcgccgttgtttatataatttttgcttgctgaaaaaaaataaaattaagactaaatatcacataacttgtgatacaaccacttgtaattcccggcccggcc

SEQ ID NO: 17100 - DNA, 225 bp, Glycine max
  Clone ID: PAT_MRT3847_115447C.1
gaatttccggggcggaccaaccggtccgccaaccgttccgtacggttggcaaaaaaacaacagaagggggccccccaccaaagtcctatttttttttatttcctttccaacatgggattcaccgggattccaaccccaaaagcgccaagactaaaaaaagccggggccgccaaagggtggactttaaaaaatggaccaccgaggccaacctcaaagtcacgttct

SEQ ID NO: 17101 - DNA, 435 bp, Glycine max
  Clone ID: PAT_MRT3847_115448C.1
cctactacccccctgccgccctttttttatcttttggctatttccaatgaataatacaggaatagcgggtcgtttttttttgttaacaattccgaacgattgggtcaatttttaaaacaatgttccacaaacttttttaaacgaaaagggtgttttaattaagactataaatatttgtccacagtgatattcatacaactatggtacaaacattgcactatccctttagtagaacccaagagtatttctgcccctgttgattcccatgttttattttcaccagcaactaaaaatttcttacatttgattagttttaccaccagccttttggaattttttcaaaaaaaaagggctttatcctcacattttcatcacttttaaaaagaggaaataaaaaaatctgaaaagccaccgcattttgtaggccaccctttt

SEQ ID NO: 17102 - DNA, 1253 bp, Glycine max
  Clone ID: PAT_MRT3847_115449C.1
tttttattcatccctcattcataatcttcccataactcatgggattaaatgcaatgatctgtatgcatttatcattggaagctatgtgatctggactgctgttgctggagttagatactcaattgagcaaataagaaaaaggagatcttcggttttgtttggccaattatggaagtggtgtggcattcttgtgaagagttctgcacttctgtctatatggatatttgttatcccagtgcttattgggcttctctttgagcttttggtcattgtgccaatgagagttccagtggatgaaagtccagtattcctcctttatcaagactgggcattaggccttatatttctcaagatatggactagattggttatgttggaccacatgatgccgctggtggatgaaagttggcgagtcaaatttgagcgagtgagagaggatggtttctccaggctgcaaggtctttgggtccttcgggaaattgtacttccgatcataatgaagctgttgacagcattgtgtgtaccctacgttttggccaaaggtgtatttccagtgcttgggtatcccttggtaataaattctgccgtctatcggtttgcatggttgggatgcctctctttcagttttgtgtgcttctgtgccaagagattccatgtctggttcacaaatctccataattcaatacgcgatgaccggtatctgattggccggaggttgcataactttggagaacatgctgagaaagcaaatgtagcagaaacttctacaggggagcaggaagctattttactaggtacaggtttaaaccaacaagatcacgaagcagatgttggactacggttgaggcacgtaaatcaacaggtgggctgaattgtattttcagggaggaaggccactgtgtaggttgtgaagcctcgtgctgacatggttcatgaatcactgatgtatactctacacttgtgttgggttagttataatacctcgtcatgacacacctgtgcttatagttaacgttaaacattttgtgcgtgtcgtttaaaatttagctaataggaggaaaataaaattgttgatagcgcatttttttttcaaagaaattctttgtgaaatagggaagctggtcttgatcgtctgtctgagatatacttaaataacatagttatagtagttaattgttatggtaattatttattaatcagtaatgtgattgattcggtgcgcttaacttcaaatgcatcatgttcatacggtt

SEQ ID NO: 17103 - DNA, 813 bp, Glycine max
  unsure (1)..(813): unsure at all n locations
  Clone ID: PAT_MRT3847_11544C.1
ccctcagaatttgcttcatacttccattactgccggtcactgaggtttgatgataaaccagattatgcttatttgaaaagacttcttcgtgaccttttcattcgtgaaggtttgagccttgttcttcaatttatattttatactgggatgtgctaagtactatgctccttgataaaaatattttagggaccagatggctatgtttttatattccctttttttgttgttgacttcttgcaccaggattccagtttgattatgtctttgattggaccattttgaaatatcagcaatcttcaagtgtcactgcccctgcccgtgctattgtaagtgatagcatgctatcttattgtattagctgattgattgttgagattaggttattttagtggaagtgacatttgcagggtcctgctgctggaccaagttcaggcatgccaccactggcttcaaatggtgacggacagttaggtatagtctttctttttgcttcacatctttgatctatcatttattcaccttgattgagatgttagactgtggtgtcataccattcaataatctgtcagctattatgtgatgccttttgtcctttatagtttttcatttgactcatccttttcatgctattcaatttctgtactcggaaattgtttcacaaaagcgttctcatgcttgctgatcagatgataaatggagttgagtttattcattcccaatcatttttanatagggacacaaagggagacaacttcctaatagggtttggaaaggcgtgcaaagtcaatggcataaacttgatttgcctcgagc

SEQ ID NO: 17104 - DNA, 1854 bp, Glycine max
  Clone ID: PAT_MRT3847_115450C.1
attgcaatctctttactggtcatagatagcagtagttcaattgagaattcctcacaaaacttaaaaaaaatgaagagaattccacacaaaagtaaaggagatttcaaagcaaatgacttttcagtctcaggttacaatcaacgacaatcacacgaaacacaatagaacaacataacacacttgtgcccaactcacgcctagtcgtggcgtgacatactgttcaaatactacaacaccatatctttcaccttctaaccatacttttgtttttctcgatttccaaggaacttttggattcttagctgccaccctcatatgatatttcttgaaaccttgtgttaaaaattgtgtccttttgaacttcaataaaaatttgattttttttttcttagtttcatacccacatacccattgttggatttgaattagttttactttaacatatgaaattgatataaattaagggtcaattaagccccataatacatcaatttttatttcttagatagcattagtagagtaaaacatgagcttaatttgatgatttagttgtgcccctgagtaaggtaagcatcaatttttttgctaaccacaacagccagttgcaacaaggtatgagcgtcaggaatgtggtcctcttgtttctcgtattccattgcccaaagcactacgctgccctttccttttggagtaacttgcaaattagacttgaagctcttgtagagtcccagcacgtcaccctctatgaccttcattgtcattttgttattttccttgtctatgccttcaagcacttgcttggctacacaaactgttccctcatgtaaatagttccaggagacgattgatccctctttgccccattcacctttatgaacttcaactgactgaatattttctggtgaaatgttggcaatagtgtgtggcttgttgcaaaaaacatcatagaactgttcagcagaagccttgatctgcaggctagtttccaccttttgaagttgagagtatgccatatttgctggtgtttcaaactatagtgagaagcgactccgtgaggcttatgagaaactcaagaagagaggtattccattagctactaaccaagtaaactacagtctcatctaccgggtccctgaagaaaacggcgtaaaggctgcctgtgatgaacttgggattacaataattgcatattcaccaattgctcaaggtgctctcactggaaagtacactcctgataaaccaccaagtgggccccgaggcagaatttatactccagaattcctaacaaggctccaacctttgctgaacaagatcagtgaaataggagagaagtatgataaaactccaacacaggtatccttgaactggctggtagcacaaggcaatgttgtcccaattccaggagccaagacagcagaacaagctgaggaattcataggtgcacttggctggagactaactgatgaagaggtagctgagctgcgtagtttggcttcagaaattaaacctgttattggttttccagttgaaaaactctagaatatagcatgcaccttctaaatcaaatgtaaagttgtactgtctctgtatattgatatagctcttgttattattaattatttattttacaaaatacataatatggttcttttatatgaattatttaaaggttttctttttattaattatttattttgcaaaatacacaacatggtacaacgacataaaaaaaaaaaaaaaaaactcaaccaacttaatcgccttgcagcacatccccctttcgccagcttgcgtaatagcgaagaggcccgcaccgatcgcccttccccacagttgcgcagcctgaatggggaa

SEQ ID NO: 17105 - DNA, 124 bp, Glycine max
  unsure (1)..(124): unsure at all n locations
  Clone ID: PAT_MRT3847_115451C.1
gacgaagtgaagttggtggcgacacatccagatggaggtgctcagctactagcaaatgtgaggtatcaccacggaggacgggaagaatgatcncgagcatgcanaaaagcgggcctctctggca

SEQ ID NO: 17106 - DNA, 411 bp, Glycine max
  Clone ID: PAT_MRT3847_115452C.1
caagatcgagtttcaatattcgaccccttaatttcatcttttattctctctctatgggtctcttgctttctttgtaaccccacctctgatccattctttcttcctcacacttgtttaatttgcacaaatatattctactccgaataaaccacctcataatggaggagtcaggggaaaattggccttccgattcttatttagatgacttcgtcaacgatgatttaggttttgatgatgaagaatttggtagtgaagatgattcattttctgggatgggcgagaccgacagaaagaagagacagcgagaactcacagagaggttccttgcactttcagccaccataccaggcttcaaaaagacggacaagacttccatcctggccaatgctagcagctatgtgaaacaacttt

SEQ ID NO: 17107 - DNA, 292 bp, Glycine max
  unsure (1)..(292): unsure at all n locations
  Clone ID: PAT_MRT3847_115453C.1
tnngtacgcnanctcgganatcggatagcanngncncnaganaggcannntcgtactnnnnagaangatnctgnagttgtnatncgnnggnnancaaccttcaantgcaattgactaccgnnacangcaacangcncagcnaatggntgnnncntatncnnnnaaacnggcnaangtttgcncnagcanaggcattcgntgcgcantgcanancantannagaccgaggnnnntnnggncganacaccaagagngnggngaaaagnntttnancccngtgatnnnacntncn

SEQ ID NO: 17108 - DNA, 454 bp, Glycine max
  Clone ID: PAT_MRT3847_115454C.1
ttgggatgcttgggcggacgcgtgggcggacgcgtgggcggacgcgtgggtttcgaagacaatcttacaccttggatggagggctttttgcaattgttggagttaaaactgcccgagcttgaggcgaagtcggtcgacttggaacctaatgagcatgacaaacttcgctgtgaaatttgcgagatcgccactcttttctcgcagcggtttgaagagtgctttattccctataccgagcgattcattgcctcggtttggaatctccttgtcatgacggacagccgaattcgcttcgattcgttggtcagtgctgcgctcagatatctcgccgccatttgtcagcgtcctcattatgcgtcgcatttccgaagtgaaggcgttttgaaggcaatttgcgaaaatgtcgtcgtgaaaaatatgatgttgcgttctgacgatgtggtaatttacgaga

SEQ ID NO: 17109 - DNA, 293 bp, Glycine max
  Clone ID: PAT_MRT3847_115455C.1
gggccaagaaacaaatttttaaaagagaaggcgcaatttcacaaagcccggggttaaacaaggtctcaaggcccaaccccccccaatgggggggaagccgcccccatcacaaaaggtttggtaacaaaaaaactttacgggaacctttactcaccccctcacctttttattcagcccaaaaaatcccaaccccaaaaaaaatcttttttttttttatttcaaaggaattttactttccccctcacaacaaaaaactaaggggggggatcttaatcttaacccaccccccccaa

SEQ ID NO: 17110 - DNA, 280 bp, Glycine max
  Clone ID: PAT_MRT3847_115456C.1
ttctttttttttttttttttttttttttttttacattgcttcatctcatacggccgttcgaggtgaatttaacttacagcaaaagccccttctccttgtgttataaaaagggaactctacaagctggtggcgctgctaattcaaaaagaaaccttggccatggctgctaccaacacagatctctgacactacatattgttttaaaaaccagacacattttttcggtctcgaaatcaaggggaaaaaaggagagggcccaagacgcttgacaatttaaatt

SEQ ID NO: 17111 - DNA, 331 bp, Glycine max
  Clone ID: PAT_MRT3847_115457C.1
ttttccacgcgtccgcgctcgttgccttccgttgagacattgggctgtacttcggcgatttgttcggacaagactggaacattaaccaccaatcaaatgtatgagtccaaaatgtttgttgttgaacatgcacacggcgaccaaaacactttcggcgaattcacaaactatggctccacctatgagccgactgggcaaatcatgtacaacggagtccaaaaaaactgtgcaaccatcccacacaaagcattgacagaactagacaccatttggtcactggggcaaagacttttgcctggattacaaccaatttaaacactcttaataaaaa

SEQ ID NO: 17112 - DNA, 644 bp, Glycine max
  unsure (1)..(644): unsure at all n locations
  Clone ID: PAT_MRT3847_115458C.1
ccacgcgtccgcgtctttcttactttctcttcctttcttcacttccttctttctattatttcttattattttctgatatttatttctctatgtctatggcggaagaagaaccttccataacatcgccaccggcaagaacgttacacaagttcctctcccgcagcggcaagaccgtcatcgccgcgcaacctctggcggtggttcgcgccaccaccagcaccggcggcgcgcgcgttctcgccgcgccgccgaactcgaacgacgatccaacaccaccgcaggaagaagaaggagaaggcgaaaccggcttcgatgcttctcatcatcatgaacggatattgttgcagagagagctaacggtttcgttcgacgagtttctcgaggtcaccaacacgaaggtcgccaccgaagaggaggctctgaaatcagtgatggcgccgttggaagaagaaactgaagaaggagaggaagccgaatcgtcacaggctcaatcagcgcaaccggttcaaccggtgccgaggggaccgcaactgtttcgaccggtgcagaagaagaaagcggttaccggtgatgacgtggaggtggtggaggtgcggaagcctgtggaaaagaaaacattncgaatatttcgaatctcgaggacg

SEQ ID NO: 17113 - DNA, 565 bp, Glycine max
  unsure (1)..(565): unsure at all n locations
  Clone ID: PAT_MRT3847_115459C.1
gttccttctctgcaagatctcctatctgtacattttcaaggtacgtggtatgacctcttttacatataactgtaactcctttagttttgggtcaattgaggttactctttaatttattgtaaatcaaccaatacatagcaaaatgcatgtagcctaaaaatttctccaatagttctgtagagtaccacatgctgattttctccaataattccaaggaggtatttggctgtggatccaccatgcatgttaaccaaattttggtgctttcaacttgtatttggcaagtttgcttattcctacacagattgacgagttcttggggtctgtttggttaggtttggttgtgcttgccaatgtttggcaaggtttgtttgtagcaagccgagagcttaatagcttgggcttgaggaggactgtagaagtgcactaggttggaaagctcctttgaccaaaattgttagtctctccctcttttgtcttgagcttcagcagaaaccatctgactaaaccccttcaacctcatgattntctccgaccaagcccatggtccatggactcttttttc

SEQ ID NO: 17114 - DNA, 377 bp, Glycine max
  Clone ID: PAT_MRT3847_11545C.1
gttcagggaatcggggaaaaccccccggaaaaccaaatgaggggaaccccccccccaaaaggggtggctacaccaggttttttcccccccacacaagggggcccccgaaaaggataacccctcctataaaccagggcggaaaaacaaagggcgggggacacggggcgggccttttccctcccggggggggggcctttttttttctggcgggggggggcaaaaacccttatggttgggacaatcgcccaatggggggggaacacacgcccccaaaatggttctcctggggaaaaaatccccccaaaaggaaggggggccccccccccccaaaaaaaaaccccccttttcggggggggaggggggtcgtaggggggggg

SEQ ID NO: 17115 - DNA, 219 bp, Glycine max
  unsure (1)..(219): unsure at all n locations
  Clone ID: PAT_MRT3847_115460C.1
cgagcagaggngtactctaaggatttaaaaggtgttatatctgccctgcctgagtcatggtcatttataaagagcatatcatccaaaaatcattcttgtacaataaatatatttcactcgagtttgaataagaattttatctatatgacccaccaacatttcatgctgttagctaaaacattttaaagaattttatccatattttcaaaattcataaaa

SEQ ID NO: 17116 - DNA, 1430 bp, Glycine max
  Clone ID: PAT_MRT3847_115461C.1
atacgaagcaagaagtgagtcctgcaggtagcatttcccgtcccccgagccgacgtggcaccgggagaaaaaaaaaaaaagacggagaaacatcgcgggtggtaaagtgtgggtagaagaccgttcaagtgttttgatattggtttgggacgaggagtaagttaatttgtgtagcgtttccattaaaacggcgtcgtaatcatacgttggtattcagacagcatgaaaactccgatttcgggtttctacagaaaccccgtgaagttcagaatgccaactgcggagaacttggttcccattcgattggacatcgaaatcgaggggcagagatacaaggacgcgttcacttggaacccttctgatcccgattccgaggttgtcgtctttgcaaaaaggactgttaaagacttgaagctccctcccgcctttgtaacacaaattgctcaatcaattcaatcacagctttcggagtttcggtcctatgaaggccaggatatgtatgctggggagaagattgttccgatcaagcttgatcttcgtgttaatcatacgctcgtgaaggaccagtttttatgggacttgaacaactttgagagtgaccctgaagagtttgccagaatcttctgcaaggacacgggcattgaagatcctgaggttggaccagctattgcctttgctatcagagagcagctttatgagattgcaattcaaagtgtggtttcagcaagagaaagcagaatgagcaagaagggtcgtcgaggggctgaatatactccagtcagtaaaggaggtgcagcagcagtggacttggtcaagttgtttggtccgaaatctagtgtagttcggaaaagaaaggagtgggacgtatatgaacctattgtggacctactatccaacgaggaagttgatgcccttgaagcgaaggaagagagaaatttcaggtgaattcgccccatggtcagccacgccacatcagaagggtatatagttcaatgacaacatatattggagggttagagttcgaagttattgtagtatatacaagctggttttttagtacgggcaatcaatgattcagaatattgttatcgtttgatttctttggtttgtagtcttgtagagtttcttatttgttctctgtaccctcggcagaagaggagggaaaaaaatagcacccccacggccccacctactctctttatatattttttctgtcaaacttagcagcagcaacaatgaagtcatttctcattaggtgggttttccgtgaaactaagaagtcccaaaactgtcaataatgggttccgaatgatggatattttaagttaaaagtagttagattagtgtttctccctgaagaaatttcattgaatctactactatattatggcataaattaaaataatgagttagagcatttttaatgcatg

SEQ ID NO: 17117 - DNA, 378 bp, Glycine max
  Clone ID: PAT_MRT3847_115462C.1
gtgctctttcacccccattccggctctgtctttctacaagccacagtccaaactggcgtattatgaagaccgtcgtgaacagcaagttcgctcaaatcaactacggtaaggaatatgagaagcacgaccacatgcaccacgacatagaccacaacagaccactagacgaacacactgatatgctgagcacccaagccaaatttaaaaggctgaacatcacctacatcaagaatgacctaaacagcgtgcctagccagaaccatctctataacaacatctaggatgcggatgttgagaacacccgtgagaaaagcccacagcttagaaacactgaatgtttgaaagagaagtgcatacatcaacgattgagctcggttc

SEQ ID NO: 17118 - DNA, 285 bp, Glycine max
  Clone ID: PAT_MRT3847_115463C.1
gttcgcacccttactttgttgagcttattccaaagaaggcgaagaccgtagatacacggtgaaaatgcgaccattgtaaagcaaccaaagtatgcactcattttgatgtctgatatatatgataagcatatcacaatggatctacgccgcattcacctaaagggcacaaacaagtgcgcctttggaaccttgctttgatggagggactattttttgccttctcttacctcgttgcgctacgaaaggtgcctttaaactaaccggaatcttcctcctcctcctgcc

SEQ ID NO: 17119 - DNA, 554 bp, Glycine max
  Clone ID: PAT_MRT3847_115464C.1
cccatgggcaaggaaaggtatttgcggaaatgttcaaaggcactgacaacgaatggaagtttacttacttgatgttgagattagagccccatttactgcacaaataattctggagtcatacattccatcttacagtgcaaccaagtagcctaaatgataaaaaggtctttaatatttggtccattatggatgctgcatttttcagctatcagcattgccccccttagccagtccatgtttcatgagggatgaaagttgaaagaaggaaagccaattaaagaaagtcaaataatgtgaaaaacaggatcccaagtctcaggttcagtatttttgtttttttgtttttccatttagaacctgcggatttggggaaaatttttgggcgaggatcttagtaatgatgaccggagcaatttactttgtccttgacagctattgagaaatccgtataccaatttgttgttattgctgacaattcaacttggcttggtttgtgaaagtactttgagtagctggttgtagcatgcaaatttttaaggatgaatataagggga

SEQ ID NO: 17120 - DNA, 348 bp, Glycine max
  Clone ID: PAT_MRT3847_115465C.1
aggggccaaaagatttgcgtgcttattttggtgaggccctcctttcaaaaaaagatgggaagatgtaaatgtccccagttccccaaattgggacctttgatacctcatgaacaccccaccattttcattggtccgtatggcttgacttgccgagggaatcaacccccttaatttgacaagccattatttttcggaagaccttccttacttggggcttcaaggggtccaatccatttgtgaaagcttcacaaacactcattagcttcattatattgggctcaaattgcgttttttgggcatttgccaacgggaactgagctgaatttatgggggcgctcaagcgacggg

SEQ ID NO: 17121 - DNA, 594 bp, Glycine max
  Clone ID: PAT_MRT3847_115466C.1
agggaaaagggaaggaaggcaaaaaaaaaggggccattacaaacaggcaaaagggggggggagcaaacattattcaccccaaaaggaaaacccccaggaccttggtcaaaattacatatttaacactttatcacttccaccttttccaaccaggcttagggtgggcaaaaccaaaccgggcagggttccaagggtgggcaaatttcccaggctggaactttccaagaccaaaagaggccccggggccaaaacgaggaaatcccggggccctagggggggcaccaaagggagggggaggagaagaaaaacccccgggcaaaaattctcccatgccagccccaccccctccaagaaatgggggggccacagggggaaacccctgggggggaggaaaaacgggggggagaaatcccgaaagaggaaaaacaggggggggaaacccccccggggggggatatgcggggggatattttgaaggaaaagaaccggaagggggatatccccccaacggcgggaaggcgggggggggataccctcctggagggggaaaacccgggggggggtaaccatggggaggagggagggggggggggg

SEQ ID NO: 17122 - DNA, 812 bp, Glycine max
  Clone ID: PAT_MRT3847_115467C.1
cagcgggctagtacgagtgggagggcgactattgcgcatgttgggacgaatgcgatgccgacgctgttgcagcctgaacaggggcagcaggcgcaggcgcagcaggcccaaggatcagatggcgcgcagatctctcggcagtcttcggcgcagggagaggcgtctgggtccggagccgctgcggcagcgtctgggtcgaagcaatctggcggagagagacgcgcggcagaaggaaggacgggagaggcggatgatggtgaaacgagtgatggagggggaatcatggatcgagcagcgactattgcgtcctcggccagggaattactcggcggttggtggtatggcgacggccaaggaccggcggctggggctgcttcgggaggacaaggccagggacaagggagaggaatgagggggtcagtgcttgctggatttagtgggggtttcggaggtgctggaaatgcccgtgcgggagataccacggggcaggctgcgccaggtgatgcaccggcaccggcgcaggggacgtcgaggggtccgtgggggagacatcgaaggggcgcttcgttgggttaggagctttgacgattgggatggggatggggatggggacggcgaggttggttgtgatctttatgcggagatggttggacggatatggacagccgacagcgacagcgcgtgcacaggtattttattactttatatgtaagatgatgattatgattgggatatgatcggattggatctggaagcgaagggaagcgacatagcttgatatgcggagtaggcatgcatttgttatcggaaaa

SEQ ID NO: 17123 - DNA, 386 bp, Glycine max
  Clone ID: PAT_MRT3847_115468C.1
actttctccattgcatcctaaaataaccaaaaagagaattcaccatgtaatacgtattctgaatcggtaataaagaaaatggaaaacaaggacaattgaaataaaaaatagtatgcaggatcaaaccatgaaagcatacgcagaaatggacccctaaatatatatttttatcaaaaaggtttttcctattaatatttgacagttcttgcatatagtaaacccttaagaaaattaaaaatatatatataaaatcaaaacaccgtctaacactcattcttaggacagggataattggacaagtaacccatggatgattaaaccatccctctgttgtcttcaagactaggacaacaaatatttgcctttctagtttctagggtctataa

SEQ ID NO: 17124 - DNA, 745 bp, Glycine max
  Clone ID: PAT_MRT3847_115469C.1
gctcggaacacggctcgagcttccatttctctcgcggtctctcttgtcttccatgccgtgacttgcttcaacgtctatatgctgtgactgtcactgctatagcgacaaatttcacacaaatggcgtgttgctataagtaccagtttttgtttcttcactctcattccttctggaggaagcttccgttcccgcgccacgttaccgcctcgggtttcacttgcaatcttcaaaccccgtcgctgcttctttcttcgcgctcgcgcgcgctactctctaagagctacttcagaatcgccgggagccgttcccgcaactccgcgaagtgccgccgcgtcggggacgttgattcccgaagccggaatcggaatcggaaccggaaccgctcaagcgctgcagtcaggttctgctggcaatgcggaactcgtgacgaacgccgagcctttgaatggcagagttatgatcattgacggaacttcgattattcaccgcgcgtactacaagcttttaggcacgtttcgttttctttgcaacttttagttcacgcagaattagaattgtgttcttcacttccttttctagggtgtgatgtggtgaatgttttatggaccatcatctacatcgacatcgtgatcttatccaatgtctttttaaacttgttgtgtttgttggcttcgtttcctctgaattattattttgagtaaaaaaaaaaaaaaaaaagaaagggcggccgcaaacaagtgagctc

SEQ ID NO: 17125 - DNA, 632 bp, Glycine max
  Clone ID: PAT_MRT3847_11546C.1
taagctcggaattcggctcgttgtcaataatgagtaatatgaagttattaaattctgtgctgcaagtgaatcaatttgcaatagatgttgaagttgtaggacaaggcaagccacaaaatggtcttaagggaggaaatgaagctctggattttctggatgttgaaaagctccattccctgtctcagaatgaactgttggaatgttttcattcattgggagatcaattgatctatttatggaaaatatttctaaagttccatagggataacaaatcaaggattttaggatttttacgtgatgcatgggtgaaggaccggaaagctgaatggtcaatatggatgctatattctaaggtagagatgcctcatcattacataaacagtaagagtgaagagtcttcccatcgtggtgtacacagacgagtttccagtttgtggaagttacctgatgatcctctccagactgcggctacacgtgctgaacttcatcgaaggagcattgaacaaatgcggattaacaaccgctcagttcaagacatgcagatatttggagatctcttgcatactccaattgtgattgttgaacatgtgatgaatgtaccccgtcgctgtccgagtgcaaattcattactg

SEQ ID NO: 17126 - DNA, 403 bp, Glycine max
  Clone ID: PAT_MRT3847_115470C.1
agttgccatatgccagctgttatttatgttccaagttataatatattattatcttggtatttgctacatccttcattgttgctaatgtcattggtgctataggaacagtaatgtttcttgcatatttgataatttgaacatgtctacatttcacaatttttttattttatggatctgaataattatttctaaccattttcttgttccttctattaagtttttgctcactaactttgagtataggttcattgctttgagctcctgaaagcatagtccatgcagaagagtatttaattacttgcatgtcatcccaagtagtaaaaggctagaagaacgatgcttgactaaaaaatgaatatatagccaagaagcacttcattttagactttcctgattctgcaaa

SEQ ID NO: 17127 - DNA, 1931 bp, Glycine max
  unsure (1)..(1931): unsure at all n locations
  Clone ID: PAT_MRT3847_115471C.1
aactaccaagggtttttaatattaaaaatttccatccccttttttttttttttttatttaagaacgtgatgataacaagtaatttatttaaatgattatccattttatttcgacaatttttatttttatttttttcaactcaagaaatattatctctcattaaaccaaaaaactttttttttttcttaaaacactggacttttaagttttttaactacaaaagttcatgaatcctccctctgccgctacgcgatcagagtagggctcaaccgtgaaatcgacccattgagctcactcagccgcagtcagtgtttcgttctgtgttatgatgagccaatccctaatctaatacccactatctatcttttcttcagaattagaatccaatttcggtttggttcggttttggaaaatgttgggtggtctatacggagaccttcctccaccttcctccgccgaggaagacaacaagcccacccccaacgtctggtcctccagcaccaagatggctcccgccacgctccgcaagcccgcctccctcttcgctcccccccaaaccctcctccgggcccagcccaagcccaggcccaccaccacaaccatccccaagcccatcctctcctcctcgcccgcccctccccctgatgacgccctcctccagcccgccctcgttggcgtccagtccaccgtcctcgaagaatacgacccgacccggcccaacgactacgaggactaccgccgcgaccgcaagcgcaaagcccgtgaggccgagatgctgcgcgagctcgagcgccgccgccacgaggaggaagaggaggagaaggaaagggaaaaggaaagagaaagagagagagaaagagatcacagcaataacaacgattcgtcgtcgtcgaggcttaatgtttccggcgaagaggcgtggaggaggcgcgctgcgatgagcggggcggggtctgggtcgggggcggtgttggtgccgaggtcgccgtcgccacccccggggaatgtggacgggtttacaccccccaagtcgcccacgcgtccgggggttggggctggcgggcagatgacggcggcgcagcggatgatggcgaagatggggtggaaggaagggcaggggctggggaaacaggagcaggggatcaccacgcctttgatggcgaagaagaccgatagacgagccggggttattgtgaatgccagtgacaacaacaatagcagcagcagcaagaaagttaagagtgttaacttcaatggtgtgcctaccagggtgctgctgctcaggaacatggtgggtcctggtgaggtagacgacgagctagaagatgaggtaggatctgaatgtgccaaatatggaactgtaacccgagttctgatatttgagataacagagccaaatttccccgttcatgaagcagtaagaatctttgtgcagtttgagagatctgaagaaacaactaaagcgcttgtcgaccttgatggtcggtactttgggggtagagtggtgcgtgcctcattttatgacgaggaaaagtttagcaagaatgagttagctccaatgccaggagaaattcccggctttacttgaaacaagtgtcggttattttttctattatttttgtaagttgtcctaagtgaataccctgaagacttgagattgaagtttaatacttcattacatgatagttgagcgttgtcataagtttaatcttggtccatgttttttgtaagtgacaaagggttgttgctcagggaattattatgatcacaagaacattgaacgttccttactagttactagcgctaatgttgtccctgtacattcaaagttccttaatattatgatcagttggagattaaggtaaaataaagnnnannngnagggcggccgccgttagttagctgtcgacacagaataattcggccggtcc

SEQ ID NO: 17128 - DNA, 483 bp, Glycine max
  Clone ID: PAT_MRT3847_115472C.1
gcgcacaaaacctcttttcatattccacccatggcagacccttactccaatttcttctcaccaggtagtttcttccaccactatccttctccaaacccttcaccccaccaccatccctatgctcacaacttcctcaaccaaaatggttccaacatcaataaccacaacacctttttccacttccaccactttcaaaccactatttggtcttcttcacctccttcccctcccttgagagaagcccttcctcttctaactctcagcccaagaaatgaagaggaacaagaagaggatgaccaagatcaagatcaggagattcttcaggaaaatatttgcactgccatggatgtggaagagaattacaacaacagaacccttcaccttcacccaaaaggggaggaacaagatcaagaagatactgatgaaagtgtcactgttgcactgcacataggggttgccaagccctagtgctgctgagatagc

SEQ ID NO: 17129 - DNA, 992 bp, Glycine max
  Clone ID: PAT_MRT3847_115473C.1
tacgtaagctcggaattctgctcgaaaaaagttcatgaatcctctgccgcgacacgatcgagtagggcgcaaccgtgaaatcgatccatcgagctcactcagccgccactgtcagtgttttcagcgcgcgtgttttgttccttctgtgctatgccccaatccctaatctatctatctatctatccatcttttcttcattccccttcttctcttctgaattcgaatttcgaaaatgttgggtggtctatacggagaccttcctccaccttcttccgccgaggaagacaacaagcccacccccaacgtctggtcctccagcaccaagatggctcccgccacgctccgcaagcccgcctccctcttcgcgcccccccaaaccctcctacgggcccaccccaagcccaagcccaccgccaagcccgtcctctcctccaccacccccgcccttcccccggaagactcccccctccagcccgccctcgttggcgtccagtccaccgtcctcgaggagtacgacccggcccggcccaacgactacgaggaataccgccgcgacctggagcgcaaagcccgcgaggccgagatgctgcgcgagctcgagcgccgccgccaggaggaggaagaggaagagaaggaaagggaaaaggaaagagaaaaagagagagaaagagactacaacaacaacaacgattcttcgtcgtcgaggctgaatgtttccggcgaagaggcgtggaggaggcgcgcggcgatgagcggggcggcggcgggggcgccgccgagatcgccgtcgccgccgctgccggggaattcggacgggtttagcatcgggaagtcggagaccgggggattgggcgtcggggctggcgggcagatgacagcggcacagcggatgatggcgaagatggggtggaaggaggggcaggggctggggaagcaggaacaggggatcaccacgcctttgatggcgaagaaaacagattgacgagccgggg

SEQ ID NO: 17130 - DNA, 387 bp, Glycine max
  Clone ID: PAT_MRT3847_115474C.1
cccacgcgtccgtctttgtgcagtttgagagatccgaagaaacaactaaagcacttgttgaccttgatggtcggtactttgggggtagagtggtgcgtgccacattttatgatgaggagaaatttagcaagaatgagttagctccaatgccaggagaaattcctggcttcacctgaactgaaagaacagagcgtctgttatttttgtctattgtttttgtaagttgtccttagtgaatgccctgaagacttgaggttgaagtttaatacttcattacatgatagttgagcgttgtcataagcttaatcttggtccatgtgttttgtaatagtgacgaagggtgttgttgctcagggaattattatgatcacaagaacattgaacgtt

SEQ ID NO: 17131 - DNA, 157 bp, Glycine max
  unsure (1)..(157): unsure at all n locations
  Clone ID: PAT_MRT3847_115475C.1
tagactgccgcgcgcggaaagcccnagnccaccnagngaggaggganngacccncagaggaaancccaacagnanccccacccaaggacccnaaggnagcaaaagtactgaacctggctntaaataaatgtgaaattgaaggaaccagatttcttaa

SEQ ID NO: 17132 - DNA, 375 bp, Glycine max
  Clone ID: PAT_MRT3847_115476C.1
agacccaataacagaacctgcggaggcagtataaatatattcaaacaaacaaatcctataacttacattttaaccattcacgtaaccttaaaaatcacttttttaaacgcctaattctctattaacactttggctgtaaactctattaaaatgccactaaaattcttccttatactaatatcaatatttccattatttaccatccttatatccctacaaaaagaaaccctatctatggcttggtcttctttctccagaattttttcttatcctttttacaaggtttgcccaaccaacttacccaccaatatccattttgttgttgaaatcactatccatcccacccttgtgcatggaaaccctgcttagttaacc

SEQ ID NO: 17133 - DNA, 893 bp, Glycine max
  Clone ID: PAT_MRT3847_115477C.1
acggctgcgagaagacgacagaaggggctgcgttgtgcgtcggagctgtgtctggggaaatttgcgttgtttttcgcggtacagctcacacacactgaacggtaagtatggcggacaaggctgttacaatccgaacccgaaagttcatgaccaacaggcttctttccaggaagcagtttgtcgttgatgttcttcatccagggagggcaaatgtttccaaggctgaacttaaggagaagctagctaggatgtatgatgtgaaagaccctaatactgtatttgtcttcaaattccgaacacattttggaggtggcaaatccactggatttggtttgatttatgacacagtggaaaatgctaaaaagtatgagcccaaatacaggcttatcaggaacggccttgacactaaggtagaaaagtcaaggaagcaaatgaaggagagaaagaatagagctaagaagattcgcggagtaaagaagaccaaggcttccgatgctgccaaggctggaaaaaagaaataagttttgagacaccctgttactcctaaggttaaattggttttggtgctttgtaatagttatttttatcttatgctagatttatagaatgagatgtcttggcgcaagtgttgatccttgttttaatttatgttcgatcgcttataacttcagatgttgagtacattgaacaattgagaactcgtgttttattttccttgctttctaatacctggtaggttcgagttgcgtaaattgggcccaaacgcagatgcatttatttgatttatatggaattgctcagagtttagttggtagaataaccattatagtgtacttttaatgcaatgggtatatttaagtgtttttatcaattcgaattatacttttcgatac

SEQ ID NO: 17134 - DNA, 774 bp, Glycine max
  Clone ID: PAT_MRT3847_115478C.1
tacggctgacgacagaagggtacggctgcgagaagacgacagaaggggctgcgttgtgcgtcggagctgtctgtgcaaatttgcgttgttcttcgcggcacacctcactcactgaacggtaagtatggcggacaaggctgttacaatccgaacccgaaagttcatgaccaacaggcttctttccaggaagcagtttgtcgttgatgtccttcatccagggagggcaaatgtttccaaggctgaacttaaggagaagctggctaggatgtatgaagtgaaagaccctaatactgtatttgtcttcaaattccgaacacattttggaggtggcaaatccactggatttggtttgatttatgatacagtggagaatgccaagaagtatgagcccaaatacaggcttatcaggaacggccttgacaccaaggtagaaaagtcaaggaagcaaatgaaggagagaaagaatagagctaagaagattcgtggagtaaagaagaccaaggcttccgatgctgccaaggctgggaaaaagaaataagttttgagacatcctgtttcaattccaaggttacattggttttggtgctttgtaatagttattttatcttatgcaagatttatagaatgagatgttttggtgcaagtgttgatccttgttttaatttatgttccatcgcttataacttaagatgttgagtacattgaacaattttgagaactcgtgttttactttaccttgctttcaaatatctggtagattcgacgtaattagtt

SEQ ID NO: 17135 - DNA, 142 bp, Glycine max
  Clone ID: PAT_MRT3847_115479C.1
attgggggtttttaaaattttttgtgttccttttataaccaacgccagggtccaccacggaaattcgggccggtcccagccagagatccatctttacttaaaatgagacaccttaaacttcagcgaatatatgggtctaccc

SEQ ID NO: 17136 - DNA, 1621 bp, Glycine max
  Clone ID: PAT_MRT3847_11547C.1
gcctcaaatctgtgccttttactttctattcttgctagtcaaaaaggatttaatgcttgcttggtatccatctatttttctgtttgtattcttcgaaatgttttttgggactatagttattattcacaaaaatgatcgatgcccaagagtaagaaattgtaattatttccatggaaagatttaaaaaaaaaattgtaatgacttatgcatcaacttagttgatggttgaatcaatgttacatatttcaattcctacatcaacgttcctgtggatgacagcatctctctcctaggaaagttatttcttgcatgaaagataaatgcccgatataatggccaccccggctacggcaacaccaatagacgtaacgattcttgttgcagagacagctggtttgggagatggaactgtcattagatccttcatcacgacaggttgcttccaatgcttctttattccctgtagatggccctttccaacaacagcaacaactgagctattctcactcgccacttttaataatgtggaggacatgtactgatctcgttcatgcacaagagtctccattaaagttggaaactccttactcatttcttgaataacaagtgttagcatgtcactgtcatccatttcattcagcatcttattaagatcatcagcgttggataaaaaaactgcttggaaaagtaaagagtataaaaattttgtcttatgccaaaggggcatcttactccatgttctccttaatgttatctgtacaggacgatcaccaagtatcactctgccaccatacttgatggcttcttcataggccacacgaaactcagagccaggaaagacctcaagcttactagcaatcttggcaaggaaccagccataaagtacttcaaacatgttatgttttttcttcaacatggtaaccatttctcccatggtgggtaccttaagattttgaagggtaagcactgccacccgactcgagcacaattccaggaagacaacctgaggtttcagaaaattcactatagcttgaacttctctgctcgattcctcggagacatgagcggtgccgaccaagtaaacgtcgcagacgccgccttcggcagcggactcgcacgacaggacgagcacgtttcttgagagctccggcgagagcgtggctggacggcgatcggagtccggagcggagggagcggcgtcggcttcggaaggctcgtcgattcgaaccatgctctcggagaggctctccatcttcagatccgtgacgtggacgaagtcctccgccgaggcggcgggcgcggaaggttccggcggttgcgggtccatcgtcgggcggaggagagggtgcgttcggcggcggaaggtggcggaggagagtgtggagagttgggggagagagagggtttgggaacgataaagtgttggttttggtgtgaagaagaggggtttggggcgatgagagagctgcgtgactctagcgagttgagtgcgagtgaccaggtgagtcataagctgtgaaagcgtaaatgattaaggtttctctctcagagtcagaattcagaaatcaaatcggaatagtgcggacgcgtgggcgtacgcccgggtactccgcggccgagt

SEQ ID NO: 17137 - DNA, 374 bp, Glycine max
  Clone ID: PAT_MRT3847_115480C.1
aattattatacacgctatgatgtattcattgaggctgaggcagatgaagctgctggaaaggctgaaaatgcctctattgactctcatatagagttttacaagaatgagggattgacaccatacacagaggctaagcttcctgttataagtgatgttactgaaggatgtgctataggacgagagcatgttcctattaacaacctttttacttgcctttggatcaatgaagttgaccgagttacttcacgggaccagattaggttctcaaccggcagggacaaaattttggacagggtagattctcattttaacatgtacttggactgggagagacgcagctatagtgttcacaaataccacaaggatctattgct

SEQ ID NO: 17138 - DNA, 2407 bp, Glycine max
  Clone ID: PAT_MRT3847_115481C.1
ccggaattcccgggtcgacccacgcgtccgctggtgcttatcaaacttgggattttctggctgctgtggcactaattcttcaaagagaaaaatctcaaaggatcagcattataacactggtgaagataagaaagtaattggcagagaaatggagagcacactgaaggccttgagagatggagagtcggtgttggacctcagcccaagatccaccgtcagtggcggcgttgaggacatctacggcgaggatcgcgccaccgaggatcaacttgttaccccatggattttctcggttgccagtgggtactctttgctacgagatccacagtacaacaaagggctatctttcactgagaaagagagggatgcacactatttgcgtgggctcctgcctcccacagtcagcactcagcaacttcaggagaagaaactgatgaacagcatcaggcaatatcaggttcccttgcaaaagtacgtggccatgatggaccttcaggagaggaatgaaaggctattttacaaacttctcattgataatgttgaggaattgctccctgttgtatatactcctaccgttggtgaggcttgccagaaatatgggagcatattcaggcgtcctcagggtctttacattagtttgaaagagaaggggaagattcttgaagtattgaaaaactggcctgagaaaagtattcaagttattgttgtaacagatggtgaacgaattttgggacttggggatcttggatgtcaggggatgggaattcctgttggtaaattggccttgtacacagcactaggaggagttagaccatcagcatgtttgcctattacgattgatgtggggacaaacaatgagaaattactaaatgatgagttttacattgggcttagacaaaagagggcaactgggcaggaatattctgaacttttgcacgagttcatgactgctgtcaagcaaaactacggagaaaaagttcttgttcagtttgaagattttgcaaaccacaatgcttttgagttgcttgcaaaatatggcacaactcatcttgttttcaacgatgatattcaggggactgcatctgttgttcttgctggggttgtggcagccttgaagctcattggaggtactctggctgaccacacattcttgtttcttggtgctggagaggcaggaactggaatagcagaactaatagctcttgagatgtcaaagcagacaaagacacctatagaggagactcgcaagaagatatggcttgtagactcaaagggtttgattgttggttcaagaaaggcttcacttcaacacttcaagcagccttgggctcatgagcatgagcctgtaggcagtctcttagaagctcttgagatgtcaaactatgcttgtttatgacttgctgtaggttgtgttttcttgtgtctctatccttaattaggttacatcttcaggtaatcaagcctacagttttgattgggtcatcaggagtgggaaaaacatttacaaaggaagtaattgaggctgtgacttctataaatgaaaaacctcttgtcctggctctctccaatccaacttcacagtctgagtgtacagctgaagaggcttatcaatggagtgagggtcgtgcaatttttgctagtggaagtccatttgatcctgtagaatacaagggcaaagtgtactattctggccaggccaacaatgcttacattttcccgggctttggtctggggttggtaatctcaggagcaatcagagtgcatgatgatatgcttctagcagcttcggaagccttggctaaactagtgtccaacgagaactacgaaaagggcttgatttatccaccattctctaacatcagagaaatttcagctaacatagcagcaagtgtagctggcaaggcatatgagctaggcttggctactcgtctccctcgtcctcagaatcttgtcaagtatgctgagagctgcatgtattctcctgtctacagaaactataggtgaattatggggcaagtcacttgactttggctgtaataaacacatgtcttggtggcatgtgtgagttgttttatgtaacttatgcataagtgagtggttttatgctatttattatgaaatcaccaaaactgcaggtgaagtatgctttttgttatggggcaaatcactgttagctttggctgtaataaaacatataatgctttgtattatgaaatcttagtttcatctcatgtcatgccgatgactggctcaataaaccttgtcataggaagtgagacaggcttcattagcgtgtttgggtgaagcatgcacttattatacgtgggtacgaaaagttagacatgaaacttgtgacaccctctacccctcacatatatattaatataagaataaaaattcaaatatt

SEQ ID NO: 17139 - DNA, 538 bp, Glycine max
  Clone ID: PAT_MRT3847_115482C.1
aaaaaaaaaaaagggacccatgggcccggggggcaacccggggcaaaaataaaaacccaaaaggggaaaaggggggggggggcaaagccaaaacccccgcaaaaactatttttggaacaaaaggggaaaaaaaagggttaaaaaaaaacaaactacccccaagcttacccgggtaaaacacccaaccctctccttccaaaggcccaaaagcggatgggccccggggctgttgcaaaacagccccaggcaaaccctgggggccaatttttttgattctaggggggattaacacccccgggggtttcaggtaaaaatccccccgggaaaaacatttttctgcaagcgacaattggggagcaaattcaaacaaaaaaacgggttaagaggcccggatcgttttatcaaggcaaaacggaaggggcccctcccccccggggggagcctttttggtgggggcccagggcccaacccccaaaaaaaaacccccaatttttcggacatttcccaaaaaacctcttgaaaatttgcgttgaaaacc

SEQ ID NO: 17140 - DNA, 520 bp, Glycine max
  unsure (1)..(520): unsure at all n locations
  Clone ID: PAT_MRT3847_115483C.1
aaaaaattggttttgataaacctggggaaaaagggggtttgtccccctgagctaagggctaaacgaacaacgaacccaatttggtctgtctttaccttaacacttgggcctttgccaacaagaggggcgttccctactttttaatctcacaaccttccccccgacgggaacatttttttgggataaccaaaatttgttccgattcaaaggagcctttaaaatgggggggccccccaatttgctccaggtgggcttttaactttccgttttccaccttcccaacccaccccaacccttttgaacaacaattttcaccaaattccacctttaaactttttttggccccaaagcccaaatttgggggaaagaattttttgctccacctgttgcctgcctggaacaaactccctcctaattttttgggctctaccctcctgtttncgagccgggtttgtgttgtccccgttggtgccgattccttcttacagggctcccattgggcaacaacgctggccccccc

SEQ ID NO: 17141 - DNA, 311 bp, Glycine max
  Clone ID: PAT_MRT3847_115484C.1
gctcgcaattcggctcgagtacccagcttttgtcttcagcacgcaacgaccaacattacgtaggggtggctttaacaaaccgggggtctctaaacacaactggaggaaaagctcccatgaagcagctggggggccaacgctgcacgtaagtctgcaccaacacccaggtggattgaacaagcctcatccgtatcgccctgccactgtggctcttactgagattcggaaacccccgaagagcactgagctcctaatcaggaagcttgctttccaaagggtggttcctgaaatagcccacgatttcaagactg

SEQ ID NO: 17142 - DNA, 348 bp, Glycine max
  Clone ID: PAT_MRT3847_115485C.1
ctacacatcatggccttttctgatttttatcttccgctgcaatactgttttgagaaaaatggatggaaattcgcggggaagtggggaatcctgcaatccttcatcactttggctatggctagaaaggcaacaacaaaactgtgcatatgaaatcatggggatgcaagcaaattttcacctatgattccactttaaagcagttaaatactaattggcggagccgtgctatataaacaatttggacaatcacttgagttttgtttttattcaaccattctcattagggcctttggcttcctagtgggacctcaggtatcccgcaagctttagtcctatgagtcgactatg

SEQ ID NO: 17143 - DNA, 516 bp, Glycine max
  Clone ID: PAT_MRT3847_115486C.1
gggaaattataaggaacacaatagtatgtgtagaatctcaatcattagaaaatatttgacccaaaaaacaaaatatcaaataacaaaactgctccatgaggtgaaacttaccacttttgtggcttccacagattcagtaagtaaaggggcaactccactgcactcaaaggaataatccacacccatcccaccactcatttccttaaccaattctgaaacagatttagctgaatcaccagcctttataaagtcagtcattccaaaagcctctcctttttctctcttcatctcatttttgtcaattccaattatcttagttgctcccagcattttggcgccacttatagcctgcaacacgtacaagtcacaaggtgaatctcatttacaatcaaaattcaagcttcaaactttagaaggaaaaaataagtgacagtccaacacaaacatacaagattcattttatacatacccctaatccaacagctccaagaccaaaaacagctacactggatccac

SEQ ID NO: 17144 - DNA, 312 bp, Glycine max
  unsure (1)..(312): unsure at all n locations
  Clone ID: PAT_MRT3847_115487C.1
gaaccgggaangacaaggggggtaaagggcgctcaaacaaggaccaaagagacccagataaagaagagngactggaatatataggaaacgtgagtgtggattaaacggtgtctttgcgcgcaagggatggtgggaagaaagcgttttacaagattagagtgatttattttgatttattatttagtttaaccaatatatattgtgaatgatggcgggggtatcagttacatgatgattatgattgcagtgtattggtgatagttagatgacaggtatacccgttgaaagctaatgaaaacaatgtaggaaatg

SEQ ID NO: 17145 - DNA, 654 bp, Glycine max
  Clone ID: PAT_MRT3847_115488C.1
gggataagagaaagagagagtttagcttaacgtaaacgacgtcaacagaatccacaatccatatgtgaggagagagtaataaaaagaaaagaggttaaaacaaaacaaattcaatctaggggctcgagcattcttccctccaaaccaaacacccgcattctttcctcccaagaaagcgggttcagcctttctccattcgtcaaccgcatttcttcaacttcaagttttgtgtctcattggatgattgatccaagggagaaaggtgcttggcatgggagggaggggaagagagttcttcgtggtgtttatgaattgaaaaaaaaattagaggatatcaccgatcttttctcaccgggttcttcatttgttaaaatcatcgggcaatttcgttttattttcaaaattgtttcggtttgaatgcatgcatcttaatttatggatttggaatcttctggcgattcggtgaaatgttgcaagcactgtgaatgcgggtgtagtgattgctccatggcagctcaatcttcagggaattggctccggtctgtgaaaaggaagcacaggcagttggaacagggcgggcaattctctgcgccaggcccgattgcgatcccgttgcgcatgtcgagattggaatgaatgtgatgcattacctga

SEQ ID NO: 17146 - DNA, 206 bp, Glycine max
  Clone ID: PAT_MRT3847_115489C.1
gatatttattcacgccactgtcatgttttgttaatgcatttgccatgcacctagggaggtgtatgctatggaaactggctaccacatctaaaaactccttcaagaacatatggactataatgcctgataaaatctacctataactaatgaacacaattcatattgccaccacacctatgctaattaagttgaatcattagctgaaa

SEQ ID NO: 17147 - DNA, 197 bp, Glycine max
  unsure (1)..(197): unsure at all n locations
  Clone ID: PAT_MRT3847_11548C.1
agcagtccgctgaagccgcccgtttttttttttttttttntgctttacgaccgcctacaagcaatacccatccctgaactggtgtatcaattaccctctgaggcaacacagaaatctgactaggaggcctccatatgccttatgagggatcaaaagtctccactttcaagccacgaatctttaaatgagaaacaaac

SEQ ID NO: 17148 - DNA, 338 bp, Glycine max
  Clone ID: PAT_MRT3847_115490C.1
cttggcagaaccggcccaattgaacacttccaaggaaataagcatcggaacgtcccaacctgaagaaagtgcttccgcttcatctcaccctataagacccaaacaaggcaacaccaccatccaagagataaaaaagcacattgcaaaggaaacgcgaccaaaaccaaaccccaattcacccgagccaattgaaaacaaacctttgtctaacgaaaacttaaccaaagttgaaataatgggaaagcctccaaagcctctctctcacacctcttagtcgctccctccaatgccctatgtgtctacaagaggggacaatgggagaacggttaatgggtttc

SEQ ID NO: 17149 - DNA, 219 bp, Glycine max
  Clone ID: PAT_MRT3847_115491C.1
agaaagctataaaatggagtagaaaagtgacattacataataaaataaaaaaggcatgacttgacttctccaacctccacaaaaaaatttgatctaatacagatatagattatgatatttgaggtcattgttccttttacttgggcctcaatttatgtccgtattagatcaaatttttttgtggaggcatgacttgacttctccaacctcgagccgaat

SEQ ID NO: 17150 - DNA, 653 bp, Glycine max
  Clone ID: PAT_MRT3847_115492C.1
gcgacccacgcgtccgcgccatgtgaaatcgcttctagagtttccaaaaaggtttgagaaacgtgcttctcctacagaaaaataaagcattccatcgaaacatgcgggttctcgaggcactcctccttcgaaacgacgtcgtttttctccccaacttcctcacactcacttttcgtctccttttccacctccttcgccggagcaacctctttccgaccacccccggcacccacctttccatttctagcacacgccggggacctcgaccgcctgccggaaccctcgccggaatcccgccgaagtgcggcggggcccacattgcgctttcgattcgccgccgtgccggaatccaaaatttccctcccccgaattggcctcggaccgcccttgattttcttctccggcgacggctcctgcctcctcgctggcgatttgagcctacggtatctcacgccggcgaggttgccgtcggcggcgtagggcctcttcctggagggagatcggtcccacttgtgaattttgctggttgcttcgtcttcttctctcttatccgcaaccgtgacagtggtggttgtagcagtgacggcggtggcggtggttgcggttgtggcggcggagaagctctcgctgatgctgcatgtttctgaaagctg

SEQ ID NO: 17151 - DNA, 719 bp, Glycine max
  Clone ID: PAT_MRT3847_115493C.1
cctattctttattttgtgttttgtccatggaagttctatatatgcttcatttgaacatttgggtttcaaacaaaagaacaaaataatacaacaaaagcaggatttttgggtctttcaattcaaaaaaacacattaatagtatgaaatgtcttttctctcctgcttagcggggcaccatttagtacaaaaatggtgacttagttgggttgggccctcatatttacaccgaaggtgggtgaccttataataaaacatttaaattaaagcctaaatagcaagatcggttgcaagccaggccctgaggtcttttcgaaagatctttccagagggtgcctttggaattgagcccacaaagaaaactctactaattcttttgtaaaatacaacctgctttgagatgtattgctttatttcatcctcagaaatcattgaaccatttgatcgtacaacaaatgcaactggaacctctcctgcaacttcatccttcattgatacaacggcagcatcagagatgttaggatgagcaactagcatggcttcgagctcagctggagccacttgaaatcctttatatttaatcaactcctttaaccggtcaacgatgaagagctcatcattatcatctatgtatccaatatcacctgtgtgcaaccatcctcctttgtctatagttctttctgtggcctcttgatcatttaggtaacctctcatgatctggt

SEQ ID NO: 17152 - DNA, 412 bp, Glycine max
  unsure (1)..(412): unsure at all n locations
  Clone ID: PAT_MRT3847_115494C.1
tttttagtatataaattaaactttcattaagagggggggggggactacatactgggtaagtaaacgctaggaaacactgctaacgtaaaacactgaaaaatcaaacctatgcttgctactctactaattgaaacgagtttattcttccaacaagaatcaggaactattctagtgcttctttccaagacaaagcctgatatggtgttggcaccggagtgagtgaaccacttaaggggagggacatgattacatgggnggatccccttagcttccctcctatggaacacagctgggactggagcattgcagcactagcctcaatagagctttctccatttatgtgccttcatggtcatgatcaatcttatgaaccacatgattcaccccntgttcttgaaacataacgtcaact

SEQ ID NO: 17153 - DNA, 269 bp, Glycine max
  Clone ID: PAT_MRT3847_115495C.1
cggacgcgtgggtgcacctccctcaatcctttgcaaccatcacacctctgtcaaacccgtgccaccactacactttcgtccatcctttgcaaccaccaaaggccttcatcggttgattatcttcgttgcgtcggagaggcaaagtacgaagaggaaggaacgaaagcacaaagtggaaggcacagaggctcgcgtttggtttttttctttagaaacaaaattgatctggtatcatgaattttgatttgttgtatgatctggcttggggt

SEQ ID NO: 17154 - DNA, 237 bp, Glycine max
  Clone ID: PAT_MRT3847_115496C.1
atttgattattacaaggactggtttataggaatggagccatggggacgtgtgcttatgcatccttatgaactggcgaggttactatgccactgtacctttgctaaggcctgccctgcttgatacagcatatctggcgtgtgtgggggcactccaattattgatgaagggaggcttctgtgaggggagctgatcggtcgacatgagtgggactcttcagctaggacgctcatgaggcg

SEQ ID NO: 17155 - DNA, 1302 bp, Glycine max
  Clone ID: PAT_MRT3847_115497C.1
gaattcggctcgagcactaatcataagcctctttatcttctccatcatatatgggtagcagtggggtctggatgacaacaccaatcttcaaaattcgcttcttcttattcttatgctttattgggataagttcatctcaattgtcctctgacttttactccacaacttgtcctaatgcgctttcaaccattaagagtgcagtggattctgctgtgagcaatgaggctcgcatgggggcttccctcctacgtcttcatttccatgattgttttgttcaaggatgtgatgcatcagtgctattgaatgatacatcaagtttcacaggtgaacagacggcagctggcaacgttaattccataaggggttttggtgtaatagacaacatcaagtctcaagttgagagcttatgtcctggtgttgtttcttgtgctgatattctcactgtagctgcaagggactctgttgttgctcttggtggacctagttggacagtgcaattgggcagaagagactcaaccactgcaagtttaagttctgcaaactcagacttgccccgttttgatttaagtctgcaacaactcagcgataatttccaaaacaaaggtctcaccaccgcagaaatggttgctctctcaggagggcacacaattgggcaagctaaatgttcaactttcagaacaaggatttacaacgagaccaacatagattcctcttttgcaacatcattgcaagcaaattgtccaagcgtgggtggtgacagcaatttggcccctcttgacagcagccaaaacacctttgacaatgcttacttcaaggatttgcagagccaaaagggtctcttgcacacagatcaagtgcttttcaatggaggatccacagactctcaagtaaatggttatgccagcgacccttcaagcttcaacactgactttgccaatgcaatggttaaaatgggaaacattagcccacttactggctctagtggcgaaatcaggaccaattgttggaagaccaattaagatcttggtccttttcgtactaagtactatagtacaatagcagttaagggacaaactgttacttttaggatggcccaagtagatctaaacatgtctttaaactaaagcggttaaaagactatattgaatgggattagatttttatattataaattatagtttttgttttatttctcttaaatgaatgagaagttgaccgatggataactattatccattgattttaagtgtatttgtatttaaaagatcaagcaatcaatgaaaaatctcgcgagtattaatt

SEQ ID NO: 17156 - DNA, 1214 bp, Glycine max
  Clone ID: PAT_MRT3847_115498C.1
caatattctggcatattgctaatgaaacatgaggctccactaccttacccttttcctccttttggtccctttggagttgagcaccatttatggtctctctacacaaggaaatgtgcctaagaaatcatccatcaagcccttattaccaccccctgaggccttgctgtccattggtcactatcacacaacatgtcctgatgctgaaggcatcatctcacaaaaggttgctgcttgggttaagaaggaccctacattggcccctgccatcatacgccttcatttccatgactgtgctgttatgggatgcgatgcatcaatattgctcaaccatccagagagtgagaggactgcattagagagcagaaccctgagaggattccaattgattgatgatatcaagagtgagttagaaaaaaagtgtccaaggacagtctcttgtgctgacattctcactgcagcagctagagatgccactcttttggctggaggaccattctgggaagtcccatttggccggaaaggtgggaagatttccttagccagagaggccaatttggtccctcatggccatgaaaacataacagcccttattacattctttcaagaaagaggtttagacattcttgacttggtcactctctcaggctcacacacaattgggaggagcacttgttcttctatcatggataggatttacaacttcaatgggactaaaaagccagatccctcactaaatgtctttttcttgaagttgttgaggaaaaggtgcaaaagggtgatggatttggtgcaccttgatgtcataacccctaggacttttgacacaacctattacactaaccttatgaggaaagtggggttgttgtcaacagatcagtcacttttttcagatgcaaggactgctccttttgttgaagcatttgcaacacaaccttttcttttcactagccagttttcagtgtcaatggtgaagcttgggaatgttcaagttctgactaggcctaatgaaggtgaaataagggttaattgcaattatgtcaatactgtctaattggtgtaatggtgtcctactctgctatgtggttaatttctttgttccatttttatgtttgggattttaatgtcaataaatcgtatagccagagggttcgatcatgtctctgttgctttgttgtgagaaaaaaaaaaaaaaaaaaaaataaaaaaaaagaacg

SEQ ID NO: 17157 - DNA, 995 bp, Glycine max
  Clone ID: PAT_MRT3847_115499C.1
agcttgaacaactgaaaaccaagaccatatgcattcttcatatgaaaatcacacaagatacgaacaaagctatttatgttaccaagacttaagagggggatatcgtactattagggtactagtatgcagagacgaccacatacagagcaaagctatttatgttaccaagacttacgacacaacaattggaatatcgtactatgcagagacgaccacagacagagatatctctcaaatttaaatttaagctttgctgtcaatagtcattggcaccggctcctgctttgctgttgctgttcttgcttgttctagtttattcatttttgcaaatatgctgccgtaaaactgtgcgtccttcttgttgtgttctctcaccttctgcttcaaaattttgtactccatcttcacatccctgttgtttggctcaatctcaagggctttcttaatatccatctcagctagatctaagtccacaagatgaagatatgcctgtgccctccgatagagtgcttttacatttctactatcaagctctaaaacccccaaatttgaaatccctaacccccaaaccagaaatctccaatcatggcgacgccggaggctttgccgcactcgtccggctcgaccccggcacgtgcggtgctattctgatgccaaacgaggtgagggtgaagggtagcacgagggttttgatgtgggcgcttaggtgtttgggttgaggtgggctatggtggtggagttttgatggtgacgagggcgcgcggtgtttggtcggaggtggtgggccttgggtttgcggaaagttcggggccgcaggttgttggctggattcggtgctaggtgtggttgtgctgatcttgacgacgtagtggtggtacgccgcagatgttgtcggcgctggctaggtggtgcaccggagttgttggtggataaggacgcggagatttgggtcagattgacgcggtggtgttcggacgcgtgggcggacgcgtggg

SEQ ID NO: 17158 - DNA, 1535 bp, Glycine max
  Clone ID: PAT_MRT3847_11549C.1
gctgaaagaggtgaagctgcgtgatggatactatgtaatggaccctgaaaaagcagtggaaatggtagatgagaacaccatttgtgttgctgctatccttggttccactctgaatggagagcttgaagatgtcaaactcttaaatgatctcctggtggaaaagaataaggaaactggatgggacactccaattcatgtggatgctgccagttggggattcattgcaccttttcttgatccagagcatgaatgggactttcggatgacaatagtgaagatcatgattgtaagaggaaccaagtctggctgaaattcaactcgaaattgctcgtttatttggggtttatcagacgaccatcgtgtgaacatcaagtcaaaatttcggctccagtgttagtaatcaaaatggtatgctcaaaccgtgcagccagacaaccatcagtctctaagggttgtccagcaagctagtcatgcaatggaatcaatgcttccctttcaactattcggttcaattgtatatgtttaacgatcaaccatacggcctgccttctcattgctttctgtgaataataaattcggtttcaggccaagttattgctcagtactaccaactaattcgactgggttatgagggatataaaatggtgatggaaaactgcaatgacaacatggcagtgcttaaggaaggactggagaaaacaggaaggtttgagattatatccaaagacattggtgttccattggtggccttcacattgaaggaccacacccacttcaatgaattccaaatctctgacatgctgaggcgctatggttggatagtgccagcatacacaatgcccccagatgcacaacatgtgacagtgcttcgtgtagttattagggaggatttttctcgcacccacgcagagcgactagtgattgatgtcaccaaagttgtgcacgagctagatctccttcctgctatggtgatcagcaccaacaccttaatggttacagtaaaagctggttaagaaaatgacaaaaatgtgctgttcaccaagaagaataagctcgacaaacacagggacatccctaaagcttggaagaagtttgtgatggacaggtagaagatgaatggcattttctagaaccttatttttggctcattttttgagccttttatgcagatcagagaccagagcaattgctattactatttcacgataaaatggtgtcctttgtaattcccttccccaatatcgaagtgcacgttctcttctgatattcatgatgtccttcaaccccgaaatcttctttgcgaaaaccacgaattgctttctcgaaagcaattggttcccttgaagagtacaagagcgcgagagtgtgagccgagaaccgatgaaggatgacgaagacagtgagcattcgccatgatggagtgttgggattttcagaaatgcgttgttagcgagcgaagcagtgagcgccattggaagaagaagaagagtatgtccttgtgcgtggctggaactatggttaggccttctgtaaca

SEQ ID NO: 17159 - DNA, 366 bp, Glycine max
  unsure (1)..(366): unsure at all n locations
  Clone ID: PAT_MRT3847_1154C.1
taattgcnnaattcctggtgagctcgtggcataagcctttttgaatttaagtgtcgctctcctctctgtgttactctcttccagatatttgtcagataccagcaacgatcattgcagtgggaccttcgtgaaaagtaaaccttgtaagaaattcgatgttcaggttctgatacctgtatgctccatcgtgtgctttgttggcaataaaaaatcttagacaagtgcccatagctgcctccaagggattaaatacattactttgagataatatgtgcattccctttcaactttagccctgatgncccctaaagaagggcattgtacaagagggagtattaccagaagaaaatttgcgatctcaatcag

SEQ ID NO: 17160 - DNA, 2835 bp, Glycine max
  Clone ID: PAT_MRT3847_115500C.1
ccatcattgacacctgttaaagctcttgctctcctttttctttccacttcttcgctggaaacccctttctctctcttaaatcttctcattcttcttcttcttctccctcccgccacctcacttaccctcttcctaaaccctagcctcgccggaccaccaacaccaccgcgtcaatctgacccaaatctccgcgtccttatccaccaacaactccggtgcaccacctagccagcgccgacaacatctgcggcgtaccaccactacgtcgtcaagatcagcacaaccacacctagcaccgaatccagccaacaacctgcggccccgaactttccgcaaacccaaggcccaccacctccgaccaaacaccgcgcgccctcgtcaccatcaaaactccaccaccatagcccacctcaacccaaacacctaagcgcccacatcaaaaccctcgtgctacccttcaccctcacctcgtttggcatcagaatagcaccgcacgtgccggggtcgagccggacgagtgcggcaaagcctccggcgtcgccatgattggagaactctagccagtaaaaccatattctcctgtgatcgtgtgatttctttctgagttcttagcacttacttttttcatacacatttgttgtcttgttgggaagccatggatgaggatttcgagttcccaagtgctggcaacatggaaatgccagaggaggaagagattgagagtccgattctgaaggttggggaggagaaggagattgggaaaatggggctgaagaagaagttgctaaaggaaggtgaaggttgggacatccctgactgtggagaccaagttgaagtgcattatactggaaccttgcttgatggaaccaaatttgattctagccgtgataggggcacccctttcaagttcaggctaggccaagggcaagtgatcaagggatgggatgaaggtatcaaaaccatgaagaaaggtgagaatgcccttttcacaatacccccagaattggcttatggagagtcaggttctcctcccactattccccccaatgcaactctgcagtttgatgtggagttgctgtcatggacaagtgtgaaggacatttgcaaggatggaggaattttgaagaatataattactgaaggggagaaatgggataatcctaaggatctggatgaagtgtttgttaagtatgaagctaggcttgaagatgggatagtcatttcaaaatctgatggggtggaattcactgtggaagaggggtatttctgtcctgctttggccaaggctgtgaaaaccatgaagaagggagagaaagttctcttgaatgtgaagccacaatatgcatttggtgagagtggaaggccagcctcaggagatgaaggtgccgtacctccaaatgcttctcttcaagtggatcttgagttggtctcgtggaagactgtgtctgacattaccaacgatagaaaggttctcaagaagactttgaaggaaggggagggatatgaacgaccaaatgatggagctgtagttcaagtgaaactgattggcaagctgcaagatggaactgtcttcattaagaagggctacgatgatcaacagccattcgagttcaaaattgatgaagagcaagttactgatggacttgaccaagctgtgaagagcatgaagaaaggggaaattgcattgctgatcatacaacctgaatatgcttttggtccatctggatcctctcaggaattggctaatgttcctcctaattctactgtgtactatgaagttgagctgctttcttttataaaggaaaaggaatcgtgggatctgaatacgcaagagaagattgaggcagctgggaagaaaaaggaagaagggaatgctttatttaaggttggcaaatatgaaagagcttcaaagagatatgaaaaggccataaagtttgttgagtatgattcctccttcagtgatgaggagaaacagaagactaaggcattgaaaatcacatgcaatctcaacaatgcagcctgtaagttgaagctaaaggactacaaacaggcagagaagatgtgcacaaaggttttagagcttgatagtagaaaggtaaaagacctcgatgggaagatccaggcatatattcatagcgtggaattaagtcaagatgagatggatactaactaagcccaaaacaaagagccaccaaatacgaataaacaccgggagtccaaaatagcaaaaaaaaagcagaaagaacaccaaaagaaacacaaacacctatacggccgcatataaacacacgtgcttcccttaaaacaaacatcatcaggaaccagaatagcaccgcacgtgccagtgactgtcggcagcaatgcttaaaaacaatattggtagacatatttgtagattgctgtttctgtctttgatcatgttgaaattgttatttagaaagtcttttagatagaaacaaatagcagctttatgaagttggctctgaatattttgaccctgaaagtaagatatcccaataataaggactcacagttttaaggcagcatatttgaaaaaatgtattaactagaacaagcaagaacagcaacagcaaagcaggagccgctggatatgagtagtgtcagcgaagacaacggttccatggccaaaacgaaggctcgtgcagccatgggcccatcacgagaaacctggaccggaagagggcggaacggagtggagtgggtgggaaaggaaaaagaggggtaaatctctgtctgtggtcgtctctgcatagtacgatattccaattgttgtgtcgtaagtcttggtaacataaatagctttgctctgtatgt

SEQ ID NO: 17161 - DNA, 2878 bp, Glycine max
  Clone ID: PAT_MRT3847_115501C.1
aataattaacatagtatgaactacatatacgaagcatattattttcatacaacttatacataacctttattctatcaaacttagcaaaaacacatggaaatcattctagacatacaacttgatatattacatatttccaattttgaaaaccttgctcagattatccttgataaagtagtagcaattcatgctcaccaattccatgtagtaaaaccatgcctgcctccaataaggattgatgtataaagctgctgcagttaccaacaatgctgatgtgcatgacacggcaaagctcacacagaaaacatacatatccaacaaactatcattgtctccatcagtgtttgagtcatttggtataatagtaggtggaggattgcaactctttggcagtggaagtccacaaaggaacggattaccctcatagctgttttcatcaaatgtggaaaattgtcctttaaaatctggtgttggacctgataagttattgtgtgccacactaaatacttcaagtgatgttaacatgctcaattgaggaggaatttgactgtttaacatgttaaaagaaagatccaaactctctatttgtgccaacaaggagaacgtaactggaatttgcccagttaaatcattgtgggataagttcaatgctcgaatttttgtcaagtatccaagctcaaatgggatatttcccttcagtttattgtgagataagtcaattccagacatataaacaaggactctcccgatgtaagtgtcagttctttcctttgtagtgaaattcactttctcttgcacatttgatggcgacagagcagcggcatggatatggagatctggatcaaagatagaaaatcttgctaacaagtccttcgggttcttattctcaaaaggcattttacctaagcatttggggataacaccagagaaattgttatgagaaaggtctagcatgtttaaatctatcaactggcatagttgctttggtatatcccccataaagtgattaccttttaaaaggagaatatttaaccttttataactaaggttatgtatcagatctttaaggttgttagatatttcattgtagctaaggtctaacatcactaaagaagagtttccatggaacattcttttagacaatccactcaaacgattgttgttcaaatggataaatgccacggaagaatttgtaaatgatggaacaagaccaataaaattattttgggagagatctaaagaagttagatattcaagttctccaagttctaatggaatggatccttcaaaatggttattagacatataaagtccgttcaatcttgacaagttttttataaggcttggaatctttcccaccaaatgattattgcttacatccaataaaacgactgatgagttaaaaatgttgcttgggagtctaccagtaaatctattatggctcaatatcaaggtctccaaaccattagggatattcaaaataggtccctcaagcatattggttgaaagtttcaagaattggagtgggtgtccatctgctaatatgttctcaggtatttttccagacaattggttctcggaaagatccaataaatacaataagctcatttggcctaactcactaggaattgatccttggatgttgttcccagacaagtttagatattgcaaatttggataaattgaactgatattgttgctaggaatttggccatttacggtattgtccgacacgtcaattgtttgtatgttaggaagggggctcattggtagctggaaagtaccagtgaaagaacaattcctaaatagagcatcggtcatttttgtgttgttttccaacaaccaatgaggaaagtctccttccaacttccaaccactcaaatctatataggttaaattgttttggtaaagaagaaaatttgggagaggaagagatttagtctcagttgtcgaagacacaataagcttttgtaacttaaattttggaatccatgtttgcaaactatgttgtgagtccaatacgactctgtttccttcaccatagatgaacttgatctttgaaagattggcaaatggagtgaaagacacaggaacttcaaattggtttcccgtgaaatcaaaatattcaagtgatgtaaggcttgcaaggttagaatcaaaatttccaatgaagtgatttccagaaatttccaaattccgtagagatgtcatgttaacaaaagatgagggaagtggtccctcaaattcgtttctggatagatataactcctccaacttctttagcttaaaccaatccgtgggaggaagggtgccatttatatcacattgttgaagagacaaaacttttaaagatgtcaattccccgatattttttaaaaactcattttccaggttattgtagtccaatatcaaatgttctaggttacttaaatcatgaaaatcttgatgtcactgaatacttttatccaacttgttataagataagtcgaggatcttcaatgaagtaaatcttgatatattaaaaattgatcttgaagtcaattgacaaattgataaatctaaaaacttgagggatgaaagtccactaagagcagaagtaatatcactattattgaaattgttactggacaagtcaaggatctcaagattccttaatgatgaacataaaccttgaatatgaagatctgagtccaaatcaatataagacagatatagttccttcaaagatgtgaatcccccgagggatggcaggatgtcatttgtcaaagggttaaaacttatgtcaaggacctccagattacgcaactttgatgacagagtttcaaaaacttacatagtacatgtgttgtacgtggaagaagccaacctcgagccgaat

SEQ ID NO: 17162 - DNA, 241 bp, Glycine max
  Clone ID: PAT_MRT3847_115502C.1
tatgatcattgccctcattgccatttccatgcttcaaacaatggttatggcatcttcatgtgacgatgtaggcgcaccactacacatgacaacgaaaaaatatggagcctggctattctcaaaagcattccaatgcccatcacaatgctcaaggaggtgtggcaagacccagtaccacaagccctgtatgtctttctgacagaagtgttgtatgaagtgcctatgtgtgccaccggggtat

SEQ ID NO: 17163 - DNA, 488 bp, Glycine max
  Clone ID: PAT_MRT3847_115503C.1
cctcctgccgagtaaattaattttcccaaaccatcaaattaatcatcccttcctaactctcgttgtattacgaagaaaattaatctttcattaataaagtgattaagtttcccattctacatttcccgcctattttgcattacatttctgcatgcatatattcacgtacattctgtatctctccctctgatgtatgcgtataagatttttcactaacattaattattcctctgtatccccccctctctctaaaagaaaacaaaaaagaatttgtagagcaacaccagtaagttatgaagtacggacactccagtcccttaccgtgtccagtgttcgagtgttcgatatgcgtctgtgtccgtgtcaatgtccgactccgacacaacacccgtattacgttctatattttgaacattacaggtgtccacatgttcgtatctgtgtcgatatccgtattggtatcagtgcttcatagccagtaagggaga

SEQ ID NO: 17164 - DNA, 216 bp, Glycine max
  Clone ID: PAT_MRT3847_115504C.1
ccgtctcgaattcccgggtcgacccacgcgtccgcttttaaacaaataaaatctttgatcactcattttttaaaaaaaaaacaagctaaacagcaggggtacaaagtctacagggtgtggttagatcaatcataatttgtcagcttaccttaagacacatgagtgtccagattgttactcaaggggttttgagctcttgtggttgttcagtcatgt

SEQ ID NO: 17165 - DNA, 519 bp, Glycine max
  Clone ID: PAT_MRT3847_115505C.1
ggaattcagcacgaggtggtaatgtacagcaccatcattgatggcttatgcaaagataaacttgtaaacgaggcatatgatttatattctgaaatggatgccagaggaatttttcctaatgttatcacttacagtactctaatctatggcttttgccttgcgggtcagttaatggaagcatttggtttattaaatgaaatgatattgaagaacatcaacccgaatgtctatacctatactatattgatggatgcattatgtaaagaaggaaaggtgaaagaagccaaaaatttattacctgtgatgacgaaagaaggagcagaacctaatgttgcttcttataatactttaatggatgggtattgtttagttggtgaagtgcagaatgcaaaacagatattccacgctatggtgcaaatgggagtaaatcctaatgtgtacagctacaatataatgattaatggattatgtaagtgtataatggtggatgaggccatgaatctgctaatagaaatgctg

SEQ ID NO: 17166 - DNA, 374 bp, Glycine max
  Clone ID: PAT_MRT3847_115506C.1
gcaagcggagggggaagcgcacaagaaatcaggaaataatccaatatgaaaaatgcggacaatagggctaaaaggtccaactaacaaaggcaaactaagctgaaataccaaaaacttacaaggaaaaacaaaccattttggagcaatagtacatttgctttataaaaggaaaactgtctaaaattgaagggacactcttatagggcaaacatgggaaaatagtaacatggactgcaaacaaaaagaacaggggcctaaaaaaggctggagtaagcaagagactattcatcagaaaactgtactgaagctaagcgcaactatatccatgaaaactgaacaaaggagaggccttgaacgatagacgcttccccagt

SEQ ID NO: 17167 - DNA, 255 bp, Glycine max
  Clone ID: PAT_MRT3847_115507C.1
tcctccgacgcgtacgcccacgcgttcgtacaaaaggatttcgcatgagagcagagctgagagacaaggggtaaatagtactccaatgtcgatcgctatacattcacaaacgagctgaggcagctgctaaagctgatgacaaagaactgggacaagtgacagagcacctagagaccgacaattccgtgctactgctgatcatcaactatcatcgttctcaggaagatcaacatgaccgtcgagttacaacgtcca

SEQ ID NO: 17168 - DNA, 2199 bp, Glycine max
  Clone ID: PAT_MRT3847_115508C.1
gaagcagaaggtggcagcaacaaagcagtacattgaaaatcattacaaggagcaaatgaagaaccttcaggagaggaaggagcgtcgaaccatcttggaaaagaagttggctgatgctgatgtctctgaggaggatcaaaacaacctgcttaaatttttagagaaaaaggaaactgaatatatgcgccttcagaggcataagatgggtgttgatgattttgagttattgacaatgattgggaaaggtgcatttggggaggtcagagtctgtagggagaaaactagtggtcatgtatatgcaatgaaaaagctgaaaaaatcagagatgcttcgcagaggccaggttgagcatgttaaagccgaaaggaatctccttgcagaggttgacagcaattgcatcgtcaagctttatttatctttttaaggatgatgaacatttgtatcttattatggagtatctaccgggtggggatatgatgactctacttatgagaaaggatatcttgactgaagatgaagccagattttatgtaggagaaacagttttagctattgaatctatacataagcacaattatatacatagggatatcaagccagacaacttattacttgatagatatggacacttgaaattgtcagattttggactttgtaaaccattagattgtagtacacttgaagaaaatgatttttctgtgggtcagaatgtgaatggatctacacaaagctcaactcctaaacgctcacaacaggaacaactgcaacactggcaaataaacaggagaacacttgcttattccacagttggtacaccagattatattgctccagaagttcttttgaagaaaggttatgggatggaatgtgattggtggtcacttggagctattatgtacgaaatgctggtgggatatcctcctttttattctgatgatccaatgttaacatgcaggaagatagtaaattggaaaacttacttgaaatttcctgaagaagctaggctatccccagaagctaaagatcttattagtaaacttttgtgtaatgtcaatcaaaggctggggtcaaaaggtgcagatgaaataaaggctcatccattcttcaaaggtgttgaatggaataagctgtatcaaatggaagctgcatttattcctgaggtcaatgatgagttagatactcagaattttgaaaagtttgatgagtctgacagccaaactcaatcatcttcaagatctggtccatggaggaagatgctttcatctaagaaggacttgaattttgttggatacacttacaagaactttgaaattgtaaatgattatcaagttcccgggatagctgaactgaagaagaaacagtccaaaccaaagaggccaaccatcaagtcacttttcgaaaacaccagaggcgtccgatacgtctgcaaatgatcaacctgctcaaggaagctttttgaagctcttgccaccccagttagaggtatctcctcatcgcgacaagaatcttcctcccaggtcctaacaggccccaaccacatgatctctgcagcagtctgacagtgtaggaatcatcataactcagcattttgaccatttccgcgtttaaaatatcactcttgatgcgttggatttgttctaagttacacgaaatcactaatatggcttggaccagtctcttgtcagtggccacaactattgatttgtaaatctctcactaagtatccgttgtcacacatgctacactaaaacagacaataccatgtatattcgcgttcttttaatgatagcaaagcatttatccctgtaacattggagtgtaatgattcacaagttatttagcagaacaagatatgtttgattttttttttaaaaatgtcaataatctgtaatttgttgtggttcgtttttttaatattattttttataatggacgagattcctctcttcatgcgttggatttgttttaaagttaccctaacggcttggaccagttttttgtcagtggccccaactattgatttgtaaatctcttgctaagtgtccggggtcccccatgctcccctaaaacagataatatacccgatgtccatgaatactggatcccatgtatattccccttcccttttatattaatgatatcaaagcatttttccctgtaacattggagtgtaatgattgccaagttttttagcaaaaa

SEQ ID NO: 17169 - DNA, 964 bp, Glycine max
  unsure (1)..(964): unsure at all n locations
  Clone ID: PAT_MRT3847_115509C.1
gacctgaggtgaggcgtgctccatcattcaaagcaagtaaaacgatttgtagtggtggagttggagatatcatgtcatttgatttcagttcataaaccatcagttcaaagctcagtctacaaatcattttaagaatccatgatgcaaataatcttctttcagaaattttctatcccgttccagctaataactatgtcatacaccagcaccaaacgtgactacaagaatttgtaggatctcccttgaatagagtttcaacggctaatcaaacccagcaaaagctttaaacgtttttgaagagttcttgggggcagaaggaacatccttgactatcccagttgctgacttctcttatggctaggtcccacttcccgctaagtcgttcttgctggacttccacttatcttgtgtacttgctgctatgttaacattggcagcagccatgtaactcgtgttcttagtcaacattttcctctcagccttccattgcagtgtgatttcttgtatatgtgccaagcttctctcatgatttttggcttgaataaacagacttggccagcatattcttcctgcagaccagccctgtaagcatcaacaaggtattattcagacaagaaaaatgatcttgatggcatgtatgatggtgtccttcgctgcgaccagtcgaacattgttggagcttggaggcatcatctttggcatattaaatgctgaagttgattagaaatgccctccatagtgtatggacctttgcaagcttcagaggtgatttgtattttagaatagttgtagtactttcctttcattctttattgttctggacttgccacgtttacgtctttgagaaaaaattaagattgtgttggtgaagttttgtctaggggtttatgaacttttcgtgtaatatcctcttgttctgatattgatctgcagttggaatatttttcaaaaaannnnannnnna

SEQ ID NO: 17170 - DNA, 194 bp, Glycine max
  Clone ID: PAT_MRT3847_11550C.1
ccacgcgtccggaaaaggggtcgtcttcctccataccgaaaaaagggtggaactggccccaccactacggcactactgctcccaatccgcagcaccatattaccaactgatgttttcgctcctgaatgggaaaataagaaacacatgatgtgcacattgacgtcggcatcatcatcatcaacaacaactacacc

SEQ ID NO: 17171 - DNA, 541 bp, Glycine max
  Clone ID: PAT_MRT3847_115510C.1
gaatgccatgagagcgacacgttgaccatgtggttagatatacctaagggactgtgtaagcccgtctgatagcgctactgtgcgcgaacttcgaaagggataaccaaatacttttgcttgaacctcgacgtgcactttgacggcctcgataagcagactcaacacatagtcgagggcccatatagattatcttttatggctagcagcctgcccaccctgaatactactcattatgatatagagtccaacggctgcaatagcaccgaacgttgtgaggcgcacgcagcgccttcggtagtcctagacaatccggatgaccgtaaggctccaactcccgaacgaactactaaccgaatcaaatctccaatgcgaacagccgtctggacaatggatcaatgtaggagaagcaatgcggcaaaatggatccgtaacctccttaaaaggattgtctctgagggctgaacgacggaggacccagtcccaaacccgtcgattgacggcgtactgatcaacctgcttccgcggagagagcgactcatgc

SEQ ID NO: 17172 - DNA, 163 bp, Glycine max
  Clone ID: PAT_MRT3847_115511C.1
aggatacgtgtacttttccgagaactgaaaaaatttaggatggggcttgggaaggggagtggggggctaggtgagggcgggaggccttaactacaacaaggacttctaggttaattacatttcacccatcaagaagcataatggagacaatcgaacctaagcc

SEQ ID NO: 17173 - DNA, 306 bp, Glycine max
  unsure (1)..(306): unsure at all n locations
  Clone ID: PAT_MRT3847_115512C.1
agtcgcnaggangngtangnaagctcgnnaattnngcncnagnncancatcgaantgagananngagtantnaggtagcnagcataagtgnctaancttagananatatctgctaaacnncgtgtgcattttggaattgtgnnactaaaattcctattnatcnatggctncctnatcttatgctatgcaatacaatncttgcaaancctatgatcngcatttccagagggtccagggaganncattttggtgntcnngnttatcactgagaaggaatnntgggcnganagtnaggtcccatgggcc

SEQ ID NO: 17174 - DNA, 832 bp, Glycine max
  Clone ID: PAT_MRT3847_115513C.1
atggaattcggggctcggggaaaagttcacccccaagcactaaattcctctaccacttgcaagcaagagacgtttaccctatggatgaaatctctggtactgaacggaaagggatgcaccgtgtttgattcaaatggccaaattgcataccgagttgataactacaactgcaggcatagagatgaagttcatctcatggatcaaaatggcgatattttgttcactatgctgaaaaagcaatataagttgtccaggttttgggagggttatagatttccagttccaggaacaaggaatgaccacaaaggaccatgctttcgagtttcaaaaacttataagatctctagagggggttcaacctatgaagttgaacttggattggacaaaaatcaaccgtatactcataaaatagaacgcaacacttgcaactcagcttgcaaaatatctaacgagcttggagtggtagttgcagagctaaggagaaagaagtcaccttgtggagttgatttaggagatgatgttttcacgatggtagtggagccaaatatagatctttctctaattatggggcttgttgtagcctacaatcttataaactgtaaaatttaattagcactttggaagcaacagtttgcacaattaatagtgatttgcatcttgaggaagtcttaattagctagaattagcaaatgggttgctaaacccagtttccagattaagctttggagatgtttgtggtgatcattgcaacctagcaatgatgattttgttttgaagtcaaatttaattcctctttctctaaaaaaaaaaaaaaaaaaaaaaaaaaaaaaaa

SEQ ID NO: 17175 - DNA, 427 bp, Glycine max
  Clone ID: PAT_MRT3847_115514C.1
aaacacaaaaaaaccggtttttttttcaatttggggggcccaatttgggggggaaaaagatccaattttcccaaagggggtgattcccttaataaacaaaataggggggcaaccccggaaggggttttttttggatttttgggaaaaattcccgggggggggggggggggcctcttagggaccccttttttcgggtaaattaccaggggggattggccccgggggaaacccccgggggggaacaatgcgggggggggtaattaacccgggcctgaacagttttggggttggccccatcacattaaagggggcctttgatggctttaaggggggccccaaaccccgggtggaggacggggcccctttgttccttccaataccaaaggggtggttggaaggacacaacggggtcttgggcccccgtttt

SEQ ID NO: 17176 - DNA, 438 bp, Glycine max
  unsure (1)..(438): unsure at all n locations
  Clone ID: PAT_MRT3847_115515C.1
cgtacactttttttttacttaatnacaaggccaaaacaaagaaccggggaaggggattggaaccagtggatcaacagacccacacggaacaacgcgatgccggacaagaaagatgcacacataacaatctagagagggacagaagaaactgaaaagaaaaccggacggacacaagacaagggtgcaacgagcaagccaagccggaccacaaaaccgaagggaaaaacccccaagtttgatcacgcgacgaaggggaaacggccgccgagcaaagagagacccgcacaggacgcaggggaaaaagaacacggaggactggagaagactccaaaagaaatgaaggcaagaaacggcaaccgaaagcgaaaggacaaatggaacgaaaaaagggcatgcgacagcacacagggatcgaggcaaaaacacccggggacccgc

SEQ ID NO: 17177 - DNA, 326 bp, Glycine max
  Clone ID: PAT_MRT3847_115516C.1
ggaaaagggttttacattttaatcgttctcccgtgtaacagagacacagagagagagtgtgaaaaaacgagaccatagagggaggagtctcccaaacgcgcatacctcgtgtcataatccgcgagctgatgagaggactactccacgttctagctcctcgacaacgacgcgactattaccaacacgctgctgcgcctcatgatcaccgaggtgccgacagtcgccatcgacctcgtcgagatatatgtacgcacctccgtgcgcacccaccagttcatcgctcacacacacgggctcattcacctcactaacgagcgagccatgtc

SEQ ID NO: 17178 - DNA, 597 bp, Glycine max
  Clone ID: PAT_MRT3847_115517C.1
ccacgcgtccgatacactggtaaggtgtttggaagcaagtgttgaatccacatcagctcaaaagttgtttatgccatagtatgatactcagcttcaacactatagcttgcagctacaatacccagcttcagcactataccatgaagctctggctttatccagaacaaaagcacaatatccagcactgaatgtttttgtgcataggatatattatttgtgagttagagcttctgagcaggtggtgtatggtgaagacataaaatggcttataaaactcgctggaaaaataatgtctgaccagataactgtcaaattactcaacttttcctcaaacctccagtatatctttgggtcattaaattctgtctcattatctgctgtaaacttcacacttggttctgttggtatctcacaaactatgttcatctaaccattttaaaaatgtgacataatcatgggtatttgttttttaacttcagctaaagataaaaattttgtgaggagtttgtcaatggatctagggactttaatgaatgagaaaatattgcagattgaacagttggtgtaatccttttcattagataattatattaaaag

SEQ ID NO: 17179 - DNA, 685 bp, Glycine max
  unsure (1)..(685): unsure at all n locations
  Clone ID: PAT_MRT3847_115518C.1
ctcgtgccgaattcggcacgaggaaaaaacagctgattgttaaagttatgtgcagacaacaaaatattcattttctcttgacagcgggtctctactctgaagatactccagctttcccccactcatcccttcactccaaaacaaaactgttacgaatttatgatgcttgactgtatattaaagtgaaacttttttgggatgaaacactgattccaaagatttacgcttttcccacttaactttctggacacctcttttgcatgttttattgtcagggatttgatcctccattgtcttaggaacatgaaatataattttttcaagaaaaaaagcataaaacaacatgggacccaccatatccaatgcagggaccataagtccatcataggagttactggttcctcttttaaaaatggcattttgcatgttcctaagggaaaaagaagaatatccaaatccttattgttggtgcctttgtagttgatcttgacaaattaactgtagtaaaagatattcaacaattaaagattgaatgtgaggggtgtgaaaaaagtntacctgacactaaatcaaggctaatangatatagtgatcttaataatgttttgttttangangtattgtgaatttgaaacattttattttgtacttctgcatggttgatattaaaaactgataaataaat

SEQ ID NO: 17180 - DNA, 264 bp, Glycine max
  Clone ID: PAT_MRT3847_115519C.1
aagcaacaatgaacttgaatgatctcatgaaggatactgataacttcggaaaaagcaatattattgggactggaagatcaggaactgtttacaaagctgtccttcatgatgtgaatcactcatggttaagagattacaggaatctcaacattcagagaaaggatttctgtctgggatgaatatacaaggtgtgtcaaacatcggtacttggttccgcatttagagttttgcgtggcaaaaaaggagaggtttttggcctataaa

SEQ ID NO: 17181 - DNA, 452 bp, Glycine max
  Clone ID: PAT_MRT3847_11551C.1
ctcgagttcctcaaatagcttacagttcctggttttaaccttgcctaatagctgcagatgtgaccaaaatgttatgctcactatctatctattgttgtagaatatattacatatatatcgcatgccgttcactgtaattttttgggtacaatcattaattttcaactcgattgaaaagcttttgttgtccattcatgataattatgatgccctgtatgctgatttttctctctaactgcaagcgatgcatattgccaaattagtggtagatatgttgattgagaggcataaagctgaaaatgggggaacatctactgagacacttgcactcgccttgttgagtactgatcctattaaatcatatggtacaatccttgcctcatgtgttgtggatgaaagctgtggaaccactggctgatacctttggcctgggaaaccgggtggaacctgta

SEQ ID NO: 17182 - DNA, 792 bp, Glycine max
  Clone ID: PAT_MRT3847_115520C.1
ttctgagaatcagtctgttgtctacatcttagtttatgtagatgatatcattatcacggtaacaacactttgattcattctcttgtttcaaaactgaattctgttttctccctcaaagatcttggtgacttggactaccttttgggtattgaagttcaaagacagaatgatggttctctcattttaactcaatcaaagtaatatcagggatctcttggccaagactaaaatggatgaatcaaatcctatctcttctcctatggttgggggttgtaaattgaccaagtttggttctgaagactttcctgatcctaccttacataggtccatatttggtgctttgcagtatgctactattacaagaccagagattagtttctctgtcaacaaggtttgtcagttcatgtctgaaccttctgagcaacactggttggctgcgaaaaggattctaaggtatctcatcagtactgtttcttggggtctacactttcagtctgcttctcttaggcatccctttcctcttcatgcctattatgatgcagattgggtctctgatcctgatgataggaggtctacttctggagctgctatttttcttggacctgaactcatctcttggtggtctaagaagcaatcagttgttgcaaggtctagtactgaggcagaatatagaagcatggctcttattgcagcagaagttacttgcattcaatctcttctttctgaactccaagtagcttacactactcctattattctgtgtgacaacaccagcactgtttcctcgagccg

SEQ ID NO: 17183 - DNA, 505 bp, Glycine max
  Clone ID: PAT_MRT3847_115521C.1
catcaatcatcatttcacattcacgcacagtagagaatgacattggtgccaatggataacatacacgatcaaaactattcacaaaattaacaattccccatctcattctcaatctaagagacatccttctacctttggctatggaggctttctccgtacagtcacttatcacagtcaccattccctcctctttgtcatgtagagaagccactgagaaaccttttgcctcccatgtcaacctttcccatttcacgaggtacccttgcacctcaagagccacaaagcacaaaatccgttgcaccaatgctcaagcttcaggtgttatatgtttcttaattttgagtgtcattgctgtgtgttcatttgtatttaaattgattttgaggtgaaatgatttatatttgtatgttgttataagcaagttagtagtagtattcattataagttttatatatatatatatatatatataaaatacaaaggttatctaaaattgttttgactc

SEQ ID NO: 17184 - DNA, 727 bp, Glycine max
  Clone ID: PAT_MRT3847_115522C.1
cttatattactttgattgcctgtgtcaaattttgtcaaaattgaacaattataagtagtcaaagggatcttatttttgtatgttttaaaagtatatattatgcaatttgatgcatatcaatggagtattaaataatttgtgaatattatttatatgataacaattgtaaattgagataaatttatccaataaaaagttattgaataagttgatcccttcctatacaatttatacccagcattttgttttgctaacaattcaaatcttgacttgggtggggaaagacaaagcaagaagtttgaagaaaagacaaaagggtgcatcaagcaggggcagagcatataatttctatgcagatgccatgtctccctaaatgtttatcaaaatcttttagattatccattgtataagtatgacttggcctccataatttattcattttggccttgcaaacacctcacactgacacatgttcatggaagcataatctaccaaagataatgaaattctcagttctaacatgggcacaagttaaaggactatgcttagttgctcttctttgctacttttttgttttttttgttttacaaacacacacacacatagatagatattatcagccaaagaaaaagatatattaaaaacttatgtaaaagtggtatattcatcgaacagaacactagtgatggtttttatggtatatataaatattttatatttttctttg

SEQ ID NO: 17185 - DNA, 337 bp, Glycine max
  Clone ID: PAT_MRT3847_115523C.1
aactggactgacaactgaagtcaagtttgtggagatgcaccatgaatgtgttacagaggcacatactgaaggcaatgtgggattcaatgtttagaatgttgatcgaaatgattagaagcggggctatgtgggactaaaactcacaggatgaccctgcaaaggagggtggtacctgcacagcccaagtaatgatcatgaaccaccctgagtagattggaaatggatatgcgcttgttctcgactgccacactgtgtacattgttgtgaagattgctgaactcatgaccaatagttgactgcgatccggtttagagcttgagaaggaactctcattttt

SEQ ID NO: 17186 - DNA, 418 bp, Glycine max
  Clone ID: PAT_MRT3847_115524C.1
atattttgttggagatctcgtttttgaagcttctaagatgacttctatctacattgaatgtactgtctatgtctccatagcatttggaacttaggctgatgacaccatcaattttgatgcttttgcccacaagctggtgcagtctggagagatacaggaaaaagttgtattgacagtttcacatgaggaatatcttacagcttggtcacctcacgtgcgtactgcgacagctctgttggctgatgggtgtccatatgtgtatgctgtggtgcatgattactcaatgtctacaattctcggtgatcttgtgattgttgttgagttgacagccataaacaatatgtgtgcatatgggctccatcctattaatcgatgttctcgtctctcgtgtcccattgctcagttcattactcagcgc

SEQ ID NO: 17187 - DNA, 332 bp, Glycine max
  Clone ID: PAT_MRT3847_115525C.1
gggaattagagtccctctttcttctccctcccgcactgcgccattttcaagtacgctcactcactactcttcccaaaaccctaaaaaccgtcacttttttttttgtttccgatggccggtggcatcgacatgtccctcgacgacattatgaagcgctcagccgccgccgtagcctctcgctgccgattcacggttgttcgcaacccggccagaacgacgtcgtatcccattacgcaggcaaggcaaaagagcatggttgcatttccagaaatggttttggaggagtcaagtgcggctaagattgaaaggcaccaaaattgatagggtccctg

SEQ ID NO: 17188 - DNA, 1263 bp, Glycine max
  Clone ID: PAT_MRT3847_115526C.1
cgagcctcaacaacgctgaacgcagaaaggggaaaaaggggattagggtttaggaagcagcgacaacaatggatttcacagcggagaagaaggaatcagagagcaacaccgaaaatgctcatccaacaactttagattcttcttctcaattggcatcggcacttgattccagcaacaaagaaatcgaagaacgacaagctcgtgaactcaaagccggtcttcaccccctcaagcacaagtttgtcttctggtacacgcgccgaacacctggagttcgaaatcaaacatcatacgaggacaacataaagaaaattgtatgattttagtacggttgaaggattttgggtctgctactgccatcttgctcgtcctgcttctttacctagtccaacagatttgcaccttttcaaggaaggaatccgtcctctatgggaggactctgctaactgcaatggtggtaaatggattatacgattcaaaaaggttgtctctggccgtttttgggaggacctgttaatgcaaatattttcatctgtacaaaaaggtagcttccctgatagtttttatggctaaggcaggttcttgcaaaatgtgaacaccaattgtattatggggataacatatgtggtgcagtactaagcattcgtttcaacgaggatatattgagtgtctggaatcgcaatgcttcagaccatcaggctgtaatggctctgagagattcaatcaaacgtcacttaaagcttcctcacagctatgttatggagtacaagccccatgatgcctctctgcgagacaattcatcttacaggaacacttggttgagaggctagagatccaattgtgttcttgccaaagtccctgccgtggaagctatattgcatactggtgcagctttcactcagccaggactggtttcactcagccattggcttcggtctagtgatggggctgggtgttcctggactggtttctgtcttttgaattcaatgtacgacagctacattgctactgctttaaatagtttcatttggttacttggggttcactctaattttgtgtagtgtgtcgtagtttttgtaaataaacttgttcgtcttgttgcttttcacctcgcttatggagagaatcatggcttttcattcccattatatatggtagattacttctgtagcgcattttacagagacattaatcctttgaactgagacgatcgatgagatgggtggggatcaagtctactttaaactgataaataaagtctac

SEQ ID NO: 17189 - DNA, 1605 bp, Glycine max
  Clone ID: PAT_MRT3847_115527C.1
ccacgcgtccgcttgattccagcaacaaagaaatcgaagaacgacaagctcgtgaactcaaagccggtcttcaccccctcaagcacaagtttgtcttctggtacacgcgccgaacacctggagttcgaaatcaaacatcatacgaggacaacataaagaaaattgttgaatttagtacggttgaaggattttgggtctgctactgccatcttgctcgtcccgcttctttacctagtccaacagatttgcaccttttcaaggaaggaatccgtcctctatgggaggactctgctaactgcaatggtggtaaatggattatacgattcaaaaaggttgtctcaggtcgtttttggggtcgtttttgggaggacctggttcttgccttggtgggtgaccaattggattatggggataacatatgtggtgcagtacttagcattcgattcaatgaggatatattgagtgtctggaatcgcaatgcttcggaccatcaggctgtaatggctctgagagattcaatcaaacgtcacttaaagcttccacatagctatgttatggagtacaagccccatgatgcctctctgcgagacaattcatcttacaggaacacttggttgagaggctagagattcaattgtgttcttgccaaagtccccgccgtggaagctacattgcatattggtgcagctttcactcagccagttaatcattggcttcggtctagtgatagtgatggtgctgggtgttccaggactggtttctgtctttgaattcaatgtacgacagctacattgctactactttaaatagtttcatttggttacttgcggttcactctaattttgtgtaatgtgtctcttagtttttgtaaataaactcgttcgtcttgttgcttttcaactcgcttatggagagaatcatggcttttctctcccatgatgtatgatagattacttctgtagcgcatttttacataaaggcattaatcctttcgaatcgcaatgcttcggaccatcaggctgtaatggctctgagagattcaatcaaacgtcacttaaagcttccacatagctatgttatggagtacaagccccatgatgcctctctgcgagacaattcatcttacaggaacacttggttgagaggctagagattcaattgtgttcttgccaaagtccccgccgtggaagctacattgcatattggtgcagctttcactcagccagttaatcattggcttcggtctagtgatagtgatggtgctgggtgttccaggactggtttctgtcttttgaattcaatgtacgacagctacattgctactactttaaatagtttcatttggttacttgcggttcactctaattttgtgtaatgtgtctcttagtttttgtaaataaactcgttcgtcttgttgcttttcaactcgcttatggagagaatcatggcttttctctcccatgatgtatgatagattacttctgtagcgcatttttacataaaggcattaatccttttaactgagacgatcaatatggtgggaagggatcaagtctcctactgtgggaaaattatttcctacagttagatgtatcaatttttaaa

SEQ ID NO: 17190 - DNA, 415 bp, Glycine max
  Clone ID: PAT_MRT3847_115528C.1
atgccccccgccgaaggctcggattcggttcgagcattgttgaatggaatttgttgttatgttccactgcctacaaaaactaattgatggaaactcccaaggaatggcaactggatctaccttgggacaaaattcctaggggcttgacttccactggtgaaaggttggtagggaccaaaccttgagggttttaaccttttcttggtgggaatcaaaaattatgccattccattgatgcccttaattgaaaaaattttttttaaggttgcccaggatttggttgaggaatggttggatggtgtggttgaggaggattccttggaggaagttcttttaagggcagacttaaatggggtggagggttgggcctttttggaaggattccttttggccacatttgagggttttcctaatg

SEQ ID NO: 17191 - DNA, 146 bp, Glycine max
  Clone ID: PAT_MRT3847_115529C.1
gggggcaccagctgtcgaatctgatgacctcactcctgaagtcgtatcttgcctcacaattccaaagttaaacacaagtctttcagcacaatcgcaaacatcagtatccacggcgacaattagttacgaagctgaagtacgcattt

SEQ ID NO: 17192 - DNA, 418 bp, Glycine max
  Clone ID: PAT_MRT3847_11552C.1
acatggacaatgagcaacagggtgtttgcttacgagagagagaacggacctgtcgacccattggcttatgagcagatgtctcacacacagaacaactgcattccggttattgaaagagatgtttacgttgctacacacggacatgaattcctatctgataagggatggggtgagatagagagcgcgtatatagagtatgagagagagtggtgttctagtatatccaggaccggaaatatagcttaggatgacctaaaggttgaacaatgacgaagaggagaagaccctggtgagagaatgctgtgtgttcaacagggtcagctttttagaacccaagttctacagaacaaagggtacaggttatacgttttacgtccgggaatctcaagagtggacgaggctatataatggtgtctga

SEQ ID NO: 17193 - DNA, 1005 bp, Glycine max
  Clone ID: PAT_MRT3847_115530C.1
ataattgaaagcatttttctgttttcatcttgatttaagctcccccatccatttccatttcaaaatccctccctccttcatttccccattttcctcttcctcttttggtgtgacagccatggaggaatgaaccaatgacatgaaccgccgcggattcctcagcccccccttcgcaccccctcctctctaactctctcctggacatgacgcagaagatccttctgcgctctccgccggtcacccgccgcagggagaggcggcgcgtgggggaggttgccggcaacgcgacggcggagtgcgcggcggtgtgctgctgcgtgcccttaaccgtcatggacatggtcgtgctggccacctacaagctccccgcgggccttctcaagaaggccatgcacaagcgcaagggacgccttctgcagaaaaggaagaagaaaaccgaggcgctcttggatcacgggcctgtcaaggccgataattctgggcatgggcttgggcttgggcttgggcttgggtccacactcgaagagcgcctggcgaaggaggtcgcggaggagaagttggaggcgtcgaggttggaagacgagatgtgggcccagttcaacgggaccgggttctggagaagcgcttctcagcgccaccaccaacaacaaactgatggggaatcatgccaagaactccaatgatttcggtacacgtgtcgcgtttccattcgacgacaactcaacgaacgcattcatttacctggattctatgcatgcgacaatgtttaatgtgctgtcatagacgaccatcatcatattgttgggtttagccatcatttatcgttcttgttttttcctatgtgtattttaattttatcaagtctatgcattattttgataaggttacgactttctgaaattggaattatttttaactttaacgtgtactaggaacgagtatgtagaaagaaagctctattattgtgtgtggaaaaaaaaaaaaaaaaaaaaaaaagggggggcg

SEQ ID NO: 17194 - DNA, 454 bp, Glycine max
  Clone ID: PAT_MRT3847_115531C.1
acggctgcgagaagacgacagaagggccatacaaaattattatgtaccatcaatagaacaccaaatggtatactctttcaatccactatcactcctactcatgatgcaattttgtattacaataacacgccaaagtgggtttttaggttactccttcattataccaaatccaataagatttgacattcctcttaatggaattcatgaatcacggtgagacgagtgttctttcaataatcagggtcatactaagtattcagaaaatttaatcgaatatgaaataacataattgaaaaatgacaaagacatactaatggtgttagtaaaattctactattggaaatgattttgtccaatagaaattttagctattcttgacaaaccaataaccgaaatggaagaaaacaggtttcctgcccaacatctttcaattatccgtagtttcgctatattt

SEQ ID NO: 17195 - DNA, 921 bp, Glycine max
  Clone ID: PAT_MRT3847_115532C.1
gcgtcagcccacacgtccgaccgaatgtaacgtgttggaattggcgtattggtgtgcagtatctatttagagagagtgggaatcattcgtttcgtttcgttcagaggtttgtttcactgtttcagaatgaacggcttaagaagtgaaagagcccctctcttggaggctgagcgtgctgtaagtctatttctcttctcttcttggcccatatgcacagtgccattcattggtgctcaccttcagcttctcctgcttcagcaatttggccacactcaaacaatttttgtcttttgtcaattaattgtgtgatgaattggaaaaaaaaaaacttttttccactgcctctgggataataataggaatatcctattgcactgtttgaaaccttttctatttatgaaatcttttgatgtgcttctctgcgtatatttcagtttctgttctgtaaagcgtaaactatgttcagttgaaaacatagttggacttagagtctttattattttttgtcatttttcgttttttttttctttttctttttgagggctggtgagatcaaaattggtttagttatttggtctatgtaccttcataatctttaccgtttggtccttctattacttttaattcattttagcccctacaattttttactaaaattgattgaaaattgtatgtttaaggactaaaatgagtcaggttttaaaaatgtatgtttggtctaaaatgtaaagattatatagactaaacgagtaattaaagcattaaaatatataagagaggccattgtttcttttaactgtttcaaactatttggaactcatatatggtttattggttaaggctccttcccagtgacaattgctctttgaaactattaattaagtccccaattctttggttggctatgcgttttggacgatt

SEQ ID NO: 17196 - DNA, 1034 bp, Glycine max
  Clone ID: PAT_MRT3847_115533C.1
actcctctatcccaacaaaaacaacaacctaatccagtttcgttcttcgcccgacacattttttttctccgatctcctattcctcctcctatttttgttactcgaagcgagattgatagatagatcgatcctctctatgggttaaagttaaatctgaatccgaatatgatctaatcattttcattttaggtctttctgatttggttttcggtgttgaattgagcgcggtggttgtgtttaggtttcgttttgttgggcgtgtgagtcgtagggggggtttcgaagagcatagaataatgccttcggtgcctgctgatctccgtctagttccttctctgaccgttttccatggtgaatcttcctttcatcgtctgaaaaatcttgaaaaaacctacattattatcacacactgttagaagcaacaagaagcagcagaaatccaggaagaagaagcctgaaaagaagaatggaaagaagggtcaaaagggaaattcatctcgagggggcagcaacaaagataagcaggttcgcaagctaggtgggacttctggtttgtgctacaagtcaatggattcttgtgataaagtgcttggagcttctactgaattagatgctcttgaagttcgaagccaggattcatactgtggaactagcttcctgaaaaaatcagttactgaagtgcactactcggttgcagaagcactatgagtgaaatactctgaatgtcttttcctatttccttgaatgtacataaataagcgatattttgctgttggcttatttggtggaaaaataaaaagaaaaagacattgggttgtatggtgaaagttgtttggttgatgtgggtgggacaagttttggtagacgaggtcatgtctaggcttctggctttccagtgataattctaatgaggaatctctaagtggtgttttttgttgataacctctgtatcgttggatttgtgttttgaatagattgttgtttgatgataaaaaaaaaaaaaaaaaaaaaaagaaaaaagaaaggggggagag

SEQ ID NO: 17197 - DNA, 261 bp, Glycine max
  Clone ID: PAT_MRT3847_115534C.1
cctcgagccgaatcggatcgagatttgagtttgctataatcacacgctcaaccacttagtcaaaagccttatctgagtttacctctgtgtctctcggcgcatcaaccctatctgtctgccgttgcatcagtaaagtcatcttagatggttgaacaagacttcctcagcgagcacatgaacgcctcactctcaagactgacattttgtatgagctaagctgttatacggagaacgatctcacgagttacatcgacagagtcg

SEQ ID NO: 17198 - DNA, 1050 bp, Glycine max
  unsure (1)..(1050): unsure at all n locations
  Clone ID: PAT_MRT3847_115535C.1
tcgaggggattatcttgaccttgtggttttctttattacctgtgtacttacgctcatcttattgttttccatgaattcggctcgaggttaggtttttgagtttctattgacaatgggataagtaaatcttgtaaaggttagtatgttacaactttgtctctgtaacatttccctttctatttggctcctcctgctagaagtgaggtttgaagggattagaaaattttcaccttactatatatgcattcaagacaggtgatgcttgatagaatcgtattctgtgaagtatagtttttggctcataaatatggactaatatctatcttattcttaacacgtgcctattcttcattaatggcttccatttatttctgtatttttataccacaggctcctctgaagcttatacctgccataaaaggtagccgtgagaaacatgggggttcacaggtgaaattgaatgtgaaatgggccgctgatgtgtatgatccagtgcctacattgttatctcacactgtaagaagcaacaagaagcaacagaaatccaggaagaagaagcctgaaaagaagaatggaaagaagggtcaaaaaggaaattcatctcgtggggcagcaaatagcagtttggtatatatctgcgatttaagcgaaacacttttctagtgatgtaaagaggtgacttgggttacttgagncctccacacctatgtatcacaatatgcaggaacacctggtaatgcgaagagccattttttcagcaaatatcgtgaccctaggtcaacattgacaagggcagcaacccttactggtgaaggggttgcactcaagtgtttctagttttgtatcatattgaaaattatatttagcatttaaccaatgttttgtttatgaatacactnttgccccagnccnncgcccgccccccccccttctctaattttttgggcaatgaaaattttggtctgcctttttggatttattgctgntatttatttacaaaactttagtttctctacaatttctatatttcctacccgaagagaagtaaca

SEQ ID NO: 17199 - DNA, 2157 bp, Glycine max
  Clone ID: PAT_MRT3847_115536C.1
gttaggtttttgagtttctattgacaatgggataagtaaatcttgtaaaggttagtatgttacaactttgtctctgtaacatttccctttctatttggctcctcctgctagaagtgaggtttgaagggattagaaaattttcaccttactatatatgcattcaagacaggtgatgcttgatagaatcgtattctgtgaagtatagtttttggctcataaatatggactaatatctatcttattcttaacacgtgcctattcttcattaatggcttccatttagtactgaattcgcatctaacggctgcgacaaaaccagtttcggtgggagaacatcaaccttttccagtttcgttattcgcccgacacattttttctccgatcccctattcctctccattctccgttgtgtcgatttttgttactcaaaagggaaattgatttgatagatagacagatagatcgtttctatgggttaaagtgaaatccgaatccgaatctgaatctgaatctgatctaatcattttcatgttagggcgtgcgatctccaatcaagcgcggttgtgtttaggtttcattttgttgggcgtgtgagtcgtagggggtttcgaagagcatagaataatgccttcggtgcccgttgatctccgtctagttccttctttgaccgttttccatggtggatcctcttttcatcgtctgaaaaatcttgaaaaaagtgatcggcgtggtaatcttagttaacactaggtctttcgttttcttccaccttctctttcttttctcgctctcttttggtcgtcgttgttgttggttctgctctgagcgagctgtgattaattcgtcagcggatcgggatcgagggtttgctattgttgttctttctgtgtttggttgctattctctgctcctgttttgatagtgttgtagttgcagctccaaacgtcgttttataagttgcctcttagtacctgatgctattgatggacacgtgctctaataccaatgttgtgcatgacgacaacttcataagtaatcttggaaggacttttagtgagtcattacacattcaagatgctcagaaatctttacttgcttctgaggggagtgacatctataatgtgaatgaggaaaaaatatgtaaagcaatgaaagatcaagcgacaaaagtaaatatggcgtgcttgaaaaaatctgcaacctttccaattcctaataccatgttgccttcaagctcgtctgataaggaggctgatacttcagtcacagaaccactctatgagcattctgctcatcaaacttactcacgctctgtatctctgcctgctcctctgaagcttatacctgccataaaaggtagccgtgagaaacatgggggttcacaggtgaaattgaatgtgaaatgggccgctgatgtgtatgatccaatgcctacattgttatctcacactgtaagaagcaacaagaagcagcagaaatccaggaagaagaagcctgaaaagaagaatggaaagaagggtcaaaaaggaaattcatctcgtgggggcagcagcaaagataagcagtttcgcaagctaggtgggacttctggtttgtgctacaagtcaatggattcttgtgataaagtgcttggagttgctactgaattagatgctcttgatgttcgaagccaggattcgtactgtggaactagcttccttaaaaaatcagttactgaactgcactactcggttgcagaagcactatgagtgaaatactctgaatgtcttttcttatttccttcatcgtacataaataagctatattttgctgttggcttgtttggtggaaaaaaaaaaaaaagacatgggattgtatggtgaaagctatttggtaactctttagagtacatgcagtcaagattggcatttttatttgtgatgtgggacaagttttttggtagatgaggtcgtgtctagcctttccagtcattaattctagtgagggatctctgaagtggtgttcttttgttgataacctctgtatcgttggatttgtgttttgattatattgtcgtttgatgataaaaggtgctgctaaaatcttgactcacttgacacccaaaataaggaaaacaaaaaataacggcggggcgcatgtactagtcagactgtgtcg

SEQ ID NO: 17200 - DNA, 1507 bp, Glycine max
  unsure (1)..(1507): unsure at all n locations
  Clone ID: PAT_MRT3847_115537C.1
cggaattcccgggtcgacccccgcgccccgcctaagccagtttcgttcttcgcccgacacattttttttctccgatctcctattcctcctccttttccgttgtgtccatttttgttactcgaagcgagattgatagatagatcgatcctctctatgggttaaagttaaatctgaatccgaatatgatctaatcattttcattttaggtctttctgatttggttttcggtgttgaattgagcgcggtggttgtgtttaggtttcgttttgttgggcgtgtgagtcgtagggggggtttcgaagagcatagaataatgccttcggtgcctgctgatctccgtctagttccttctctgaccgttttccatggtgaatcttcctttcatcgtctgaaaaatcttgaaaaaagtgatcggcgtggtaatcttagttaacactaggtctttcgttttcttccaccctctctctctcttggtcgttgttggttctgctctgaacgaggtgtgatatattcggcaacggatcgggatcgagggattgatattgttgtttttttcccgtgattacttgctattttcagctcctgttttgatagtgttgtagttgcagctccaaacgtcgttttataagttgcctcttagtacctgatacaattgatggacacgtgctctaatactaatgttgtgcatgacgacaacttcataagtaatcttggaaggacttttagtgagtcattacacattcaagatgctcagaaatctttacttgcttctgaggggagtgacatctataatgtgaatgaggaaaaaatatgtaaagcaatgaaagatcaagcgacaaaagtaaatatggcgtgcttgaaaaaatctgcaacctttccaattcctaataccatgttgccttcaagctcgtctgataaggaggctgatacttcagtcacagaaccactctatgagcattctgctcatcaaacttactcacgctctgtatctctgcctgtaagttatctgatttatattacttggctgttagtaaagtttgaaggtatagtttgtaagcaatgtatgcttttgctcaatgagaaaatactgaaattttagaaaggattgttggactcgngtttctttattcctgtgtcttatgtcaacaattttcagtagaaaatgtttgcataaatgcataacgtaaaaatacaaacaaatcaatgccctgtagggagtacagaaaggtttgttggtatattgtaagcatttatgcaaatattttctatttatgtaaagggcaatttggttcttgaggctcccacctatgtatcacatatgcagtaacacagacttatcctggtaagtgaagagccaatttttaaggattgaatgtgacctaggtcacaagcaaagcagcaaccttactggtgatgggttgcactcaagtgtttctagttgtgtatcacatggaaaattatattttaagcatttaaccaatggttacaaatacacttaccccccccc

SEQ ID NO: 17201 - DNA, 318 bp, Glycine max
  Clone ID: PAT_MRT3847_115538C.1
ggtgtttgagagaacattgttgtatgttacatcatataaaataaatatgctctgaaagaacacatacaagggcacaaaataatgggggaaattcataaaaagatacattagaaaaaaaacagactcagagtgaataggcgaagcgaaacataacagaatattttagcggtgagataatacgaaggccatagtagagcaaaagaacgttgccaagagtgtagaaaccccttttagttaagcaggtaccttctcccacttgagtggcttcaccacttaccatgtgaaggcagggtcatctctgccaaagtgtccatatgc

SEQ ID NO: 17202 - DNA, 302 bp, Glycine max
  Clone ID: PAT_MRT3847_115539C.1
gaattcggcaccagttttattactaacataaatatatttatatgcattgtcaaaaaaaaaatgtactgaatgcttgttatttgtatttctgtttgtatttgtttcgctgcatcattagtcattcatcttttcaatttgtttaaggaaatctgtttattatcgcgttcatggttaatgcatttttgaattgatggaacgagaggggatgaaatggaatgaactaaattgtaatggaataaaaaaaaaaaaaaaaaaaaaaaaaaaaaaaaaaaaaaaaaaaaaaaaaaaaaaaaaaaaaaaaa

SEQ ID NO: 17203 - DNA, 152 bp, Glycine max
  Clone ID: PAT_MRT3847_11553C.1
acgaggttggaagccacggaaaggccataggcattgatcgatttgcagcacgtgctccagctggaaaaatatacatggagtttggtgtcaccaaggaagctgttattgctgctgccacatatctttcgtagatctatttgttgactttcttt

SEQ ID NO: 17204 - DNA, 441 bp, Glycine max
  Clone ID: PAT_MRT3847_115540C.1
atgactacgaccgaagcattagagcagaaaacaaagagggcccaaaaagaagaatggggcaaaaacaagttccaaggggctctatggggcaacaacaacgacctcaagcttcgaagggatgaaagggatgagttgagggtgaagagtatgatattagaggataagttgaaggcttgcaaagaggatgagcacgcgaaggtagtggctctgcaagcggaaagggaagcaagagagagcgtgatagaatcattgcacagggaagccgtgaaatggatggatagattcactctcactctgaataggagtcaagaacttccaaggcttttagccagagccaaggaaatggcggatgtgtacccagctctcgaggaagttcatgggcttctcgattattgccaacacatgttcgaattgatgtccctcataattaggaaccactga

SEQ ID NO: 17205 - DNA, 160 bp, Glycine max
  unsure (1)..(160): unsure at all n locations
  Clone ID: PAT_MRT3847_115541C.1
catgggagttttttttntgcccgaagatgccaaatcaattcctaccaactctgatctaactgtgaaattacgccaacatgatacccaacattcttaaaggcacggaatggtaacaaagaaaacaactgntattttttgacattggatcatcagattcact

SEQ ID NO: 17206 - DNA, 491 bp, Glycine max
  Clone ID: PAT_MRT3847_115542C.1
ttgaggttgataacattacaggcattgaacatttaggccctttcgtacctgaaacaaacattttaggaaaaatcccaataacttccttctgtttggagaagtgaaattatataccttctttttcgatgtcgtacactggcctcctttaatggaattggattagtctccattttgtgagtattttaaatttcaaatttcccaattaaaattgttatccaaggctggtctgtctggaagggagagtgatgggggcactgccttttttcttttgaaactggacctcaagatttacttgttttctgtccatggattgcaatgcatgtgggtcagggctggtttgaggttggtgattgaccaaatgggttgtttgttgagtggggaaggctcaatcacccaatagcattggctactggcatttgacgccgttaaatcaccaagccaatgctgtggtcacagccaccatctctcacttctccatatccctagttgaa

SEQ ID NO: 17207 - DNA, 673 bp, Glycine max
  Clone ID: PAT_MRT3847_115543C.1
ccacgcgtccgcggaccatatcacttgcttccatttgaaagctgaccctgaggaatactctctctcaccgctccaaaaactttcctaaatcatgatttcgatcttggcttgtctgttcccttcggtctctccaaagagggtggcagagacaaagaagggtgcagtgctggggatcactatggcgactgggggacgcctcgcaacccagcagaactgcacgaagatctagctctatctatgtatgttacagcaataacaattcctgttgcggaaccctatcagcacggcacttgttagttcgatgggggataatgatttgatctgcgcgttgatggcatggtgaactgagagcctcacagcagtgccctaatctgatcggtagctacatcaccgtaggcttccaatgcctgcgtacgctaactgacaccaacaacgggggccgctacagctgatacgcgcacacctacgcttacctgcgagacaatggctactcatttggggcagctgcagatgaatcctgtgcgagacagttacccatggcgtactgtagagcagcgtggaagatgactttgtgagtcactatggtggaggaaaggctgtcactgctgctgtgaacagccttgacgaggaatctgggccacctttgaaggagcatatgcagctctgtggtgat

SEQ ID NO: 17208 - DNA, 342 bp, Glycine max
  Clone ID: PAT_MRT3847_115544C.1
ggcaagcaaaaaatctgcatcctctgaagcatcatcatccgaatcatcatcttcagaagatgctggaagatcatcttcactttcagaagaactggtgtcagaattggcatcctcaccattctgaacaactccaatatcattgttctgattatttgatagactgttaggctcattatcagtttctatcacatcttcaaagggttcaagttcctcatcaacagactcgttctgcaacaccaggttccataaagtggtctggctttaaggagttcagattgccagtaatgagttttaccgtgctttgtactctaatggctcgaggcgatctgcactagacgttta

SEQ ID NO: 17209 - DNA, 492 bp, Glycine max
  Clone ID: PAT_MRT3847_115545C.1
cttgggggggggggggggggggggggggggggggggggggggggggggggggggggggggggggggggggggggaataacaattaaagggggaaagaacaaggaagtgccctggggaaaaaactgggccccgcagaataacggtttaacccgaaaaaaaatcccggtatggccaaggtaagggtaactggcaaaaaaattgcccataaagggtaccttgataactggaaattgaaaatgtagggaataacaaggtttatgtaaatcagactaggcccgctatggctaagttggccttatacagtactatatggggggttaagcccattacccgggctaaaattgggtagggttttgggcccaggcataaggatttttctaggggtggccaaagatagcggcattttcgttgggtccccttagcccggctctgccccaataagcattccgcccaaaattggcggttgaaaagtcccgggttttgggggtatcc

SEQ ID NO: 17210 - DNA, 151 bp, Glycine max
  Clone ID: PAT_MRT3847_115546C.1
tcatcttgcagtgataacgctgtgtgccggcatgcctactgagtgcgctatagtggagagagagggtctacaagccgttatacttagctgacgcgatatagtagatggttggtctaactatgagagagttttccgtgaatacaagacatat

SEQ ID NO: 17211 - DNA, 447 bp, Glycine max
  unsure (1)..(447): unsure at all n locations
  Clone ID: PAT_MRT3847_115547C.1
ctttgactgctgccgtcaagccaaccaagggacatcaacatcgaattagaaaatagcatcaaaatttgaaaaccaatgttcactatcactaaaaaattgaagttccagaaccagtatttgaaaaccaaggcgtcgcaactcccaacaacctggccgccgttgccgccaccgctcctgttgccgtcaaactcgtgcccacccttttgcttcagattttgtggtgctcgcggaccagctcaagaaggagagctagtgggagactctcaaggcggccattaaagccaaactcgaagtcttgcagatctgagaactgcctgcaactgccagttcttactgggtttagtttttcaaatctaagaggcgtaggtggcaagttgcagatcgacagtcgcaaagaagagtggcggcgccgacttgaagagcggtgagcngctgagcaagaacgac

SEQ ID NO: 17212 - DNA, 738 bp, Glycine max
  Clone ID: PAT_MRT3847_115548C.1
ggacggctgcgagaagacgacagaaggggactatgtcagtagtcttcaagctcaagaactcttcaacacatgggtagtacatcagatatgctacttgtttgttcgtcttacactaaattgcatcattttttttcttttctagattggctctgacacataatttagatgttattattggtatctattccacaatctcttcattacctgcttttatatatgcttgtgaaagtattgcatataacataggtgaatgttatttaaggccccctggttcgttagattcaaaatcatttttatggctatttatgacaatcccatcattgagttcctacccttatcaaatttcggaattccttggccttgcacctgtacattttacactttcaactctggttcatctacatggggcattgttcaccagcattgtaacagttgtaagttgtaatagcagttctgttctgggatgacttcagctatagcttgcttggttcagtgttttagaaagagggttcatgtccacttagaagcaacatagtttagtttctgcatcttttcagatttttggatatgctcgtttgagatgtgcaaacaaacgcacattaagctgagcttgtttctaattaccaacattcataggcagagagagttgaaaatttagtttaagggtaacaagatttttgtcatatcagaaatagaagggaaaaaaaaattaattagttcaaagaaagattttaatat

SEQ ID NO: 17213 - DNA, 580 bp, Glycine max
  Clone ID: PAT_MRT3847_115549C.1
ttaatctctgtatttttatagcaaaatgctaaccgtcaaaagtgttaccagtattgattatttaattttactgtgttttgtaatgcaccttgaatttaatttattattatttattactgtgtttgaatttgagagttgagattggactttttgttgttgaaggtgtggaaacggtgaaggctgatagcgacgccgggaaggtgaccgtgaccggaaaagtggaccccacgaaagtgagggataacctggcggagaagataaggaagaaggtggaactggtgtctccgcagcccaagaaggagcaggagaacgagaaagagaacaaggatgctaaggcaaacaacaaatccgagaataacaaaacccaggacaaaaaaaccaaggacaaagaggttggttcatcactggtccccaacctttgccccctttgtttatttaatttattttactttctctgccactgccagtctgggatttttttttttttctaattggtttctggtgacctctgttaatttttttcaaaatttatttgtcgcttattgtttaattagcttaatttaattatcaggtggtaacc

SEQ ID NO: 17214 - DNA, 325 bp, Glycine max
  Clone ID: PAT_MRT3847_11554C.1
cttactagtacgcttaataagacctagggccagatctagggtttatttacattttgtacaagaattggaacaagaaaggaaatatgaagggaaataggatggacgatgaggatgacactgaagatctcaaggaataccacaaagactacgaaaaagatgaagaaaacgctaaagatgtcgctgaacctggtactgaaggtgataagaggggccatggtgggatatatagagagtgattgtgagaatcagtgctgataccagacattgttgaagcaagagtagagtatggattagaggatcctcaagaagggctacatgaaggcat

SEQ ID NO: 17215 - DNA, 625 bp, Glycine max
  unsure (1)..(625): unsure at all n locations
  Clone ID: PAT_MRT3847_115550C.1
agtaacattccagaaagtatgaacagcatcaagcaatgataatatcaagtctacaaaacatgtgatacaatgaacttgatgccaacaaaccctatcattaactcttggtaattgaatgccagcttcgactannttatatatccctcacttgaatttatacacaccctccatgatgagaacagaacattcacaaatttggaccaagggagttacgataagcataatatgttgatcaaccacaatgcacatcagcctgcaccaatgtaataaaaaaattaccagaacactagaatagtactactgatagatataatatgactgatttgactgacactcagctaagaccagacaaatttcaggtcctagcaaattcaaaggagaaacgaagcagttaatcctccaagaaaaaatgacaacaatgccttatctcaaccttgactaatttccttctatttcaccttgcatacatcttctgcagtcttgatatttttttttttttttnncaaatcatcaacttctttctccaggctttttatnnnatctttggggagacttgaatacnacttctttattgcatnnnttgccttttgctgggctcttctaatactttgactagcatcttcac

SEQ ID NO: 17216 - DNA, 550 bp, Glycine max
  unsure (1)..(550): unsure at all n locations
  Clone ID: PAT_MRT3847_115551C.1
ctctctgtcgcgaaccanccaaggaaaaccattctagccctgagtctgctacttgcacatattatggaagcttgcacaaagcatgaggttccctcttccggtcacacttcccctgaatctggagctcagcggggattgaacaagctaacaataatttatccggaaataatgtattggacttggacacactatcatagactgtgtgcctcattcttctctccagagcattatcctttgctcactgangttgaccggagccttcagcgaccggaactgcattcaaatgatctacctgctgaggaggaagtacgtgctgaatccgccgtggttatgagccgagattcaactgagagcatgctagcagcctattggtctgcaaatcctgagtctatgataagtcctgtatataacaacctattattattatactacccttgcatcagagcatgggatgagattgaggacacgctatttggtcagcataatatgatgatccctttgccttgtgtattctaagcatagacctaatctgtattccttataatgcaac

SEQ ID NO: 17217 - DNA, 574 bp, Glycine max
  Clone ID: PAT_MRT3847_115552C.1
attcacgcgttcggtttgtacaattggagaacatcaccagttgattatactgaacgatgggactgatgacagaggcactgagactaggattattattcatgctacatcagtcttaatttgtagtggcgaaatatatttcgtggtatgaaggatcagggacggatgaaggatgagaatccaggggatagctatggacggggtgacctatttcatgaaggtgaaatatataatggactaggtagggggagctgtattggcctaatcgggagtggtatctagagtgtgtacagcggcagctaccctggcgatataggaggatcttctggaacctgcggtggatgttcggccaccggaacaggcatgcctacagaatacaccaccacggtcagggaagcgctcatcatgaccagggtgggctgcagcttgaccaggataggcaccaacaccggcatggccaggataaccgctaccgacatggccaggatgaccgtcacagtcatggactgggtaacccctttcatagcttacaccgggatatttggcatgctccactccatgagctttcttttttgta

SEQ ID NO: 17218 - DNA, 383 bp, Glycine max
  Clone ID: PAT_MRT3847_115553C.1
gttatgggtattggctttatctagcctctgctacccgctagccacaatgaatgccggggcaccaacaggtgcaccctggaattaacaaccttcaaccccttcagcaccctccaatttgccaaccacaaccccaaatgcactttctacattgtcaacaacaaccacatatgcaccatctacattgccctccacaaccccaaatgcaccatctacaattgccacaaccaacccaaatgcaccctttacaatgtccttcccaaaccccagttgcaccctcaaacatttcctaccacaacttcaaattcacccctcacattgtccacttcaaatccaactgcaccctttacattgcccacaacaactttccccttttttatcaaacc

SEQ ID NO: 17219 - DNA, 347 bp, Glycine max
  Clone ID: PAT_MRT3847_115554C.1
atgacattagccaaagttgatatgttaagttaatattggtgaagtgaagctcttcttcttacgatagggtgctcgtgaaagagaaagagggaaccattcgagattcgtgtggacatattagctaaacgtcgtgacttttggattccaagaaaaggcaattaaggaatggaatggttggcctttaatggcaaggacgacctttaataatccgggtgggaacttgaggaaagggacaggaatgaacccagtaggagaattttcctttccaaaataggatcgaataaacctatgttaccggaacagttctagcagttacgagacatgcattataagtagcacaaaattcc

SEQ ID NO: 17220 - DNA, 498 bp, Glycine max
  Clone ID: PAT_MRT3847_115555C.1
ggaaataggggatcaaaagttgcttttagacctcttcaggttcctagatagaacagaagagcttgcgctatctcattatcgagagcatttgaacattcaggaccctgacaaacgaaaagaatttcttaaaacctgtgttgggttgccattttcagcagaagattccgcacacatacaggaccattacacgctcctggaacgtcagatcattattgaggcaaatgatcgccatctagaatcagcaggacagactgagatcttccgaaagcacccccgcaaagcctgcatcctcaacatgccactagtgacaacacttttctactcctgcttctatcactacacagaggctgaggggacattcagcagtcccgtcaacctgaagaagacatttaagatcccagataaacagtatgtgctgacagccctggctgctcgtgccaagcttcgagcctggaatgatgtagatgccctattcaccacaaagaactggctgggcta

SEQ ID NO: 17221 - DNA, 1632 bp, Glycine max
  Clone ID: PAT_MRT3847_115556C.1
agttgccggatttcgcacttgtggttggcacgaatgattgtgacagagagtgttttagcaatgattcttgtactgcgtatgctaatgttaatggattagggtgcatggtgtggcatggggacttggttgatattcaacatttggaaagtggaggaaatacattgtacatacgcctcgctcattctgatttagatgatggtggaaaaacgaacagaattgtgataatatcaactgttgtggcggggttaatctgcctaggaatctttgtatggctggtgtggagattcaaggcaaaactgaaagttctgcctacagtttcctcagtttcttgttgcaagagtagtaatgtactaccagtttttgatgaaaacaagagcagagagatgtcagcagaattttcaggatcagctgaccttactttggaggggaaccaattaagtggaccagaatttccagttttcaattttagttgcatttctatagccacaaacaatttctctgaagaaaataagcttgggcaagggggttttggccctgtctacaagggaaagcttccaggcggagaacaaatagctgttaagaggctttcaagacggtctggccaaggcttagaggagttcaagaatgaaatgatgctgatagccaaactacaacacagaaatttagttagattaatgggttgctctattcaaggggaagagaagttgctggtatatgaatacatgccaaacaaaagcttggattgctttttatttgatccagtcaaacaaacacaactaccttggacaagacgttttgaaatcattgaaagcattgcgagagcattactttatttgcaccgtgattcaagacttagataattcatcgagatttaaaagcgagtaacattttgttggatgaaaacatgaacccgaaaatatcagactttggcttggccaggatatttggtgggaaccagaatgaagccaatacgaacagagtagttggtacttatggttatatggcccctgaatatgcaatggaaggtctgttttcagtcaagtctgatgtatacagttttggtgtattactactagagattttgagtggccgcagaaacactagctttcgtcactcagatgactcaagcctcataggatatgcatggcatctttggaatgaacacagagcaatggagcttcttgatccttgcattcgtgattctagtcctagaaacaaggctttgagatgcatacacatagggatgttatgtgtgcaagattcagcagctcacaggccaaacatgtctgctgtggtgttgatgctggaaagtgaagcaacaactcttcccatgcctacgcaacctttgattacttcaatgaggagaactgaggacagacaattttacatggatggccttgatgtttcaaatgatttgacagtcacaatggtggtagggagatagaaattgattccagtccctttctgtgtcagttttgtttgcacttctctttcacccttcacacatacattcatagggctcactgttttagtttttcccttatgaccctggcgaaattaaactttactatactcttaatattgaatacacatttgtatatatcaatgacaattggtattttgagacttcag

SEQ ID NO: 17222 - DNA, 629 bp, Glycine max
  unsure (1)..(629): unsure at all n locations
  Clone ID: PAT_MRT3847_115557C.1
ccggtnccggaatactcccgggtcnacccacgccgtccgtctagtgcatttatgggtcttnctncagaaatggggttcttctcggnaggagaaaaccatgcttactaaaacttgatgggtccctgcagccatagatccgccacggcagaaggcatgttggatttttgccaaccgccataggaaatatatgaaaggaggcccaccatggcgtgtttatatggcagaatttcaaccttctgccattgctaaccctgcattaccttaagcacttgtctggaggattttagccgtaacaggcttggaggacctgaatttcttagatgttagtgtcttgtattgtatttaggaagttcaataaaaaaggaagaatcaaatgctaacatatgctattttgatgattcctgggattttggatatcgagcaatatttttagttaacgtggatagttgaaatacggtgacttgtggtcatttcatgtatcgaacagatttggatctggtattggatgatggatccagttgagaagtgttttttttccttgtcttgagcagattagtatangagaatagatctgatgtttgtcattttacttgaagctggcaaagcatggtggtacaactaactgcttt

SEQ ID NO: 17223 - DNA, 894 bp, Glycine max
  Clone ID: PAT_MRT3847_115558C.1
gggccacacaaaaaaagagacatcaatatgtcatacgttctagttcatgtatgcacctgaaataatgctccaggtggactagtgtgaatgcttaaaaagaaagaggaaaacatctattttttagttgttgatttgtatactttactatctgatccatattggtatgcttacatcacctgagtgttgttaatagcagccatagatccgccacggcagaaaggcatgttggatttttgccaaccgccataggaaatatatgaaaggaggcccaccatggcgtgtttatatggcagaatttcaaccttctgccattgctaaccctgcattaccttaagcacttgtctggaggattttagccgtaacaggcttggaggacctgaatttcttagatgttagtgtcttgtattgtatttaggaagttcaataaaaaaggaagaatcaaatgctaacatatgctattttgatgattcctgggattttggatatcgagcaatatttttagttaacgtggatagttgaaatacggtgacttgtggtatgtattttctttttgcccacttttcatctgtagctttgattgaatgcaaaactgaatcacccctaatttgtaactcattttgccaggtcatttcatgtatcgaacagatttggatctggtattggatgatggatccagttgagaagtgttttttttccttgtcttgagcagattagtatagagaatagatctgatgtttgtcattttactgaagctggcaaagcatggtggtacaactaactgctttgttattctgttctcaaacattctgccacttttcgagtagtttgctatttgcacctataattaaacgaaatattgtagaattcctatgaaagagtgactttttatcgttc

SEQ ID NO: 17224 - DNA, 442 bp, Glycine max
  unsure (1)..(442): unsure at all n locations
  Clone ID: PAT_MRT3847_115559C.1
tattatcacacgagagggctgatgacaccaataatcatgagggctgtgcccacaagctggtgcatgttggggtgattcaggactaagttgccttgccattttcacaagaggtactcattacagttgggtgcagttaggtgcggactacaacaacgctgttgggtggagggcggccatatcagtatggtatgctgcatgagcggtcaatgagtacaataccaggagagtctgtcattgatgctatgccgcctgccatacacaataggtgtgcgaatgggctgaatcatggtccattagggtcactgctttggggcacactcctgcacaccatactgcatcgtaccgattgagattacaatggatcagagcggacaccatcgtattttgaggctaggacgcacagtcttggcaatgttttattgaccttctcggnggaggaatt

SEQ ID NO: 17225 - DNA, 277 bp, Glycine max
  Clone ID: PAT_MRT3847_11555C.1
cgttgccattctcatcctcttctttctctctctaccattgccatggatccctacaagcaccggccatccagcgccttcaattctcccttctgggacacaaattccggtgctcctaattggaacaacaactcctccttaaccgttggggccagaagtccaattctgctggaagattatcaacctgtggagaagcctgcaaattttgatagggaacgtttcccaaaacgtgttgttcaaggcaagggggctagttcaaaaggtttccttgaagtcaccc

SEQ ID NO: 17226 - DNA, 448 bp, Glycine max
  Clone ID: PAT_MRT3847_115560C.1
ggggcacaaaaaaaaatatatccccatttttaacttttttttacagcccttgacttaaacaaagggggggggggggttacaacctttccccaccgggggcaagagttccccctcaaaacctggttcattggccccggccccttgggggaacttttcttttttgggggggacccgggccaggggccttgggttttttagcaaaagaaggggggggggaaacaccacccctcaggggttttaaaccaatcccggttccggacccggggaaatcccgaaataaaagaccccgaccgggttaagggaatccccctaatccgggagggacccgcctttctgaatgatcccgggaaagggtccttttttttgaacatggggggccttagggggggtcccaacctccctcgaaaaatgaaaaagatttgccccgggggggacccttgggggcccc

SEQ ID NO: 17227 - DNA, 3862 bp, Glycine max
  Clone ID: PAT_MRT3847_115561C.1
aaacatttaacaccacctcagccagaaaaacaggccaaaaatgtggtattaatatacagaacagaactattatgtgacacataaatctaaaaacaaaattaaagaagtaagtaaatgtgtgcatgtttttgttttggatggtaagttgtgggcgtctaatattctctctctaagcaaagagacgtagaagtagccacttgaaactggacgaggaatttgacacttttccaacaacaaagccttcagatattgtgagaatgaggtatgacagatagcggagtgtggcgcgtagtgttatttctttgattggggatggactacccgaggggagagggcgcaggccctactaacctcatgccaaaccagggggaaatgtatgctcgtcctcttctcactccccggagacaggcacatgaaggaaggggccaccaaaccaaacccaatagcatatgccatttctctctgtaacaaaagtttctgtcttcacactccaaatgagaagcatatctcatcaccaatcatcactgctacaagtgcttactcgtctccctgccctgccatgccttcacattcacttgcactctttaattgaatttggtgaatgatgaacagactggtggtagaagttgtggaggctagcgacctgatgcccaaagatggggaagggtcagctagcccctttgtagaggtaaagttggatgagcagcagcacagcactgaaacgaagcacaaagacctgaatccttgttggaatgaaaagcttgtgttcaacatcaataaccccagagatcttgcgcacaagacaattgaggtggttgtatacaatcaatcacaacgatcggaaccacaataacttccttggaagggtgagactttcaggcgcctctatccctctatcggagtcccaggctcgtgtggaacgctacccacttgagaaacgtggcctcttctcaaatatcaggggagatattgctctcagatgttatgcggtgcatgatcatgctgatgctgaggaacaccatcacccccaagtagacactcctgctgctgaggaggcgtatcagggcactccctttcaagaaataaaccccaacatcaacatggtgctagatgaggaaagcgcggttggtggcggggacaagaataagaaaaagaagatgcaaaagaaagaaaaggaagtcaggactttttactctattccagcagcacccgcgatggaaacgacccaaaggagggttgattttgcaaaagctgggccacccaatgtaatgttaatgcagcagatcccaaagcaaaaccctgagtattcattggtggagacaagtccaccactggcggctcgtttgcgctatagaggaggccgggacaagatatccaccacctacgacttagtggaacagatgaattacttgtacgtcaatgttgtcaaggctagggatctccctgttaaggatatcactggtagccttgacccttatgtggaagtcaagcttggtaactacaagggcctcaccaagcacttggacaagaaccagaaccctgtctggaagcaaatctttgccttctccaaggacaggttgcagtccaatttgcttgaagtcaccgtcaaggataaggacattggcaaggatgattttgtggggagagttatgtttgatctcaccgaggttcctctgcgggtaccccctgacagccccttggctcctcactggtacagactgcaggtccagaagggccaaaaaattcataataacggggaaatcatgcttgcggtttggatgggaactcaagcggatgagtccttcccggaggcctggcactctgatgctcacaacgttagtcactccaacctttcaaacacccgctcaaaggtctacttctcccccaagctttactatcttagagttcaagtaatcgaggctcaggatctcgttccttccgaaaaaggaaggccccctgactcccttgttagagtgcagctagggaatcagatgagattcacccggccttctcaaattagaggcaccaaccctgtttggaatgacgagcttatgtttgtggccgccgagccatttgaggattttatcattgtcactgttgaggacaaagttggtcctaatgttgaaatcttaggaagggagatcatatccgtcagaagtgttcttcccagacacgagtccagcaagaagctccccgattctcgttggttcaatttacacaggcccaatgcggttggcgaggaagaaacacagaaaaagaaggagaaattctcaagcaagattcacctccgagtgtgtcttgaggccggctaccacgtgcttgatgagtccacgcatttcagcagtgatcttcagccatcctccaaacatttgaggaagaaaaacattggaattctcgaacttgggatcctgagtgcccgcaatttgctgcccatgaaggccagggaagggaggactactgatgcatactgtgtggccaagtatggcaacaaatgggttcgaaccagaactctgcttgatactctctcccctcgatggaatgagcaatatacctgggaggttcatgatccgtgcactgtcatcacagttggggtttttgacaaccaccacatcaatgggagcagtgatgccagagatcagagaattggaaaggtgagaatcaggttgtcaactctggagactgatagggtgtatactcatttttatcctctgctggttctccaacccaatggcctgaagaagaatggagagcttcacttggcagtgagattcacttgcaccgcatgggttaacatggtagcccagtatggtaggcctttactgcccaaaatgcattatgtccaaccaatacccgtcaggcacatagattggctccgccaccaggccatgcagattgtggcagctcgcctatctagagccgagccaccccttaggcgtgaagcagttgagtacatgctcgacgttgactaccacatgtggagtctaaggagaagcaaagccaactttcaacgcataatgtcactcctcaaaggagttacagctatttgcaaatggtttgatgacatctgtacctggagaaacccaatcacaacctgccttgttcacgtcttgttcttgatactggtttgctacccggaattgatactgcccaccatttttctttacttgtttgtaattggtatttggaattaccggttcaggccaaggcatccaccccacatggatgctaggctttcacaagcagaagctgctcacccagatgaactggacgaggaatttgacacttttccaacaacaaaaccttcagatattgtgagaatgaggtatgacagattgcggagtgtggcaggtagagtgcagactgtggttggagatttggctactcaaggagaaagagctcaagccatacttggttggagagactccagagctacatccatcttcatcatcttctcactcatttgggctgttttcatttacattactcccttccaagtcgttgcaattctagttggcctctatatgctacgtcatcctcggtttaggagcaagatgccatcggtaccagttaatttcttcaagagattgccttccaaatcagatatgctgatatgatgacccgcttctgtttctcttttctttttatccatcatccaccacctaataacgtatgaataaacacaccttcaccattacaacacgtaaattaaagagggtacatcaaatatgtgcacatacatagtacccctccaatttcattagcaaaaacacactttcattgtatgaaagtatatatgtaaatcccaaagcttcagtttcagctatgaaaataaatattcttcgtgctcgtaacagctttattt

SEQ ID NO: 17228 - DNA, 552 bp, Glycine max
  Clone ID: PAT_MRT3847_115562C.1
cgcgagctaagcatgggctcgagtacggctgcgagaagacgacagaagggtcctccacaaaattgtttaaccattaaaaaatattttatatgagtgaaaagataaaatacgacacactaaagataaattaagaacctaaattaaattatattattatggtaaaaactagctactattcttaaatcctgtgacaataaaagatttatttaaaaaaagttaattaatacttacattaaagatacattaacgacgagaaaaaagagggtttacgacattattatattatggcaaatgctaattaaagaactatgaagaattttttttattaaaatgcgaaaatatgtgttatcctataattttaaaatgcactctcatatatttttaacagaatttttaatcttttaactgataccctaataacactaatgagtcatacccttacattataatttgtaattctttcaacttctaacaagccgcaaattactttgaaatgaaacaaaaccaataatattaaattccaggctattacatccacaaattgttgggtcg

SEQ ID NO: 17229 - DNA, 436 bp, Glycine max
  Clone ID: PAT_MRT3847_115563C.1
aagttcggaatttggctcttgcaaagtttctgtcttcacactccaaatgagaagcatatctcatcaccaatcaccaccgctaccagtgtcttcacttgcactcttttatttaatttagtgaatgatgaacaagctggtggtagaagttgtggaggcgagcgacctcatgcccaaagatggggaagggtcagctagcccctttgtagaggtcaagttcgatgagcagcagcacagcactgaaacgaggcacaaagacctgaatccttgttggaatgaaaagcttgtgttcaacatcaataaccccagagatcttgcccacaagacaattgaggtggttgtatacaataacaatcacaatgatcggaaccacaataacttccttggaagggtgagactttcaggctcctcaatccctctatcggagtcccaggccagt

SEQ ID NO: 17230 - DNA, 604 bp, Glycine max
  Clone ID: PAT_MRT3847_115564C.1
cccacgcgtccgaatagcatatgccatttctctctgaacaaaagtttctgtcttcacactccaaatgagaagcatatctcatcaccaatcatcactgctacagcttactcgtctccctgccctgccagtgccttcacactgaaacaaagcacaaagacctgaacttcacttgcactctttagatcataattgaattgaatttgttgatgatgaacagactggtggtagaagttgtggaggctagcgacctgatgcccaaagatggggaagggtcagctagcccctttgtagaggtaaagttggatgagcagcagcacagtccttgttggaatgaaaagtttgtgttcaacatcaataaccccagagatcttgcgcacaagacaattgaagtggttgtatacaatcacaacgatgggaaccacaataacttcctcggaagggtgagactttcaggcgcctctatccctctatcggagtcccaggctcgtgtggaacgctacccacttgagaaacgtggcctcttctcaaacatcaagggagatattgctctcagatgttatgcggtgcatgaacatgcttgagctgaggaacaacatcaccccca

SEQ ID NO: 17231 - DNA, 466 bp, Glycine max
  Clone ID: PAT_MRT3847_115565C.1
ataaattcataataacggggaaatcatgcttgcggtttggatgggaactcaagcggatgagtccttcccggaggcctggcactctgatgctcacaacgttagtcactccaacctttgagcgggtgttcgaaaggttggagcgactaacgctgtgagcacccgctcaaaggtctacttctcccccaagctttactatcttagaggtcaagtcatcgaggctcaggatctcgttccttccgaaaaaggaaggccccctgactcccttgttagagtgcagctagggaatcagatgagattcacccggccttctcaaattagaggcaccaaccctgtttggaatgacgagcttatgtttgtggccgccgagccatttgaggattttatcattgtcactgttgaggacacagttggggctcatggtgaaatcttaggaagggagatcatattcgtcagatgtgttcttccc

SEQ ID NO: 17232 - DNA, 294 bp, Glycine max
  Clone ID: PAT_MRT3847_115566C.1
ttttgatgccaaggagcgggcagcagccaaagacaagtatcagctagcatcaggacagaacggtgtccaagtacctgtatcacagccgcctacgcccacctagtggccagtcccagagccgcatggcagacagcttaaatgacttcaggagagccctgggcctgtgctggctgctccttccctgccaccgctgctgcttctgactttgcctctgtcctgcctggtgtggagggctctgtctgttgctgaggaccaaggaggagaagagacctttgctgccccatcatgggggct

SEQ ID NO: 17233 - DNA, 600 bp, Glycine max
  Clone ID: PAT_MRT3847_115567C.1
gttggagagactccagagctacatctcaagtatggcttgagctctttctccttgagtagccaaatattcaaccacagtctgcactctacctgccacactacggaatctgtcatacctcattctcacaatatctgaaggagaaagagctcaagccctacttggttggagagactccatagctacatccatcttgatcatcttctcactcatttgggctgctttcatttacattactcccttccaagtcgccgcaatactagttggcctctatatgctacgttatcctcggtttaggagctagatgccatcggtaccagattatttcttcaagagattgccttccaaatcagatatgctgatctgaggacccgcttctgaatctcttttctttctatccatcatgcaccacctaatagcgtatgaataaacacaccttcaccattacaacacggaaattaaagagggtacattaaatatgtgcacatacatattacccctccaatttcattatcaaaaacacacttctcctgtatgaaagtatatatggtaatgccaaagcttccctttcagctatgaaaataaatattcttcgtgctaaaa

SEQ ID NO: 17234 - DNA, 347 bp, Glycine max
  unsure (1)..(347): unsure at all n locations
  Clone ID: PAT_MRT3847_115568C.1
tttctattttttttttttttttttttttttgctataaatcatgaattaaaacnnncaaataatgaagaattattaacttctgtaagccctcttttgaaacaattaatggataagctaattcgttaaataaaatcaagttggggaaagaaaattttagaattacattgtgaaagctaactacatccttcacctcaaaaacacagactcctcgggaaaaactcggcctggcacgcatgtagaaagggaaacctactacgggttactttcaaatccttttagcgtcttacaggcggttacttattccagctttataccgttctttttattgttcaccctcttaagcttgt

SEQ ID NO: 17235 - DNA, 187 bp, Glycine max
  unsure (1)..(187): unsure at all n locations
  Clone ID: PAT_MRT3847_115569C.1
ggctcgagcaaggatgtcatatggnatttactttttttcaactcctcagcacatccgcatggtgtaataagaagatggctttcacaactgcaccataattgcaagaggttgtctaaatgccatacttttcttaggagtggtcttgtgaccgctcttgttcttttcaaaagtttcaaattattattaa

SEQ ID NO: 17236 - DNA, 328 bp, Glycine max
  Clone ID: PAT_MRT3847_11556C.1
aaaaaaggaaaagggggccctttttccccggggggaaaaatttccatttgttcatgaaaagaagggggtttttttttaaaaactttaaccggaggggggggacccccggcccctttttttaaaaaatttttttttttaaaccccccattggcttaggtccccaaaaaaataaaaaacctttgaaaccgtttcactttgggctttggccggggcccccaattttaaaaaactttccaaaaatttccttgcccaaaagcggcccgttaaacttatcttttttaatttgaaagaccttttattaaatcgggggggcgttttgaccgggggg

SEQ ID NO: 17237 - DNA, 321 bp, Glycine max
  Clone ID: PAT_MRT3847_115570C.1
actcgagccgaatcggctcgaggttgaatatttgtgaattgcggatcaccacacgaccatttccttctcgctttgttgccttcttggcatcttttcttgctacaatcattttttcaatcaaccttctcttcctcaacgcacttcaattcttcctttttcgcgtacgttggagtcttggagcgaaccttcaattcaattcttcctagcgggttttctaactaggtggtggttcttgttaaaagctgccatctgggttctgctaccgttgatgtctttggacattgggggggtctccaattgcaaaaacatgggttttgatga

SEQ ID NO: 17238 - DNA, 873 bp, Glycine max
  Clone ID: PAT_MRT3847_115571C.1
gaagcaacgaaaaaagctatctggggtttgttcatctccaaaattcctcactccaaatccaaatacttgccagccacatattagccatatatctatggcggggtccaaaatagtgtttcgtgagtacacaagtgatgactcattcacaaagctaactgacatccctaaagatgtgagtgaaatccaagtagctctgacctttgccagagactatgatggggtggggtcaacccaaggaaagttcataccttactgggacacagcaatagtgaatcccgatgtgatagccaatttcaagagcaagtatccctctgccaaagtgttggttagcattgggaacaacaagaggcacttccccttcaaaattgatgaggatagagtaacagcatggattaatgctgccactgaatcgctcacacgcatcatcaaggagtacaaccttgatggaattgatgtttactatgaggacattgaggtcagcaacccggctatctttgttcattgcattggggaacttataaagaccctaaagctcaacaaagtcatcactagggcttccatatctcccaatattgaaatcaatgacaacctcgtaccggtccttggcacctaaattttgaagatcattttgattatgttaatctttttctctcagtggtggagaatcttacaggcaacactaaccaagaagaggtgttggagaaacttaaacccacattcaaccaatatccccccactaaacgtttgcttggctacagcagcatgcgcccaccacccatcttctttgtcggtagcaaaattcttctgtctcacagtgtcattaatggcatatcacttaaggttactaggttctcaatcacctactttccccca

SEQ ID NO: 17239 - DNA, 589 bp, Glycine max
  unsure (1)..(589): unsure at all n locations
  Clone ID: PAT_MRT3847_115572C.1
ttggattcttttcagaatggataatgatttctctcccccagccgactgtgtgggggccctccaaatttctgggagacttagatgttgtttgactttttgggtgggtttttggaataaataaatgagaagggttcctttctttttttgggtttttaaacttgggcttccagaattgtttcggcccccgggcgaactggttactttggtggccttggcttggcttaaccttgggggtggccaccacaaatttttgccttagcccccttcaagctgcctttcaggtggtgggtgcctttccagggaattacctttggcttggagggaaggcttttaaaccaggttcttggaccttctttgccgcttcccaaagcctttttggtggggccagtgggaagaccctgggatgggaaaatctgggtgatttgggattttgccagccaagatccaggaatggccaatggaagccccaaccttttgcttaagccagaatgggaaatggtttttaaaatggccagtgcttccccagggnaccccgtacttagaaaaaaaatgaagtttattccttaagcaagaaaagggcttaccattt

SEQ ID NO: 17240 - DNA, 232 bp, Glycine max
  Clone ID: PAT_MRT3847_115573C.1
acacagactatgaaaaagggagaatgaacagcgggtagcatcttttttctgaatcagctcttttttataccctcagttagctctcatagagctattgactctttcagcagcttactaattaacactcattacattcgacgtgtttggctgcttcactcggttgctgtatgtcattctcactaaaaagctccatctcatctcacattcacttaatttctggtaggattatcgc

SEQ ID NO: 17241 - DNA, 488 bp, Glycine max
  Clone ID: PAT_MRT3847_115574C.1
ttttttttttttttctatcaggttaactttataacccttaagagctacgttaaattgacaacccatacattttgaatgcagtttataacatgggtggtacgataatggataatctaataaatctaacatctgttaaaataaattctgatactatattaaaatatgaatttagttttaatttaatttaaaaactaactcaaaataaaaatgttgtttacttatataatattttaactatatcacttattattatgatatctcaattttttttttcttaaatactctatcagttcccaaattattaatgttaattaagatttttcacacagataaaataataagtatcttaagagagttaatatttatttggagacaattttaatgaaatatctttgttcattctcttaattttaataaatgtttgaatatttattaaaaagtaaaagcattaatcaatttttattttttcaaagattaaaactacattt

SEQ ID NO: 17242 - DNA, 258 bp, Glycine max
  Clone ID: PAT_MRT3847_115575C.1
ttgaaaataatgcacaggatgctactgattgttcgtctcactaaggagcacactttcctggtcggttcactgctattgcagagaatactaagttccaaacgatattaccgtccactgagcagatgacaggtctcaatcatctattacatggagccaagcagcatcacaatgtgacaaatgtatatgtatggcatgcactagctaggtattgatgtggagtgataaccagcatcatccagcatggaacattatgacact

SEQ ID NO: 17243 - DNA, 144 bp, Glycine max
  Clone ID: PAT_MRT3847_115576C.1
tagaggagtcaaactttgggaaagaggtgttaacacatgtctttagattacaatgaacagtgcttatactagatgaatggatggatcttgaactctttacggggtcataagaaaacagaaaactggtctaagagagagtgggtt

SEQ ID NO: 17244 - DNA, 233 bp, Glycine max
  Clone ID: PAT_MRT3847_115577C.1
ggctcgaggaagaatagaaacatatctagctaaaatctttgtgcttgcgcagttaactaccttcaaattgcttatctacgttaccataattatggtgcacttttctgaagattgttaatgacttacattaatgtaccttattttatgaatttataggatcctgtatgtatgatctatgcgtatcgaaatcttatgataccattgtttcacattcttgtagaatgcataatcca

SEQ ID NO: 17245 - DNA, 1296 bp, Glycine max
  Clone ID: PAT_MRT3847_115578C.1
cacgcgtccgatagcagtggcgttctctcttctcctgcgaatctttttcttcttcttctcttcaaaccctaaatcgtggcctcgtaaattaaccaccaaagtgatcgaactcaataccctaaaagccatggcccaatcccatggatccatcctcactcgatcagtgtggtcctccaatctcgaatcggagttcgacttaatccgatccgtcatcgattcgttccctctcatctcgatggacaccgagttccccggtgtcgtcgtgcgtcccgacgccggcgacccctccttccgccaccgccaacccgtcgcgcactacgccgtactcaaagccaacgtcgaccgcctccacctgattcagatcggccttaccctttccgacaacgccggaaaccttcccaccctcggcacctccaacgccttcatctgggaattcaacttcaaagatttcgacgtcgcgcgtgacgcccacgctcacgactctgtggagttgctgcgccgccagggcatcgatttcgagaagaatcgcgatttcgggattgactcgttccggttcgcggagctcatgatgtcgtccggtctggtctgcgacgacgccgttagttgggtgacttttcacagcgcctatgatttcggatatttggtgaaattgatgacacatcgcacattgccagaagaattaagagagtttctgcgtctggtgagggtgtttttcggagacagagtctttgatgtgaagcatttgatgaggttctgctcaaacctgcacggtggattggaccgtgtttgtcagtcgctgaaggtggaacgtgttattggaaaaagtcatcaggctggttctgatagtttgctcactctgcacgcgtttcagaatatcagagagaattactttgacaaggctgacggacttgttcagtacgctggtgtcttgtatggtttggaggttttctgagctttcttatatatgaaataatagtaatcaatttggcctaggtttcttttctcagctttaaattgtaaagcttacacattttctctggcttatcaatatccattaggaattattaattctttgggttctatttgcacctgcgaaagatagtaatgtatgaggaggcaatgcatttgttgacttagagcgtgttaatatatagaattagaggataatgtttttaagttatcaacagagtgaaaattttctatctcccacctagcctatctacaattgtcaggaaagaggttttaatattgaatagaaatgatttccgttcaacaagttcctgatccataatttat

SEQ ID NO: 17246 - DNA, 580 bp, Glycine max
  unsure (1)..(580): unsure at all n locations
  Clone ID: PAT_MRT3847_115579C.1
aattcggctcgagactagttctagatcgcgggcggccgcccgcgatctagaacggctcgagatcagttttataggttttggtggctgaaaccctgttcgggaattcagtggctatggctgcaaatgaagatgctgtacaggaatttacaccaaagaagaagccaccttcagaggatgagaagaggaagaagaaaattgtgcctgggagtttaatgaaagctttgatgaggcctggtgggggtgatgctggaccttctgatggtgaccagattatctatcactgcacaattcggactttggatggagtacttgtggaatctaccagatcagattatggaggcaagggcatcccaataagacatgttttgggcaaaagcaagatgttattgggattgctagaaggaattccatcaatgttgaaaggcgaagtggcaatgttcaagatgaagcctcagttgcattatggggaggatgattgtcctgtttctgctcctgatggttttctaaggatgatgaacttcattttgaaattgagctgatagaatttttcaagccaaggttgntactgatgnnattggga

SEQ ID NO: 17247 - DNA, 374 bp, Glycine max
  Clone ID: PAT_MRT3847_11557C.1
ctcgagccgaatcggctcgagaaatcaaacttacttgaaaatacttccccttttccaacattcaataccttggtttctgtactgctctttaaaaactgaatttatataatttgcttacaaaaaagtatttccaataacatcacatccatcattaactaatgaagaaactttgattttctagtgaggaggagttctttctactttattagcctctcagcactttatagaagtgtctaacttgtaacttatacaagagatgcagtgagaagaaagatatgagatcccctaataagtaactcattcctatgagaatgcagtctgatgtacccacaataaaaccttgcactttatgttgagttgatgaggactggatt

SEQ ID NO: 17248 - DNA, 326 bp, Glycine max
  unsure (1)..(326): unsure at all n locations
  Clone ID: PAT_MRT3847_115580C.1
tgtnggtncnaggtactatnncnttatcaagananacgataaatnctgnnggagggacagtaccaactgacgcanatcattccntntctnttcggatnctcacagncgccgctcanggggtgncgcngttngnanttcggcgctncncctctgcttcgatntcncanttngccgatactgagnaagtaaagncnttaatgatggtcgaantctctggtagtaagacttgtggcactttggctctgntntggncgttgatgaaggtgacatctcngatgnagcggtttcgtngagtgaaatctgttntgaagagnaagctgtgtnan

SEQ ID NO: 17249 - DNA, 382 bp, Glycine max
  Clone ID: PAT_MRT3847_115581C.1
cccttcggaaaaaccaacaaaggcgggaaaaaccctcaaaatagaaaagggtttttgaatgaaaaaccatcccgcaatctttaggcccacccaattcgaaaaattttctatttaaatcccagggcaagcccatgttactaaacaaaaaaaaaatctgggggaatcagggcgggttttcttcacgggagcttccttccaagggttccgggggaaaagccaccctaatccaaaatttccccctgcccccggggtttaatgaatcaaccgttgcccataggcggaaatccttcctccctaaaatccaaatcttgatttaaaaaaaggggttgggggggggggagcaaaggatgttggcccataggaaaacgaggggggggaaaaa

SEQ ID NO: 17250 - DNA, 239 bp, Glycine max
  Clone ID: PAT_MRT3847_115582C.1
tggggtaataacactcacgtgacactgctaccagagtgagagaaattggctgcggcggtcgcggcggggtacagtggacttactccggataaatggcagtttcagtgatgcgcaaccgcattaacgaccacgactatgaattacaccaccacccccttttctactaccatcgtgccttccaagaagacccctatgctcccccacacgtccttgacctccccgcttccgctcatccacgc

SEQ ID NO: 17251 - DNA, 253 bp, Glycine max
  unsure (1)..(253): unsure at all n locations
  Clone ID: PAT_MRT3847_115583C.1
gacctctctccactctttttcagagacanatttcccttattntctcccatnaanaaaaattaacncaaccccacttnacactnaccaaacaancccgctancncagatcaaccttctttcagacatagcgaagaaacanaacacngttcatcatgtacaagtnnccagcaccatgtatttacgcantctccttcacnatnctnganaaagaaaaagnagananggcnctgccntncgncntcttcatntnnaa

SEQ ID NO: 17252 - DNA, 142 bp, Glycine max
  Clone ID: PAT_MRT3847_115584C.1
gggcaacacaacaccttcatagcaccaactcatctttgtatgcgttatataaggtcccaattcccaaattaaactgattccttactactacatgctgtgctggggtgatacctcttcatacaaacaaaactcttcccacatc

SEQ ID NO: 17253 - DNA, 427 bp, Glycine max
  Clone ID: PAT_MRT3847_115585C.1
ttccaaggccgtcatcactgtatgacgtcctccttctttgggggggggggggggaaaacaaaactccagagactaggacagataacggctaccaacgtaacggatagcgaaaatgaggacgagcgagtagagcgagcagaagcgcagagctttatacctaggcgaaggaacgtttgtggtttgaggggaaaggcgtatagaataggagaagtatgcggggagtctgaacacgtacctgcgtaacagcggcgaaacgaatgttacgtaagacgttcgtcgaattataaatacgtatacatgcgttttgcggcgtcggatcacgtaatggtagttagcgttgttatggtacaacttcttcttcttcaggtaggtcacgtagttattacgttcattgccttcttacgttttaatttaagcagtatcttgg

SEQ ID NO: 17254 - DNA, 374 bp, Glycine max
  Clone ID: PAT_MRT3847_115586C.1
acagaaccaatcttacaccagacattacttattttatctttgacacttcaacaatgtttaaaaccttcaaatacatcatactctttggtagagattccgctggttattcggcgaggcagtttgccaaacaaggcgttaaaccatggtagttggctatcatttctaaagaagcggtagcaccttatgaacaaccttctctcaacaatgcttacctttttccacagtcccctgctaaactttctcttttccatgtctgtctttcaaattgatgacaaaggtttcttcctcattcgtacacacagaaaaggatagtattaattcttatcacacaaatagttaatgtataccttcctgcaaaatctcttatcattgct

SEQ ID NO: 17255 - DNA, 664 bp, Glycine max
  unsure (1)..(664): unsure at all n locations
  Clone ID: PAT_MRT3847_115587C.1
atacnnntttaatgctcttagatccccggccacaaccatagacctgtctttcatttccatacaaatctaggtacatatatatatgacttaaagagagaaggaggtaattaaccaagtaaggggaagctactgcttaattactacacatacttatatatagacagtgtgaaaatacactgcaagctccaccatatgctaatagaaatgggttaagtgcatgtttcattctgtttatcttgaaaaaataactattttttttaaatcctagaaatgtatactactaaaaattaataaatcagtgatcaaatttagtgatagaaaattacttttccttcaccagttaatttcgggatcactaaattttagtaacggaatttttttttaaacatatatagatcattccgttactaattttaatttttctagtagtaacataaaatataaaaccattatttttcctagataaaataaatcaaaacatgcactaggtttttagtaagttcatggcacttgtttgccagggaatgatggtagtaggtcttgcaacaaaccatagtcacgagnnnnntggaactgctgctgctgttgnnnctggggatggagattatgggaannnnnnnggttaaacattggattttggtgatcannttnnctataacnnnga

SEQ ID NO: 17256 - DNA, 711 bp, Glycine max
  Clone ID: PAT_MRT3847_115588C.1
tatatatggaggtgtaggtccactgcattcagatgttaccatagcaggcattgcaaaagcttttggtgttcgtttggctcctgatgaagaatttgaagaatatctcaggcatattattggtgatcagtgtactggtgaccgaaatgagatggctcaattgcctgagggcataactgaattgtggcatcatgacaaattgtctgtgcccttgatcaagtgcgaaaatgtaataattcttagtgcaacaaatgttccggagatggaaaagcagtgggactgttggattgaattagcaaaatctagtgacctactagcattgctggaaccatatgtatcaaagcatgtgacaactaatctttcagatgttgaaattgctcaacctctgtcaaagctttgccttgaatttccagatctttatattggctgttaccgcaatgccagatatggatctcttatagtaagcttcaaaggaaaggacctaacacgcattgaatcagctataaaagctttacaaaagaaatttcaacccagtgctttcattgagacgaaataggatgatgttctaaatgctatggtccatttcttttggatgccaacagaatgaaaacctttcatggctggggtcatatcattctcatattacctacaaatataagatgcattgggataaagatggagagggaagaaaatcaaggtgctgctgtattggta

SEQ ID NO: 17257 - DNA, 2645 bp, Glycine max
  Clone ID: PAT_MRT3847_115589C.1
cggctgcgagaagaccacagaagggatatgtgtagaagatctttgcatcctcactggccttgggacatttcttcccttaactgaagctcttgttgggctcggttgcctctcgaaggaatatgatctttgttttggtgcactatgtgatttgactttggcccttcatgattcagtgttagctatgtaatttgggaacaaaagatagtcatagggcatagattctacataaactggcctagggaaagcaaaataaatgttttttaacgagaaggggtatggttttccctaaactacgttattgcactggccaaattatgcctcagtgttgaatggttaaaatattcagtaaaatggttaatacaccagatggcctacttcttgctaactataaagcaatattttaatcaacaaaatcggatatatagcagccaaagctgatgatgcagttcgccctgctaaataaagttttaaatgatggattttcaatgaaaaaacctgtatagtatatacttgtaaagtggtgatgtaagttgagataattcaataataattctataataatctataggttgtccatgcccccatgaagcagttaaaagtgctgtggcaatagaattgaagattcagtcacctccttgtaccattgttctttcttctagcaacacagcagcaccttgttttctgccctctccatctttatcccaatgcatcttatatttgtagataatatgagaatgatatgatcccagccatgaaaggttttcattctgttggcatccaaaagaaatggaccatagcatttagaacatcatcctagttcatctcaacgaaagcactgggttgaaatttcttttgtaatgcttttatagctgattcaatgcgtgttaggtcctttcctttgaagcttactataagagatccatatctggcattgcggtaacagccaatataaagatctggaaattcaaggcaaagcattgatagaggttgagcaatttcaacatctgacagattagttgtcacgtcctttgatacatatggttccagcaatgctagtagatcactagattttgctaattcaatccaacagtaaccacagctctaacagctcgtatacaattgttgccctaatcattattagatattcatacctgagcaggaccaatgacaacttgtaattataccaaaatcacatacagaaaaccggcttgaaaatatgaaacttattacaaatcaatacaacattttgtacatgcaaccagacagaggaaacgccaagccataacacattgtaactcaatttgatcttttgcctttgtatgacactatggacatgttaaaacaagaaacaagaaaatgttaattgtatcagggtttttataaggtattcacttaaagagagccagcatgttgtgcaatcttgctttcaagtgtacttttgtctgccccgaccacactgtcaacctctttgccattcttaacaaagaaaaatgtcggaacactgctaatattccaacctgcagcaacgtccctggcctcatctatgtcaactttcaaaaaaaccacttttgggtacttttcagccaagcttgtataaataggggaaatgaagcgacaagggccacaccatgttgcagtaaaatacaggatcgccaagcgtgatgtctttgatgcagcacttaacttcttttccaattcaccactagagtgaatacccatgacttgcccatcttttaaagcagataatgctgcttgtacttgggcttcagtttcttgctccttcttaataggagcttcagtcttgataggagctcttttctgttgcttttgctttcattaagcgttcatattttctcctatgctcctcgattttaagggcattaggttcaacctttttaagtgccatactaatctcttcatcgtaatctaactttgaagccacgtgaaggtcacttgctgcttcttcccatagtcccaacatagcccttgacattcctcgtattttgtagcctttagctgagtctgggttaatcttcaagccagtgtcagcatcacgtatagcagcatttggtttcttcaatttcatatagatgctagctctagtagcataaagtatagctgattgcggattcaacaaaatggcttctgtcagttgggccagtgcttcatccaaattaccttgtgacatagcatcgactgcttttgattttgctagttgtgcagcatccctttgttcttccgttatttcagcagaaggatctcccatcttttgaggagggtcattatcaggttcaacaacatcagcattatccaactctatatcagattctacaatgtcattttgtgcggataaaggaggatctgacttgtcatcaaaatcacctggttccgttttgggttggggagggatgcgagcaccgaggctgagaagataagtcttgaagaatgaaagagatggattgtggagaagtgagggattggacttgcatatctctatgaattgcttcagctctctcaattttccctcctccatgctccctcgctctctcgctcggcctctctaggtcaaactgcaatttagcgtaccgataacttcccaccggggccacattttcgcagacaagtaattattgtgaaaatctaat

SEQ ID NO: 17258 - DNA, 292 bp, Glycine max
  unsure (1)..(292): unsure at all n locations
  Clone ID: PAT_MRT3847_11558C.1
nagngaangtnagcncggaattcggcncnagcannganaggnctacnnncacgatcncacngnnanagcaaaagatggagacganggcgaaggaaaancgctgtngtaangnnaaaangcggcganatcggcnnntggnganaacacgacggngantanggngnangangctcaggannacnacggaacgngaagacgcnggngaagacanaagcacgggaagangtagcgngacaaaggnnaggaangnaagggcaggtcaanaacagangtaaccncacgataangatan

SEQ ID NO: 17259 - DNA, 353 bp, Glycine max
  unsure (1)..(353): unsure at all n locations
  Clone ID: PAT_MRT3847_115590C.1
cgagagccatagacgcatatatgccattatctttccttttccctttctctttagattatttctttcttttacnaattcctgtcttggtgtgagaatagtgagaaaccatgaatgaggggtgtagtgggataatcacttgaccaattgtacgtagaagtagaatagtcaattttcaagagtgctcatagtgaggagtgtactattagcgtgatacctatctatagtatgttcaggtgtttagaaaccactcacacgtattagaggtgcgttcggtattgtataaatgaagaaaagtggaaccatttgcttcaacaaagtcttgcagtattggagggaaaagctcttatccaatg

SEQ ID NO: 17260 - DNA, 427 bp, Glycine max
  Clone ID: PAT_MRT3847_115591C.1
ccacgctttcgtttttactatcacaatgatttacgacaggtccataacggaatatatggaaatgcaaaaactggatgctcgttcaccagaggggatgtccaaaaaggagataatgctcctaacaggggataaccattggttccagaaaccggtttattcgaacctctcattttgagcacaagcaagacactgactctcaactagacacgctcatactgtgtagactggcaactctgcagtacaccacgataagaagacttcttggctacgaatacaagcacgttgatgacacccgagctgtatccccactcgctgacgtcctcggagacatgcttcacaaagttcttattcagtgcaattgccgcctttgcatcaaagatacttgatctgatatcgaccacaaaagccgtggagaccacatcatctt

SEQ ID NO: 17261 - DNA, 314 bp, Glycine max
  Clone ID: PAT_MRT3847_115592C.1
ttttacacatacctttactctcctcaccacactaattcttctcccgaacgattttaattaaaaaaagtgaattccatctaccaactcctactatcactccaaatttcaataccattttaaactattctacaacctctcaatacacattctcaatcaaaatctaaaatctactctaatatcttataccttcactctctccacaaaatatatttatactacatttcttcattcaacattattattcttaatcttaacattatttcaactccatctattaaatatacaatcctacctgacattactctcaaaactat

SEQ ID NO: 17262 - DNA, 174 bp, Glycine max
  Clone ID: PAT_MRT3847_115593C.1
ctcctggaggcagaagggaaagcgccttaaaaattagaagtaaaaccaaaccctcttggcgggggccttggcttatacaataatacaagtaaggggcaaagccaccctggttgacatgggaaaaaaaatggaatacataaattccaatttctattttttgggattattggaaaa

SEQ ID NO: 17263 - DNA, 247 bp, Glycine max
  unsure (1)..(247): unsure at all n locations
  Clone ID: PAT_MRT3847_115594C.1
gtaaaaagttgtattgaatctctccaaactgcnaccaacttgtggggttaaggctctaaaccttctgtatcagactccacagcgcatgtaaagggtctgaaacctagcagggttttggaggcaattgctccattgactgaaatcatgcttaccttgggaccataggagctggagccggcatggttccacttttggaggcttactaatgtattgttgagtagaagaggtggaactgacgctacgatga

SEQ ID NO: 17264 - DNA, 359 bp, Glycine max
  Clone ID: PAT_MRT3847_115595C.1
aaacttataggtgtcttatagggtatactatagttatattaacaggcaatttaattacaatggccttactgcgacaacactgggactaccataaccttaccctaatcaaacttaatccagttgaaccacatttcgttatctgcagttgtagtaataaggaagagacccataccgattgccaatactaacacatcctcaatgtgaattgggaatcgcactgtacctgcaccttaacatcaaccgctgcgggggttatgctcaccctcaccgctacacttgcaattgccatagcactagcgcctggtgctttcgtttctttctttttcgttacgttcaccggctgtgcctttccaggtcta

SEQ ID NO: 17265 - DNA, 258 bp, Glycine max
  Clone ID: PAT_MRT3847_115596C.1
ggctttttgctcttcttctacctttcaaggtttacaagtatagagatggcagagactcgcctgttaacctcggagtcggcgaacgattggcaccctgacaaactctgcagccggatctccgatgctgtcctcggcgcttgcctcgggcatgccgcagtcagcatagttgcgtgcgagacgtgcaccagaactaacttggtcgtggtcttcgtagaattcacggccaacgccaacgttggctgcgacagagatagtgcg

SEQ ID NO: 17266 - DNA, 262 bp, Glycine max
  Clone ID: PAT_MRT3847_115597C.1
cataaatgttaagcacatcgtaaaatatttaaatattccaacagacattcgtgatgtggtattgggcttaaaaaaaagggactcctaatttttccgggccttctgtgcaacatatgtgccaatagtcaattcctgttggaaggcacaacaatcttcggggaggagaatcctctattgaattacgtttcaatgttacaggacccttccaccatgtgcttgctatcccacaagccaagttctttatctcaggtccctgctacca

SEQ ID NO: 17267 - DNA, 271 bp, Glycine max
  Clone ID: PAT_MRT3847_115598C.1
cggtccggaattcccgttcgaccaggcgtccgacactgaaacgaggcttaccagtgttcactgcgttagcgctggctgcattctgcgcctgacaggtcagataatgactgaggttgatcatgtattgcattagacattgacagatcgtgacttactgacctgatctttcatgacttactcctgaccagcattgaaccttgctttaaaggctcacgcataacttacaccaatgtgatatgtagactaccacttgatataacagttctgctgc

SEQ ID NO: 17268 - DNA, 415 bp, Glycine max
  Clone ID: PAT_MRT3847_115599C.1
ttctgcatattaccttttcgttagagtgagaccaagtcatgtatgtagaataacttcttattacaagtaagatgttttggttttatcacctttataatactaaaatgacattttaaagagtatccaaactacaggcatgtaatggtgtatcaagatgaaggattaacagtagaaaaattgcaggtctgcagcattaggatgaagatggacagcttgtgggtgtcagtacttcaaatctcttaattgcgaactctggcaatgatttacctgtcattgatcttacaagagtgtcacaggagcttgcttaccttgccagcgatgcagatcttgtcatcttagaagggatgggtcgtggaatagaaacaaatctctatgctcaatttaattgtgctacctcgggatgattcaccattcc

SEQ ID NO: 17269 - DNA, 3042 bp, Glycine max
  Clone ID: PAT_MRT3847_11559C.1
ccacgcgtccgctcggctcgtgggtgtacgcagatcttgtgcactccacgctcttcgcacctgctttctgctgttgttcttgcggattggctttgtggggtgtgacaaattgtggtttttctgttgagggtctgaaaggtgtttttttgtgtgtgtgtgtctggaaatgaggtgcttttgctgaagggtgttggtggtggtttttggttttgaagattgtggctgtggaaagggaaggtgcatgtgggatcccaattgggttctatgtttggtgaagaagggtttgggagaagggagaaaaagctgggattgttgtgggtttgtgataatgagcaggggtaggtgggggaaatgtgggtgagactgtgagaataagggtgtaaaaagatttgtttgtttttgaaggagggaaaatttgagaactgggttttgtgaagtttgggcttgatcttcatcccatagggaagttttggagaatttgtgggtgtcaggggaaaatgcagcaagatctgatgatacaggaaaaagaggagatggactttttctccgaatatggtgatgccaaccggtacaaaattcaagaagtcattgggaagggatggtgttgttgtctgtcttcgacccttgatgacaaaaaagatgcaaagatgacatcttcgaacttatgatatctgatgctgcgtgagataaagttgctttctacgacatcctgaaaagcttattgttgaaacacattatgttccgacagtgtggaaatgagccccattatgctctgcctccgtcaaggaaggactttaaagatatttacgttgtttttgagctcatggagtctgatcttcatcaagtcattaaagccaatgatgacttgacaaaagaacactatcagttttttctttaccaattacttcgagcactgaagtaccaccacacagcaagtgtctatcaccgagacttgaagccaaagaatatactggccaatgcaaactgtaaacttaaaatatgtgattttgggttagctagagttgctttcaatgacacaccaacaactgtattttggacggattatgttgctacaaggtggtatagagcaccagaactctgtggatcattttactcaaggtatactccagcaattgacatttggagtataggttgcatatttgctgaagtattaataggaaagcctcttttccctggaaaaaatgttgtccatcagttggatctgatgacagatttgctttgcacaccctgtctggatgcaatatacacgttacacaatgattggttacggagacacctgaccaccatgaataaaaatcaatctataccccaaccactaatgtcatgacacgatcagcaattaacaatataactcaggataaccgagtagccattgggacaaaaaggctgcagtaaaaggctaaacaatatggttgatctagtactactgcgacatagaaaggttggatgtgaacagtatggtaggactatgataaaaatgaagtttgaatttgaaaggagaagagtcacaatggaagacattggatagttaatattgcgtaagcatttggactaccatcatcaattatttaaaaactacttcgatggaacagagagaactaatactcatttttcaagcggctattgctcaattcaaacagcagtcttgctcatcccaaggttaatgttaaaaaaagtgatctaatggtgacattggaatgacttcattcatcacccccaagctctactttggacggtttatgtatcttaccctcgaaagagcaatcaaacattgcgtgctgcatataccgccagacaactgcggaatttaataataattccaggggtacagaaagtcctgcgccaaggactagtccgggtctgcaaaaattttcacaagcaaaacctggaaaagttgttgggccagtgattccatacgaatatgcaagtgttgtcaagggtacatatgatccaaggacatttatgagaggttctgttcttccttctcaacctatcctccctacgaatcattatcaacgatcaacctctggaaaacaagaaaggtcagcaacagaagctgacaagggtgtatctttacaatcaaaacttgctcagcaatgtggtgtgaatgccaaaatagcaccagacacagctatcaatattgacaccaacccttttttcatgacacgagcaggagtgaacaagatagagcaggatgaccgaatagccattgagacaaagttgctgcagtcaaaggctcatcaatatggtgggattagtaccactgctcatagaaaggttggacctgttcagtatggcatgacaaggttgttctagaagaatgttgtcttgtgaatagtttggccaggtggagcaatccttgtggagaataagaaaaggttcttcatagtggagaagtagcagtctctggtggtgctttgtgtaagacgatgatgatgacatgagttagtgcttccccagaaagagccagctttccccgtgcttacctcgtgggcaggggtttccgtgttcaataaactgtacaaccgagcctgagtgacaaacatgctgcagccaaaggcacatcaatatggtggaatcggtgctgcagctggggccactgctcatagaaaagttggtcctgttcagtatggtatgacaagaatgttctagaagaagggtgtttttcttgtgaatattttggccagggggagcaatcctgttagagaaaaagacactttttagggatggagctgttgtagtctctggtgatggtttgtgtaaaaatgagagtgagaggcttaaaggcagtgcttccttagaaaaaagtgtcagctttctctggcctacaaagggtatgaactttggttacaactatcatgagactgttgacgatgaaattgagtcctatcttgtaagtcaatccataaccattttaggtgtttgcagtgaagacacaatcttgaaacagatgtcttggatgtttgtattttaattggattaatggaatttaaaagcctcgcatcctatacctcaacaaaa

SEQ ID NO: 17270 - DNA, 412 bp, Glycine max
  Clone ID: PAT_MRT3847_1155C.1
ttttgttttttttttttttttttttgtctttttttctttttttcttttttttttttttttttaaaccggggaaacgaactgggaacaataaggagcgggaaagggaaatacacagggccccttttttccagggtcggaaattaaccaagaatttaggggacaaccaaaacagccaaactttaaaggggattgaagttacttttatttgccactgccagggataagaaaggcattggcaaattataaggggggaccccaacaaaaaaccccttttaaattaatttgacttaatttgggcgggggcttccccttgaacttattgtgaggtgggcactttttgggaacaattatataaaatattggattgggggttacccaaaaacttggctacgaattgcacctttttgggcct

SEQ ID NO: 17271 - DNA, 231 bp, Glycine max
  Clone ID: PAT_MRT3847_115600C.1
agaaggtcaaaacttactttgcttgccataaattttcttaggccgacggttattccaactctctagcaatgttatctttctagcaatactcaccgacttcgccaacatcccgaaattgtctttcaaaccattgttttttggtggaactccatttttatgtttatttagttgggaataaattttcttgtgacaagctgagagcttatactttaatgggggtaaaataatata

SEQ ID NO: 17272 - DNA, 497 bp, Glycine max
  Clone ID: PAT_MRT3847_115601C.1
accagacaccaataacgcttggagatcggtaaaacaaaattgaaactttattcttccctcaacagtggaacttcgttgggggcattgagatgggtttgccacggtttgggcgtcctaagaatgacggtgaattgagttcgaaccttttcgtggccaattgtgggtccgcagtggggctctctgacgatgacattgcatctgtgttctgcaaatttggagagctgaagggagtttatgcagcagatgagagtgggacacgtgtcattgtagcttatgttgaagagggttctgcacaagctgccttaaaggcattacatggacaatcatgtcctgaacttggaggtcgatctttgcatatccgttactctgtgcttcagccaactccacaggatcaagctagtgacttggttcctgtatctatcacagcatcagatgtgagcattccaggccttttcctagtgcatgacttcattagtgctaaagaagaagaggagttg

SEQ ID NO: 17273 - DNA, 140 bp, Glycine max
  unsure (1)..(140): unsure at all n locations
  Clone ID: PAT_MRT3847_115602C.1
tcgganaacntgggagctatagttgactngaaaatcttgaatcatttgntccanaacaagaatgantactgnatggaggtgacncccaaaacantggctgatgtaaagggtggcactntgganntcttacgaanggnngg

SEQ ID NO: 17274 - DNA, 277 bp, Glycine max
  Clone ID: PAT_MRT3847_115603C.1
aaagtcaaaactgtggaattttaagataactatgggggtacatgggtggaactgttagtggccaaacctataagactaactctatcgtgatctgctaagtcactatgccaaccaaacaaaaagagctgatccctaaatagaaattagtacatgagggctggactattaaagcctggaatacatactgccattctttatgctcccaccacccaaaagttgacaggaatgcctacggggtacatttttccaatattctggatccacctttaaggggaaa

SEQ ID NO: 17275 - DNA, 721 bp, Glycine max
  unsure (1)..(721): unsure at all n locations
  Clone ID: PAT_MRT3847_115604C.1
agtccttttacatatgcatgcctctaagtggcgctgcttgtataggcacnattgttaagggtgagcaaatcccatgccctcattgtgaagtcggggtttggacccaatcntatgcattaataatgctttaatctctatgtattccaagtgtggaaacaaagaagctgctttgcaggtctttaatgacatggggtatcgcaatgtcataacttggacatctattataagtggttttgcaaaacatggatttgctacaaaagccttagaattgttctatgaaatgcttgaaataggtgtaaagcctaatgaggtcacttatattgccgttttatcagcctgcagtcacgttggtttgattgatgaggcatggaaacacttcaattccatgcattataaccatagtatcagtccaaggatggaacattatgcatgtatggttgatttgcttggtcgatctggattgcttttagaagccattgaatttattaactcgatgccttttgatgctgatgcattggtgtggcgtacctttcttggttcttgtcgggttcatcgtaacaccaagcttggggagcatgctgcaaaaaagattcttgagagggaacctcatgatccagctacctatatattattgtcaaacttgtatgcgtcagaagggaggtgggatgatgtggcagccttaagaaaaagcatggaacagaaaaaatttattaaagaaaca

SEQ ID NO: 17276 - DNA, 450 bp, Glycine max
  Clone ID: PAT_MRT3847_115605C.1
ggtggagtcaggaaagtttacttattaacaggcacgtttttggaaaccagggtcaaccccttttttatgaaaaaaccgtatcaacaaatgctcgtaccccaaattgcaaggcaccattttaaatattggatcaaacttacacggtttcagaaaaacgcatgctacgtcaaaaaaaacccttaccgtgtacctcaggatgcccaccgaatggaagattacatggccttgcttgcaaaatcccaaaatggccctcttttgatttctttggagcttgggctggcagggatgcttttgcaaatggaccacttggggctaccgatgggttttttcaagggccttggaccaagcacttttattggcaaccctttctgctttgcctgcttaccctgggcttgggacgcttgtgactcaaactgggaccacaaggctttttatcttgccttttcaccc

SEQ ID NO: 17277 - DNA, 867 bp, Glycine max
  Clone ID: PAT_MRT3847_115606C.1
ggctcgaggttttcacggaaggttctctctatctgtctctgttgctctctttgaagcaaaagcttttgagtcccattcctttgaaattttggttgtgcgatcttcatcttcaccttcagggtggttgtgcttctgggaacctttcaaaatctctgctttcttggattttgagttgaattgaattgcactcttgagctttccattaacttcctcagcttcttcaatttgccaccactgtactgttaatgagaataccataacttttgacttgaccagtcaacggccagggcaaaggacaagcattcagcagatacagtgagcctttagatatgggctgcgtggtgtcaactacgaaggactctggtggaaatagaaggaggccagggagtattggtgaagtttcagtatatgttcctggtttgaggattcctaagcctgttgattttgctcaatcacttggcaattatttgtccaagaatatagtggaacacctgtctgctcttagaatgcgcatagttataatggctggtcaagaaggtcctacaattacaagaacaaaaagaaaaactcagcatggaggttcaatgctggctgatcttctgcaggctcttgaagattacttgcctgttgttctgggattagttaaggatggaagccatttacaatataaagtacaatttacttgggtgaatcaagaggatgacaaagaggaaacaaccatgtttaatgcttggtatgaggtgttgtcagttttgcatttgatggcaatgctatcactatcacaggctaacttgttactgcttccaagatcatcatcctctgatggtcatctgccaaaagtatcagaagaaagcagacgaacctctg

SEQ ID NO: 17278 - DNA, 409 bp, Glycine max
  Clone ID: PAT_MRT3847_115607C.1
gacaagtgagtgtgatgatcaagaaaacgagaatcagtgtgatgatgatgaacgtccttgcattcgtcgttgctacaattttggtagcatggtaatgccatgcctacgataggtaccctcaccaacttaacactggctatggtgcccgtaccccggaagtgaaatgcgcaagttggaggcttgctgtggaagcacacaacatctttggctttgagaccagtcctgaacagtgcgttgaagcaacacaggaagatatctatggagatcaatagacatgagactctagatgagtgaaccactatccctacctttaggccagagacctctaaatcggtcgcatggacacatttgtgtacagtacatatggcagcgtactctcgaatattccattcgactcaacatatggata

SEQ ID NO: 17279 - DNA, 368 bp, Glycine max
  unsure (1)..(368): unsure at all n locations
  Clone ID: PAT_MRT3847_115608C.1
tcaaaaagtcgaccaactgcatccaagcacgaatcaaatcactgaaccgctagccgtccaggcctgcacactctgaggcagacccaattcgagaccaactgatcaactgaacaactaaaatagaaggaccagcagcgagagaagaaggagcgagaatatcacgagaatccaacataatgtgactgtacctagtaaaccataaccgaattaatccaaagaactgatactgaaggatgaacctaacacaggagnacagacatcaagtaatacaataaatggagtccataagaagcaattcgatgcaacatgcatgcttagcagagcgaattatattcaaatactcataggttactgccatagcctgaaaa

SEQ ID NO: 17280 - DNA, 213 bp, Glycine max
  Clone ID: PAT_MRT3847_115609C.1
aagaaacagaacagatggtggctgaaacttcgaggtggttaatactagtctgcaaattattttgttcctcgtgtgtatagggcgaacagaactcaatctatgtgtatgaatatgatacacctgacattagctgctgtcgaaataataagctgaatacctgcactataaatcactgttatatttgctaacacgcaaatcgagtgatgctatgct

SEQ ID NO: 17281 - DNA, 1445 bp, Glycine max
  Clone ID: PAT_MRT3847_11560C.1
cgagatggcaaggagatacctaactagcatgcggaaaaagcagcctgtgccattcactcaaaaatttcccaatgcagatcctttagcactaaggctactggaaaagttgttggcttttgatccaaaagaccgacctactgctgaagaggctttggctgatccttacttcaagggactggcaaaagttgagagggaaccatcctgccaacctatcacgaaaatggaatttgaatttgaaagacgaagagtcacaaaggaagaaattcgagagctgattttccgtgagattctagagtatcatcctcaactattgaaagactacatgaatggaacagagagaactaattttctttatccaagtgctgttgatcaattccgaaagcagtttgctcatcttgaggaaaatggtaaaagtggccctgttatgccacttgatagaaagcatgtttctcttccaaggtcaacaattgtacattcaaatacggtacacccaaaagagcaaacaaatattgcttcctgcaaaaaccgagctgacacctggggaatttaataataattccagggatacagataagtcctgcgccaaggtctattccgggtctgcaaaaattttcacaagggatgtgaccgaaatcaattatcatcttgcctgggatcactttgtatgcattattagtaatcaataagctaacattcttggattcagcataacctggaaaaggagaagggcctgtgattccataccaatatgcaggtgttgtggagggtacatatgatccaaggacttttatgagaggatctgttctttcttctaaacctatgctaaggctgtcccctactaatcatgatcagcgatcaacctctgcaaaacatgaaaggtcagcaacagaagctgacaagggtgtatctttacaatcaaaacttgctcagcaatgtggtgtgaatgccaaaatagcaccagacatagctatcaatattgacaccaacccttttttcatgacacgagcaggagtgaacaagatagagcaggatgaccgaatagccatagagacaaagttgctgcagtcaaaggctcatcaatatggtgggattagtaccactgctcatagaaaggttggacctgttcagtatggtatgacaaggttgttctagaagaatgttgtcttgtgaatagtttggccaggtggagcaatccttgtggagaataagaaaaggttcttcatagtggagaagtagtagtctctggtggtgctttgtgtaagacgatgatgatgacatgagttagtgcttccccagaaagagccagctttctctgggcaaaccttgtaaacattggtttcagttatcaataaactgtacaaccgaatttgagtcctatctttgtaattcaatccacacattcctttcctcgggatttttttattttattttataaatttcctgcc

SEQ ID NO: 17282 - DNA, 1296 bp, Glycine max
  Clone ID: PAT_MRT3847_115610C.1
gtcgaccaacgcgtccgcacctgtctgccggtgcgtaagttgccattgggtaaggtgcttcgtttactcttatactgcttatatccggggcagtaggcgggtgctaactgctacacattaccctccttgttctgctaatttcagtaagggcagctccatttccgatagcagggactcaattttcacgtgacctccaggtgacaaggcataacagtaatatttttggcaattctcatactgctgcggagaaggggccgatcttgctttcacgataatataccccactgttggggcaccgtaatctgatcgtcggatggctgatccccgcagtccccaacaacatccatggacaggagctgattgccgctcagacaaaaatagcagcaaatgggtgattcatggacttggtcttgacagtcatggtttgaacggtttttcgccttctgttcctactctacttcatcttctgcacatcctatatttgagtggaatcagcatgcaggggcctattccatcctcacttggaacaatacctagcttccaaattcttgacctacttacttactttttcaatggttcaattcctgaaagccttggacaattgacatcgttgcaaagactgaaccttaatgggaacttcctgtctggaagggtcccagcaactcttggaggaagacttctgcatggggctagcttcaatttcactgataatgcaggcctatgtggcatacctggattacctacttgtggacctcacctttctgctggtgctaaagttggcattgggctaggtgtttcttttactcttctacttcttattaccggttcagtttgctggtggaaaaggcggcagaatatcctccgggttcagcaaattacagcaagggcagctccatatgcgaaagcaaggacccaattttcacgtgacatccagatgacaaggcataataataataataatgcggagaatggacctattttgctttcacgataataccccatgtttctggcagggtaatctgatcttctgatggccgttccccgtagcgtgcttccccaaatatcgacaacaattttttagcccattgaatcatttacaagctgggaaccctcttaatttgtaaatcagaaatgtgtacattatgtttgcgttttcatttcccactgtttgaacttgtatacaggttttctctttttactatgttaggagaggatttgtaacattttaaaagttgaaatgcaaatagaaatcttaatgttctatgaagtacggtaagcaaggtcaatttacataat

SEQ ID NO: 17283 - DNA, 305 bp, Glycine max
  Clone ID: PAT_MRT3847_115611C.1
ggaatcatctcaccagattaagatatctcttacctcctgccttagaactcacatcttgtgacagacagcatctcgaaacctctccagtaagagagtcggttgagttctctgctcaatccgaagatcaagggagacctaaggcagttgacatcactggacacgtcgggcacagcgtccacggaatcatactaagatgggtacagcggaactctctaatgcagaggacaacgacgctctcatggtggctacagtcgacacagtcgctaccgcggctgtagttcgcaccgatggatctctcgtcatcg

SEQ ID NO: 17284 - DNA, 287 bp, Glycine max
  Clone ID: PAT_MRT3847_115612C.1
acggctgcgagaagacgacagaaggggacttggatgtttatataattggacgaatgtttatggttgggactttagagtgaggatacatgatcaggagtttacatcactttcatgcacaacacatggaaaactgaagtagggacactacaggggtggttacctccttccacgtcatctgtgactaggattcgataccaaaagacgaaacatggcaactatgttttaggataaggttgttttaatgccatttatttctgttctgtggtcacacgccatttgaaaacttt

SEQ ID NO: 17285 - DNA, 1636 bp, Glycine max
  Clone ID: PAT_MRT3847_115613C.1
actggacggaaaaaatggcgtgcaggagcatgcttcgttcatcgaaactggtgggaaccttcctatttcattctcttaattttagtaacagacttgctagcgcaaatccgtgagaaagagaagattggattggggattaggaaaaaatggcgtgcaggggtatgcttcgttccaccattctcatagaacccagcctactccgttctttaaatttcaattctaacaaacatcacatagcttcactcaaccaatggtcttgccggtttcattctccaaaacccccttattcttcctctcagaacgaaacgccgttgtctcaggaccctgtcttgaaggccatttcagagatttccaaaggcgaagggagggttggccaaacaacaaacgtaattattggaagcactgctgccgatgattctaacaatgaatggttggctttggaccagaaggtgaactcgtacccaaccgatcgaggatttaccgccattggaactggaggtgaggattttgtgcaagccatggttgttgctgtcgaatctgtaatccaacaaccaattcctcagggatatgtgaagcaaaagttatcgtcggggggcaaatatgtatctgtaaatattgggcccattcaagttgtttctagtgaacaggtccaagctgtatataatgccatgaggacagacaaccgggtgaaatattttttataatctgtcacattgttttgtagagaacaccacgattgcaagaacaatctagttttggagtgtcataacgagtggaagaaataattagagaaaatgttcagaattctttctacaaagagttggatgtggatgccttgagacagtgaaacggcctagttagttgatttagagtgcatggattaaagtttcatccaactgaacttatgttcaactcaatccatcactcacattgttagcatttatgcattggcacgtacaagagtgcttgagtttgatcttcagaatgcattgagtctctgacccttttttcaacccctttccacctctctcttggtggtcaagagcctgattaactaaaaaaaatcttctttgctttcagaatttgtactaatttgtttcaattgaaaatgaaacaaaaacttggcattctctacgaaacttttgaagttgaatgttgaactgtaaaatttcgaatctttccgaagaaatatacatgaacgtaatacattacaataaataaattcacgtcctctatttttatctttactagaaaaaaaaaaaaaatgcagtattccaagggatgaattaacacgtctgccttcgagtggttaggctgattttgttatttgattaatccatggtatcattgcagtagatgtaatcatgatgcaaattggatctcttccgtattttgcgaagatgtaattagtatgatttgttgttaccgatagttatattaatataatattataaacagtatattctagtgtttggagttgaagggggttggtcgtagatgtcctgtttggtgccttaactgcagattagtttagtttaatttctgtacgcgttattgactattgagtgtacgaaataattggaaaatgacagttgatacacgctatgaaatatctatactttgatgagatatgtag

SEQ ID NO: 17286 - DNA, 217 bp, Glycine max
  Clone ID: PAT_MRT3847_115614C.1
gacattgttccttttgttttggggtattttcgcaacttaaaaagattaaagaagcccacaacgtctagataatatgtttaatagacatacacgacgataatttgacgaacgtccatacaaaattaattcaacgatctccaaaagcctgtctatacaccagctggatctttatgctcttgaagccgagaaaacactcaatattcacaaggaaaaaaga

SEQ ID NO: 17287 - DNA, 363 bp, Glycine max
  unsure (1)..(363): unsure at all n locations
  Clone ID: PAT_MRT3847_115615C.1
aacactttgaaacaatgggaaggaccatgaggcacgcgggcaccaaacacaacacagcacaacacaaacagaaaaaagaaggcgaagcaacaaaagaaactatctccatcaccgcgaaataatgaggacatgcagaaggacagccagcaaaataacatggagaaacccagcgaaccctcctgcaggcagttctaaaatactgngaaaatcaataacaggggaacattacaagaagcaaaaatcgcagaagagcacgcatttgaggcttcctgcaagaaagctagagtgaccgaaagagcgccatcagaatcatctaagatgggtgatgggcgacaatggagaaaatatccacaaaagatatca

SEQ ID NO: 17288 - DNA, 377 bp, Glycine max
  Clone ID: PAT_MRT3847_115616C.1
cgcactttaccgtttctttgagtaaaaaaaaaaaaaaaaaaaaaaaaaaaaaaaaaaaaaaaaaaaaaaaaaaaaaaaaagaacaaagaaaaaaaaaggaacgagggagacgacataatacatgcagcgagaaaccatatatatcgagacgagggaaacgtaatacaagggcgaaactgaaaaaaatgggccgctgggaaaaaaaaacggcaacgcgaaaaaaaacgccttggccaagatggcgcaaaagcgaagaggacgcaaaatgaaaaaggccggaacagattggacatccccagaggcaaacgacacgcaccgccgaagggcacccgaactggagagggggaggagccccgtcggggggggagaaacccgcc

SEQ ID NO: 17289 - DNA, 218 bp, Glycine max
  Clone ID: PAT_MRT3847_115617C.1
gtctgggaatgcatcagccaacaggagtgattgggcctcattggtacaagcgttgttatcgaacagcaacagctcacagcattttgatgcatgtaagtggacaaaatcagaaccacatttctggtaatcgtactttccaatatatgtgtgaccagctaaagcagggcaaacaacatggacgaggattacaaggtgaaaaagtctatcaacttggggag

SEQ ID NO: 17290 - DNA, 380 bp, Glycine max
  Clone ID: PAT_MRT3847_115618C.1
ccctttaagtttaaacagtcgttgaaatgctttggattgattgatgcatgaaacagacacacctactgaggggttggtgaacaaggatggcaatatgtgcaaaagatgtttggagagttgaatgtgtaatcccttctggatatgcgctcacagttatgtggagttgcttttttaatgagatgctgattagatatagctatgaaaaattactgcgccagactaaagctccaagtatgtttatacaattcttcaataattttgattctctgtgtgtgtctggcgatgataacttaattagtgtgcatgaatatgtaaagccttactttattggtacttaattgaaaagctttgtagctggtcatgatatcaccattactgat

SEQ ID NO: 17291 - DNA, 316 bp, Glycine max
  Clone ID: PAT_MRT3847_115619C.1
aaaaaaataaaaaagtgctggaaccttttaacatcaaatagttcatatttgattcctgagtgaggcttgttaaggaatctatagagcagagaggaagagatttgttttgaggaattgaacccaactaataacagattacaactctgtttatatgacagctacataactgtaagctggaactaacctgagtgagtttgtgacatctgtaacataaatgggctaactaactactgaccatatttagacttactgacttacctcaacttttggattctggttcagtactggacctagccactactgagtgctttttgga

SEQ ID NO: 17292 - DNA, 825 bp, Glycine max
  Clone ID: PAT_MRT3847_11561C.1
ctcgagccgattcggctcgagtgttgatcagttcaaacagcagttttctcatctcgaggaaaatggtggtaaaagttatccaattatgccacttgaaagaaagcatgcatcacttccaaggtcaacaatggtacattcaaatatggtaccctcgaaagagcaatcaaacattgcttcctgcataaaccggcagacaactggggaatttaataataattccagggatacagaaagtcctgcgccaaggtctattccgggtctgcaaaaattttcacaaggtatgtgattgttatcaattatcatcatgcctttgtttagtttgtatgcattattagtaatcaataagctaacattcttgtattcagcaaaacctggaaaagttgttgggccagtgattccatacgaatatgcaagtgttgtcaagggtacatatgatccaaggacatttatgagaggttctgtgcttcctacacaacctgtccccccagcatattattatcaaagatccagcactggaaaccaagaaaggccatcaacagaagctgacaagagtgtgcctttgcaggcaaaacatgcacaacaatgtggagttaatgccaagatggcaccagatatagctattaatattgatacaaatcccttttttatgaccagggcaggagttaacaagttagagcaaggtgatcaaatagccatagagacaaacatgctgcagccaaaggcacatcaatatggtggaatcagtgctgcagctggggccactgctcatagaaaagttggtcctgttcagtatggtatgacaagaatgttttaaaagggtgtttt

SEQ ID NO: 17293 - DNA, 254 bp, Glycine max
  Clone ID: PAT_MRT3847_115620C.1
gccccggagcggaagggccagccagacccacgcgaccgaaaccacaccgactttggttaacgggaaccgccccagagaaacatgaaggccagggaggagggacccaagactgggcaggccggcggagaaaaaccacgagccggaggcacaagaagacccgggccaacccaacagcgaaaccagaaaaaaaagcccaacgcgccgccggaccagaaaaataaaagaaacggcccgtcgaggcgcaagaagggaac

SEQ ID NO: 17294 - DNA, 386 bp, Glycine max
  Clone ID: PAT_MRT3847_115621C.1
ggaattcggcacgaggcaaacttattaggaagaacaaagaacatggtagaattaaagctgcagttcaatcaatcagggaagagctagaagatgagaggaggttacgtcagcattcagaaagcctgcatcggaagctggctagggagctttctgaagtgaagtcttccttctctggttgtttgagaaatcttgaaagagagagaaaagcacggatccttttggagaatttgtgtgatgagtttgccaaaggaataagagactacgaacaagaggtacattcacttaggcggagttctgagaatggtcagggtcatgttaaagggaacgatagccttgataggttaatacttcatatttcagaagcttggcttgatgagcgcatgcag

SEQ ID NO: 17295 - DNA, 665 bp, Glycine max
  Clone ID: PAT_MRT3847_115622C.1
cacgcgtccggtccaccgctccttcgcttctacactcatctgtgtcctctttcttctctaattactcgcctttcaatgctcttcttctttgctgttccctcatatctacaagcatggtaatgcactgaactgtgagaaggcctctgattgtggggttgtgttgctggagaagtctgatgcaacagaaggtcaatacgctgacactaacttacactgagaatattattgccttgctcatggaacatatcttctacaccaacaatacaccacccgcctagacatgagaagattggggggaactgtggccttgaacatgcatgcacaaagatgcagaggaattgcacgcaggattatgagacctagctctgatcacagatcacaagacctattagaacccgaaccatgtgctatctcttgccacctttaacatcagccaaggataaccacttggaatacttgggacactactatgatgtatcgaagcactcattcctacaccgagtagccaccttgagacttgctaggacaagatatttcccatgtgtgaaccccttcagttttgatgaccatgggtaactacagcattggcattaaggaccagtgtgacttaccagagatcagagctgatggtgatggtaagcctcggagcaaggatatctgcatcg

SEQ ID NO: 17296 - DNA, 184 bp, Glycine max
  unsure (1)..(184): unsure at all n locations
  Clone ID: PAT_MRT3847_115623C.1
ngcgnagnnagaacaggaancngcacgaggngnaggnnanncngaacanngnccanaangngnnnncagncnagaancggnccanacagcanangagcgngcngngggagnaacagganacnnncgannanncannnncaaggnnnnngnanaagnnaganaccncannnnngngcnnnaccna

SEQ ID NO: 17297 - DNA, 485 bp, Glycine max
  Clone ID: PAT_MRT3847_115624C.1
gcttcccccaagtccatttacattcaataccttcaccgtctccgttttgtgtggaccttgtttttatgatggtactatccacaactcagttgatgataacatctgtaaacctggcgtcagcaccccaatatagaggctgagtctcaatttgcctcatctgatctgagttgttgctaactggaatgatatcattgaagttgtgaacgcaaatggtgaaattgcgtgtgctaagtctttacagacggaacaaagctatcaattacattgcaaatcgttgaaaatgctttgcatttcctccttcaacaaataggtggttctgttggtttggaatttgtgatacatatgatgctagcacatattttattttactaataaaaattccctctatttcagttgtataacgataaactttttgtgtctgtatcccatgaaaaaaatggtgaaattgtatgaaatttgaaaaatgttaacgtttatcgattaag

SEQ ID NO: 17298 - DNA, 1241 bp, Glycine max
  Clone ID: PAT_MRT3847_115625C.1
gaggaaacctgcctggtgcttgatctgatatccgggccactcttctcctacttcttattggtaaatgcacagcagatcctgttgctttcgaggatgttggtgaagaacgtttttttatggaacttttgaatgacagagattcaagggtggcatattattcttctgcatttcttctgaagcgaatgatgactgagagtccagaaaaatatcaacacatgcttcagaatcttctttttaaagctcagcagaccaacaatgaaaaactgttagagaatccttaccttcaaatgtgtggcatacttcaattggcaaatgatcttggatttgacttgtgatgttaaactcttggcttttcggggtgcgatattggtttggagtagattcatgttggtctaaggtgtcattgcaactgattctgaggatcattcatcatctatccttcaaatgactaagattgccacattagctgggacatattctttgaaagcttccttacaggaacaaagttgtgatttatttccaacatggtggccagagggtccaggtggactccatgagctcttccgtgatgatagtctttgtgggccatgttgctatctgcaatcatgtcaccatcttcagcatgtctttcaacgactgaaagacattttacttgggaaaatttattaaaatctgttcgaatcggctcgaggtttggctacaaggtgagtgaaaacaagtgttctgttcaggaataatttgaatatccttggttttggttcagctgctgttctatgcctcaaaatgtcctcagtagctggctggtcattacattcaaaatctctgcgtaatctgtactgaatcagatcagatatccaccgagcccttgttcaggtttgtcattaatgaagggtccgtatgcttgcttttttacgtggcgttcggagcctgttattattattattagtttttttttgggtgtgattcagtgtgtacattgtaagtataatcacttcacaataagggcatcacgcgatgcctacttttagaggcatccaagttattctccttcgattctgtaattatgtgctctttaacttttttctttatgatttattttattgcgaaaaattgtagcatatatatacagggttttatggtggaatagtggagggcagttcgttgtgtaatttgatcatataatttcttttaacaaaaatgctgttagaaattgccaaatttaccaccttcatgggaatctt

SEQ ID NO: 17299 - DNA, 598 bp, Glycine max
  Clone ID: PAT_MRT3847_115626C.1
accacattgatctttcaaaatcttcataaaacaaagttcttatgctccaaaattggatccctgacctgccattgaagatgaatctaatgaagctaagggtaaatcatcttctgagttgagttgattgggtacagaaacgcagcgtttagagcaccagcgaaactcttttgcacgaacaatgaagcttcagattttcacccaactaaaccaatctcaaaaatccgcattggcggtggttttcgtcattctcttgccgcctttctttcccaatcttttccaacctctcggtcgttcttcgccttctgtgttctctgagtggaatgctccgaggcctatgcacgtggctttgctagagggtgctttgcaacgccaaacttcagttgaacttcaaactagtctctggtctcccttggctttccaaggatggaaaccttgcactgagcgtccaaaaccacactcactacctgaaaagtcacggggttatatccaggttttgcttgatggaggattgaaccagcagaagatgggggtatgtgatgctgtgctgttgctagatttgaatgcgacgcttgtgcttccacattttgaagtgaacccc

SEQ ID NO: 17300 - DNA, 570 bp, Glycine max
  Clone ID: PAT_MRT3847_115627C.1
cataaaacaatagaaattaattttccatggaatttgaaataatatttttacacaagcacggttgaagggtcaactcctcgatcaaaattgatattcaagacgagttacgaagctaactaataacaacacgaaaaaaaaaattatctattaactgacctataaatttgtagtaataacaagtaacatgatttaaaagccgaagccgaagcccgcttaaatctcatctcactaatttccatccccgagcatttttatctatcaatgttgcccgtaatttcacaaatctgtagcaccatttcaaaaaacaatctacacgatgctgaatccgtaatttctctttttgtcctcaaaattaatttacctcgacaatttcaagtcgtaaactcaaacctctgctctccgaatcttcttattctgcttgtcttccttccggtatttgtctcgtctctcttctctctggcgctttctcaacaactgctcttctttggttttctctgcctcaagggctttcctcttattctcttccttaagctttctctttttgaccttctcactatttattaactgaag

SEQ ID NO: 17301 - DNA, 264 bp, Glycine max
  Clone ID: PAT_MRT3847_115628C.1
acgcgtacgaacacctccgatattacgttagaatgagttcagagagagaacgggcagggtgttacacagagagaggatgttgcaaatcaaggccttgacattctttctcactctcaaccatttctatccatacataatttctaattcatctatcctatcacttcacactgacactaatatatacacatatactatactcgtatcgtgcatgctaatcctaactatccatccatttcgaactcatccatttgcttactgaccctt

SEQ ID NO: 17302 - DNA, 824 bp, Glycine max
  Clone ID: PAT_MRT3847_115629C.1
ttcttcacctgatgggtaggaatgggggaaaatacaaggctgatcatgaacaaactttgccttacttcaatttttctactgtagaggacccatgtaaggtttatatggacaaggtacccaccaactctagatgtagaagtgcatcttcatttacactagatagtaatgtgtctaatcgtaatgataagaataatgaacatggagaaattgactgtggtagagagaatgggttggttgatgttcccaaagtatgttttgatgcttcaccggacttgatggaccataaacatttaacagttgtatctggtgggagcagctgggaaagattactaggtagttttggaaaaactgtcaatgttgatgatactcaaaaacaaagtttgttgtcagcatttgagataccactcgatattataattgacaagtgcttgctgcaggaaatcatgcttcaatacaattatgtcagcaagctagccatcaatgtgcttgaggaagcatttaagttgcaagagcatcttttggcactacggcggtatcattttatggagttagcagattgggcagatttgtttatcctgtctctttggcatcataagtggtctgttacagaagcaaatgagagactttcagaaattcaaggtctacttgagttgtcaattcagaagtcttcttgtgaacaagacactcacaaggataggttatttgtgtacatgaaaggacatgggaaattgcctctttctgcatctgctattggggtccgttcttttgatttcttaagactgggttaccatgtgcagttgctacccagtactgtttttactact

SEQ ID NO: 17303 - DNA, 836 bp, Glycine max
  Clone ID: PAT_MRT3847_11562C.1
gagtaagggtgtaaaaatatttgtttcattttattttattgaaggagtagaatttgggaactaggttttgttaagtttgggcttgatcaccccatagggaagttttggagaatttgtgggtgtcaggggaaaatgcagcaagatcacaggaaaaagagttcagctgagatggactttttctccgaatatggtgatgccaaccggtacaaaattcaagaagtcattgggaagggaagttatggtgttgtctgtacagccattgacacgtgggcggacgcgtgggtggcaattaagaagattcatgacatcttcgagcatatatctgatgctgctcgtattctccgtgagataaagctgcttagacttctacgacatcctgatattgttgaaataaaacacattatgcagatcgcgcgcttagacttcttcgacatcctaagcatgttatgctgcctccttctaggagggactttaaagatatttatgttgtttttgagctcatggagtctgatctgcatcaagtcattaaagccaatgatgacctaacaaaagagcactatcaattttttctttaccagttacttcgagcattgagtatattcacactgcaagcgtctatcaccgagacttgaagccaaagaatatactggccaatgcaaactgtaaacttaaaatatgtgattttgggttagctagagttgctttcaatgacacaccaacaactgtattttggacggattatgttgctacaaggtggtatagagcaccagaactctgtggatcattttactcaaggtatactccagcaattgacatttggagtataggttgcatat

SEQ ID NO: 17304 - DNA, 814 bp, Glycine max
  Clone ID: PAT_MRT3847_115630C.1
gcaccttaattaacacttggtcataagatttgttcactctcatttttcattcattggatgaaagaaagtaaaagggaaataaagcgataacatacatggtatggtatggtatggtatatgagtttaaatatgattattattattattaggtgttggtattggttttgttaagcctagcagcagcagcgacggatgcagagacgcccccaggatgagtagtgaggtttggatcatttctcatttctgcacccgtcaccccttctgcatctcgccgagtcgctgctctgtctgaaggtaacttcgaagtcgcatccgcgagaatatctgcgagtttgatcttctcctcatcctttgtaactcgagcattgagtgtggcggcagattgagccgcggcggcaacaccgccggggacgatgttggtgcgtccagtggctctgacttcggcggcctgaatcgccgcggcgtcgctccactcgacgggcttctttccggcggtcagaaccgtggcctcgagtgcttcgcctatggtgatcccgcttccagcacctccagcgcccatttcttgaacaatagaaggtggcgtcatcgtattcagtggagccttttggttaaattgcttcaccacctcaaccaacttattaaccttccttttcttttcctctagtctgttaacaacctgtcctgcaacggactccgatatcacctggctccccgaaagatgagcctcagtctcagtcacactaacaccaccatcagcggcaacgttattcttatctttgtgccccgccatccctcctctctcatttttcctggt

SEQ ID NO: 17305 - DNA, 498 bp, Glycine max
  Clone ID: PAT_MRT3847_115631C.1
gcaatatggactttccatacagatggccatgaagacggaaagttagattcattccaagcggatgaacaactgaagcaaaaaaagaaaatatcatatgttcggagacggaaagatgtatttaagactcttggacctggttctgaagttgaatcagcctcactgctagcatttggaagcctgttctctgctgcatacaaaggttctgaactatatgttgatattcatgaatctcatcagaatcagaggtttcgatcattgatggacaagattaaacatcttccatttgtcccagaaattatgattgctggaaagcagttcgttaaagaaaccataaaggctccatttctttgtgcacaacttagactgttggacgggcagtttaagaatcatcaaaaggctacctttcacggattaaggcaaaaaatcgaatctttgaggaaggaaggccctctacccggtcatattgttataatgactgatgtttctggagattattgg

SEQ ID NO: 17306 - DNA, 459 bp, Glycine max
  Clone ID: PAT_MRT3847_115632C.1
ccttatgaacaaggcagccgcactccaggctgtaaagaaggcccacgaggctgggagcgctcgctagaagaaggtcgcgaagcaggaagcatgcagctaaggagaaagaccaacttcaaccagatccttgtatatgtgaaagacataaggggcgcgtgcatacatgtatgtcgcccccttggcatgctggagaaacagcccgtctgtagaactcaacaccgcaagactcactgcttataatcacaacctagacactaaaaggaaagagtacatgttgatacacacaacaaggacttatgctgagctacagcatacatccacatagaactcgggatgcatggaacaatgaatgtgctggaggaattagtgggctaggagaagcaaaagacgatcgggtatgtttagtacatacattgataacactacccacccaaacagagagagttcctattaatgcac

SEQ ID NO: 17307 - DNA, 1127 bp, Glycine max
  Clone ID: PAT_MRT3847_115633C.1
aaccatgtgaacaccttgcctatatataatccccttagacaaccaaccacaagaggctctaataactcattattcattaacacacacctcaaactaaaaaaaaaaatgtattctgttgcttccacttcccttacttcaccactcctccacgaccttgagaacttccattactcaagaaggttactccttcactccccataccttaaccaatcagccaaacccccaagaagcagccacgattcttcaacagaaacataccttggagatggcaatttcgatgcaaatgttgtcatggtactctcagtcctactctgtgctctcatatgctcactggggctaaactccatcataaggtgtgcactaaggtgttcaaattttgttgtgagtgactcagtggcaaccaataacaataacaacaaccctccagcagcaagagttgccaacacaggagtgaagaagaaagcactcaagactttcaccacagtgagttactcagctgagctaaacttgccaagtttggactcagagtgtgtgatatgcttgtcagagttcacaagtggtgaaaaggtgcgcattttgccaaagtgcaaccacgggttccatattcgctgcattgacaaatggctaagttcacactcttcatgccccaaatgcagacagtgcctaattgagacttgccagaagattgttgggtgcagtactcaacaagctagctcatcgcaacaacatgtgttggcagtgccagaaaccattgtgaccataatagccccacttgagccagaaggtttggtgcgtaactatagggaacttagctaaattatctagtacttattaattagagcttatcgattaataatgacataatggttgaagtggatgaatggaatggaatggaccctagtcagccatacttggttaagactagtcagccacccaccactcaatcaatcatagttaatgtagtggttaatgatgatgaatgtatatagcatggagtctcttttcttgtgttgtttcaattttaccttccccacttaaatgtacaaaactagttcaaattgtaattacattctttccaataatagtaatctgaagtgggtaccttaacagggtacttagtagcctac

SEQ ID NO: 17308 - DNA, 505 bp, Glycine max
  unsure (1)..(505): unsure at all n locations
  Clone ID: PAT_MRT3847_115634C.1
tccggaanttcctcgggtcgactccacgccgtctcgtaccggctgcagagcagacgaccagaagggcgtagcacgaattgatacgcgaaatacccaagaaacatagtgtcagtcacncttcgttctctcttcttgtccctcgatatctgttaggttcgcattctctgtcatatcatacccattgatgccgtcgatctcccatatttctcactgtgaatagtattgaatgaaacgaatatgatgaagtaactggccaggagccagaagcaatgggcttctgtggcatgagaaactgctagatcagttgctttgtcccaagaagatgcatgaaagaagctcccaaagttggcgttgtttgccgaatcttcaatgtgccaacatcacaaatcagtctgataccctggacctgccagtacaagcatgatgtaatcttgatcattaatacagcttaatggttaccccattattaacagggaannatcgtcaatttctaaatctatcatca

SEQ ID NO: 17309 - DNA, 637 bp, Glycine max
  Clone ID: PAT_MRT3847_115635C.1
ggctcgaggaaaaatataataataattaaaattgtcgtactccgtgtttaattattattatattttggaaaaaaaataaaaaataagattattcgtaaattattatgttcgattaaccaaaaaatttattttattaaaggataagtattcaataaaattaattattgaaataactaaaaaaatataaaatgaaaaaaaatcataatttatttaaaaatagtaatcagaaaatttaataaatatatcaaacataaaaaaatataaaaaaatttaaaaactaacattttaaaaattgttaccgacgttaaaacaaacactaaaaattactaaaacaacttatttacattatagtaaaacaaaattttcaaataataaaaaaaacaagaatctagttgaaatgcccttaaatataactgtatataactgtataaattattttttaatttcatatattctaattagtttatttacataaagtttgtttgaattttacttttcaaaaactaataaggtgtataaagggaaaaaaatataaccaattttaatttaatacatctttattttcttatttatactggtttctcaccttaaaaaaagtaattatcattaataatgaactgaatgcttaatctatgta

SEQ ID NO: 17310 - DNA, 166 bp, Glycine max
  Clone ID: PAT_MRT3847_115636C.1
gctcgaccagatgcctaggagattctatcttgctgggaacgaataccaagagtttcgaaaggatcaccagcaacagcaaggaggttccctaagccttactggaaagcaacaagaagaataaaaccaatgaagcatcatatagagtggctactcccatgaattaatg

SEQ ID NO: 17311 - DNA, 1053 bp, Glycine max
  Clone ID: PAT_MRT3847_115637C.1
gaaattcgactcgagctcgagctgattcgtgaagattgcgaggatctttcttctctccaccatcgttgggttgtgtttgcgtgtctctccgtaaattgccttcgactgtgacaacacgcaccgatcgccatgaacatcttcaccaagaaacccaccgccaaagaggctcttcgtgagagtaaacgtgaaatgacaaacgccagtagaggtatagagaaggaaattggagctctacaatcggaagaaaaaaagcttgttgctgagataaagagaactgctaagacgggaaatgaggcagcaactaaaattctagctcgccagttgatcaggcttaggcaacaaattgctaatcttcaaggtagtcgagctcagatgagaggcatagcaactcacactcaggccatgcatgcacattcttctgttgctgttggcttgaaaggtgctactaaggcaatggcagctatgaataagaaaatggaaccggcaaagcaagctaaaattatacaagacttccagaaacaatcagcgcagatggatatgactactgaaatgatgtcagatgccatagatgatgccttggataatgatgaagctgaagaggagactgaagagctgacaaaccaggtgctcgatgaaattggtgtagatgttgcctcacagttatcagcagctcccaaagggagagtcgcaacaaagaatgctgaaaatgatagcagctcgggcattgaagaacttgagaagcgtttggcggctcttagaaacccgtaaattttgcttgggattatgtgattctggaactcattgttttaaactaaaattctttcctgagctatgttttcttgggatttcacaagtttagtgtgtatatacttccttgaaattattatgtatgaataatgatatatccaaaatttctgagatggttatttacttgtagaagttgtagttggggatataaagaaaaacgtatagttttatgaataatgatagaaaaatttttgagagctagaagttttggaaaaaaggcgtgactgggactggagggcctcgtgg

SEQ ID NO: 17312 - DNA, 455 bp, Glycine max
  Clone ID: PAT_MRT3847_115638C.1
tttttcatcactatcagcaactttgtgtcttgatgcccatatacctttcttcaacacattttctgcagtaccatatttctttttcataatgctgcctggtattaggctctcagtaacactctctgtgttgctttttgcatttgacttttggaacaaagagcttccattagtagatccccttggttgtgatgtgcatctgtttctcacaccaccattggtcgataggaagcttatggtcttatacttttctgattttgcagacccggaatttgaactgactgggttatttgagaaatgctttaagccttcttctagtgttcttagcctcaacttcagtttatccttcaattgtgactctgcccttgctgttctctctgatatagctagcttatctttcaactgttgaatctctccctgcataatcctgctttcttccagccattgcatgacaggcg

SEQ ID NO: 17313 - DNA, 513 bp, Glycine max
  Clone ID: PAT_MRT3847_115639C.1
gagaaaacgggtaaaataaaaatacaggaatcctttacatcagaagaggagaggatacgaatgaagcaggagcaggagaggattcaagccaaaactcgagaatttagggaacgacaagctcgagagcgtgactatgctgaaattcaagattttcatcggacatttggctgtgatgatgagttaatgtatgggggagtttcttcttatgaaggttccatggctctcaacgctagacctcagagcccacgagaagggcatatgatggatgctttgtatgcccaagtcaagaagccgcggaattccaaaccctcacctgtagacagtaacagatcaactcctagcactcatgatcggatacagcgtctgaggcaagaatttcagcaagcaaagcaagatgaagatgtagaagatcgtcggcggacctatagttgtgagcaaccctggccgaacgcacggccggcgacgcagagcgggcgacactcggtgtccggggaggtgcaaatgcagcggcag

SEQ ID NO: 17314 - DNA, 426 bp, Glycine max
  Clone ID: PAT_MRT3847_11563C.1
gaagaatattactgtaacatatgaattatgatattgatattctggtattgattgactggtttgtttttctatgctctatgatatataaaaaatgaaatgccaactgttgttgtcttctcggttatacttcctcaaatagaggcacgtggttttgttcgctcgttagtaggaagaggaatcattccaaagaggcatttgtagtcaattgtacaattgctatcaataaatttcccttttttgcccaatttttacataagccatgttaattcgtactaaatttgtgaacaaagaatttgaactaaataagcaccatgctcatttgtttgttgtttttgatttgtagaattcgccactgagcaagggggtttgtcagtggatgtgattaaaaaggcgttcagtgccacagaggaggaattcttgcatttg

SEQ ID NO: 17315 - DNA, 293 bp, Glycine max
  Clone ID: PAT_MRT3847_115640C.1
aaaacactctgacacaacaaacacaaacacaatcgtcaattaaaacaacaacaatatcgaagctgcacaaattaatatccaacactctcaagctttcgagtttcaaactctgggcgctgaatttggttcatttttctaaggtagtttttcttttacaactttaactgaaaatgaatactctttcttagccttcttgatgttccaaaccaatacaacgtcggtggttgtctgaatcaaacatatgtgatatgtctctgtatctgttttctctgtcctttttttttttaagaaac

SEQ ID NO: 17316 - DNA, 647 bp, Glycine max
  Clone ID: PAT_MRT3847_115641C.1
ccacgcgtccgggagaagcgagccgaattgagaagttgtgtatgaaagcgttgagtgaggagttgcttcccttggcattcagcacattgaatctatcggaatggaagagagcgagaatcagaggcgaatggagccccctaaaattcagcggctgagcgagtcggtggtgaaccgaatcgccgccggcgaggtcatccaacgccccgtctccgccgtgaaggagctcgtggagaacagcctcgacgccgcctcctcctccgtcagcctcctcatcaaggatggcggcctcaaactcatccaagtctccgacgacggccacggaatccgttttgaggacttgcccatactctgcgagcgccacacgacctccaagctgtcctcgtttgaggacttgcagcgcattaagtcgatgggctttcgcggcgaggctctcgccagcatgacctacgtcgctcacgtcaccgtcaccaccattaccaaaccccaattgcacggttacagggtatcctatagagatggtgtcatggagcaccaacccaggccatgtgctgctgttaaaggaacgcagataatggttgaaaatctgttctataacatggctgcaaggaggaagacgctgcaaaattcttctgatgattattcaaaga

SEQ ID NO: 17317 - DNA, 215 bp, Glycine max
  Clone ID: PAT_MRT3847_115642C.1
tttttggaaaataaaagatatggagctgctctactccgttttcatctccattctgcaccatgacaaagtaattaccctagttttatccctacctgctcgccagaaaaccaattaaatactcgtttttagcctatcccacatatcccctactctttgaatgcatctcaaagtcctaagatcacgctctgcccccccgcaagtatatggtgaattct

SEQ ID NO: 17318 - DNA, 265 bp, Glycine max
  Clone ID: PAT_MRT3847_115643C.1
cctatcctccttttccaacctcgaaactttataattctaataatggaaacagccacccaaattgccatctctatcatctagtatagctagccgccctatccctaatcccaactagacccattttcctacaacttccccttcttgaaaggctcacttcacttctggcttctggccacaccataaaattctttgaccggttttggtcaagcaacccaaaacgccactgcctacaaaacttgctcttttcaagaatcagaccttctgt

SEQ ID NO: 17319 - DNA, 574 bp, Glycine max
  Clone ID: PAT_MRT3847_115644C.1
ggctcaattcgcatcgacaactcttcaaatctttgtcatcaccatgaagaataataataaggagcaacaaggcaaaggtgcagcctcgtatctgaaactcttcagtgctcaactcgaccttctcaatctcttctctcatgctctagtttttggaattggtttactcattggtgtcacactcactttctttgtcaagaacttctccttaatcaactttccaatccaaaaattctccttctcatccaatagcctcatgatcaaaccaccaacttctttgtctccctctcatccaatcatctccaacatctcattattaacatcgaacaaccaaacaaaaaacgaatctcagtacttggaaggattagtggtatctgactctcggttaagacaccacgacaaaaccaaaccttcgtcttccgattcgtcgtcgatcaacagaaaaagggttatgaacttcaacagagtagggttgagggaattcttgaagccccccatggccatgcatgatatgagtgatgaagagttgttgtggagagcctccatggttcctatggttcataaactcccattcaaa

SEQ ID NO: 17320 - DNA, 335 bp, Glycine max
  Clone ID: PAT_MRT3847_115645C.1
caaaaaaaattttaccccggtttttttcccaatttggccccccgggggggcccctgtttggggtttttttttccaaacccaaccaggcccccaccgtttgggttgggccccatttgtttttggggcaaaccctaggggccaaggggccccccccataaccgggatgggctcacccccgggaaaccatttggggggcgggccccttttgggttggaaaagaaaccctttcctttcggccctcccatcctgttccccgggggtgcctggttttcccacccctaatggggggggggggggttaattcttttttttttccccttttaggggtttttttt

SEQ ID NO: 17321 - DNA, 318 bp, Glycine max
  Clone ID: PAT_MRT3847_115646C.1
gtcctacaggctctgccagattccaacatggggtgggtgctagatctttctaacatggacctgcaatatgtaacttccagccaagacaacgcacacagatgggtgcgcgacaatgtgataaactattggaatgtcagagtcaggcacattactgtggcaaaagaaaagaagccttgcgactcattttcacagttcgtatggcctgcgatgcaaaacattcaaagagcactctctaaggctggacttggaaaccaaatgaagggtgccactgcccttgagtctggggcattggcaggatcctaccctccatcgagaggc

SEQ ID NO: 17322 - DNA, 379 bp, Glycine max
  Clone ID: PAT_MRT3847_115647C.1
ctagttctagatcgcgagcggccgcccttttttttttttgggtttttgtgtttttcattagttgtaagttgtaaaattctatggtcttgctatgtttgtcaatcattgatttttgttgatagaaatactgcagcattcctttgccacaaagcaacagaaggaaagtaggaaacttttctgttttacctctaggtcttgtgtgtaaagaacattaactatattgaaggagattgtaatttaccataccagagtttggggcaagagaaggatgataaccgatacgctatatacacttgttaatcaatcccccacccccttgggttacgtaacccattttgaacccttccatttatccctggcaatggatttattttggact

SEQ ID NO: 17323 - DNA, 1446 bp, Glycine max
  Clone ID: PAT_MRT3847_115648C.1
cgacccacgcgtccgggtttttttcccggttgttttgtgtcatgtactgcaagctctcttaaaaccctaggacgttgggtttcgattcgtagccacaaccaacgaagtttctgtcaattcagcttgaccgacgattagcttcttccacctttgctccctatctgcgccaccagaaccgtttgtgttaaatggccaataattctcaaccctccagcatgcagtttcggccagtcattcaagctcagcaagggcaaccatttgttccaatgaattcacaacaatttggacctgcaggacatgctattccttcttcaaatgcgggaatgcctgtcattcaaggtcagcaattgcagtattctcaaccaatgcagcagttgactccaagaccaatgcagcctggtcatcctgttccttcatcacaagctatacctatgcaatatattcagacaaaccggccactgacatccattccaacacattcacagcaaactgttcccccttttagcaatcatatgcctggcttggctgtttcagtagcagctcctcattcttcatatttcacactatcttatggtcagcagcaagataatgcaaacgcattggctcaataccagcatcgacctcaaatgtttgcttctcctgctggtcaatcttggccatcctctgcatctcagagtgttgcggctgttacatctgtgcagtcggctggggtgcaatcatctggtgctgcatcaactgatacggtgactaatgctactaaccagcaatccttatctgattggcaagagcacacttctgctgatgggagaagatattattacaacaagaggacaaggcaatcaagttgggaaaaacctttagaattgatgtcacctatagagagagctgatgcatcaactgtttggaaagaattcacttcagaaggaagaaagtattattacaacaaggttactcagcaatcaacgtggtcaataccagaggaacttaagttggctcgtgagcaggcacagaaagctgcaaaccagggaatgcagtcagaaacaaatgatacatccaatgctgcagtctcctccacagcaacaccaacaccaacaccaacagcagttaatgcagctagcttgaacacttccttgacatcaaatcattcaaatgggcttgcttccagcccatcttctgtcacaccaattgcagcaaccgattctcaacggtcggtttctggattatctgggtcctctgtttctcactctatggctaccccaagcaccacaggagtagaaccaagcactgtggtaactacgagtgctgcacctacaatagttgcaggaagctctggactagctgagaattcacctcaacaacccaaaatgccaccccttgttgaaaatcaagcatctcaagattttgcttctgcaaatggatcttctcttcaagatatcgaggaagcca

SEQ ID NO: 17324 - DNA, 209 bp, Glycine max
  Clone ID: PAT_MRT3847_115649C.1
tgttatggttattactgctattcatgcatccggcttgagcctgcctagtcccgtttgatgaacaccagttctgtttttgtgaatcagcttttagtgtcaaacgatgacaataatcaaattattctccatgccttcaactatgtgccctatttaagctcccaaactaatttgacagtgtcaaattacttccttgttgaatcttataaata

SEQ ID NO: 17325 - DNA, 694 bp, Glycine max
  Clone ID: PAT_MRT3847_11564C.1
ccggcatattactatcaaagatccagcactggaaaccaagtaaggccagcgacagaagccaacaagagtgtgcctttgcaggcaaaacatgcacagcaacaatgcggagttaatgccaagatggcaccagacatagctattaatattgatacaaatcccttttttatgacaagggcaggagttaacaagttagagcaaggtgatcaaatagccatagagacaaacatgctgcagccaaaggcacatcaatatggtggaatcggtgctgcagctggggccactgctcatagaaaagttggtcctgttcagtatggtatgacaagaatgttttagaagagggtgtttttcttgtgaatattttggccagggggagcaatccttgtagagaaaaagacactttttagggatggagctgttgtagtctctggtgatggtttgtgtaaaaatgagagtgagaggcttaaaggcagtgcttccttagaaaaaagtgtcagctttctctggcctacaaagggtatgaactttggttacaactatcatgagactgttgacgatgaaattgagtcctatcttgtaagtcaatccataaccattttaggtgtttgcagtgaagacacaatcttgaaacagatgtcttggatgtttgtattttaattggattaatggaatttaaaagcctcgcatcctatacctc

SEQ ID NO: 17326 - DNA, 360 bp, Glycine max
  Clone ID: PAT_MRT3847_115650C.1
gaaaaggcggagaagcctgataaaaaggagcagaaacctgcagccaaaaaggctggcggtgatgctactgccccccgggcccggcccgctggtgcggtcaaaaagagtagttctaaggctaaaaagctgaggaagagtaagccccattgcagccggaaccctgtcctggtgagaggaatcggcaggtattcccgatctgctatgtattccagaaaggccttgtacaaaaggaaatactctgctgccaagacaaaggttgagaagaagaagaagaaagaaaaggtccttgctaccgtcacaaaaacagtgggtggtgacaagaacggtggcacccggatggcgaagcttcgaataatgcct

SEQ ID NO: 17327 - DNA, 568 bp, Glycine max
  unsure (1)..(568): unsure at all n locations
  Clone ID: PAT_MRT3847_115651C.1
tcgggatatgttatgcctattggagaacttccggaaggtacgaccgtctgcaatttggaggagaaggccggtgaccgtggacgtttggcaaggacttcaggtaattatgccattatcgtcgcacataaccccgacacgaagcgcacgcgaattcgtcttccatctggtgccaagaaaggtgcgttccatttccgccaaccgtgcaatgatatggcatttgttgctggncggtggtcgcaacggacaataccgcttttgaaggcaggccgagcctaccacaaatataaggtcaaacgcaactgttggcccaaagttcgtggtgtggcaatgaacccggtcgaacattctcacggaggaggaaaccaccagcacatcggccatccgtcaacggtcaaacgaggaacgagtgcaggccgaaaggtcggactggatcgccgacgtcgcaccggacgtattcgcggaggaaagcctgagaagcgcngaaaggatgaggccgtgtgagagggactgaaagacccgacaatttcctaatttttggtgaggccatggacgatcaaatttggtaatc

SEQ ID NO: 17328 - DNA, 532 bp, Glycine max
  Clone ID: PAT_MRT3847_115652C.1
ggggtcataactcgcattttcaaaattgttattctaaactttgcccttaattttagccttttacaaacatacttggtctctaatttttaatttaagaaactaaatacccatttcctaagtgaccggggaaacaattaaaagcatggacaccttccttcagaaacgaattatttaaaaagaaacagcatggtcatctacccttccccgccgttcccccaaaagcaggcttctaccttgaaatgagaatatcccgaaccttttgaccattagcggggggagccggaattcctagcttcctttatgaaaaagacaggtgtgccctgaacaacctcaatagcaacctttgcgagaggggctttaaaagatttcacccacaaagcctcaattttatgagcgcgccctaggatgacaatactgggatatttcttaccacgtgcggtggaaaagaaagcatttccctcactatacttaaatgttgcctgaatctcaaaaaagtcagataaccaggcattactgtgaaacttgcgtggtg

SEQ ID NO: 17329 - DNA, 442 bp, Glycine max
  Clone ID: PAT_MRT3847_115653C.1
gtttctagttcaaaattcttattacaagcattcttgccctggtagtatgcgccttgttttatgaatttaggagaacactttgtggcaatacaaataaaatctgtaatgcacctcaagcaccacgtgcatggcctatcattggccatttgcaccttttgaatggtcatcaactcacacacaaaacactcggcatgatggctgagaaacatggtccaatcttcacaataaaacttgggtcatacaccgatctagtattgactaaatgggagatggccactgagtgtttcactgtacatgacaaagcattctccaccataccatgtgttgcagactcaaaactaatgggctacaactataccatgtttggcttcactccatatgagtcttactggcgtgaggtaaggaaattaactaccatataacttgttctaacaatcgtctt

SEQ ID NO: 17330 - DNA, 701 bp, Glycine max
  Clone ID: PAT_MRT3847_115654C.1
ctgcgaagaataccgcacaaagcttaggactttttttttggtctctggagttacaccacagccacggaggcacccaggagaggctttaatgaatggcggttctgcatctagtaacttaagggcagctctctcccattgcgtacaacaagtgcgaagttatgattatcatcactatctttgccttctcgagctgcctccgtctatgcggaaggctgcatttgcactccgtgccttgaatgttgaaacagcgagggctatggatgttgcctcagatcccaggatcggccttatgcgccttgtttggtggcaggaagccatagacaaaatgttcgccaataaactgattgaacacccaacagcacaggccctgtcatctgtgatagctgagaccaaactcagcaagatatggttgaaacgatctgttgatgctcggatcaatgatgcaagaagagaggttactgacatgcccaaaactattggagagttggagaaatatgccgaggacactgtatcaactatgctgtacctaacacttcaagctggtggtatcaagtctaccgcagctgaccatgcagcctcacatattggcaaggctagtggcattctcttgctccttaaatcattgccctatcatgcgtctcacaaccggcatttttcttacataccaactgcaatagcatccaagcatgggctaatagtta

SEQ ID NO: 17331 - DNA, 1433 bp, Glycine max
  unsure (1)..(1433): unsure at all n locations
  Clone ID: PAT_MRT3847_115655C.1
ggaattcccggngtcgacccacgcgtccgggcaagtgggtccaccaacatatcactgtgatgagcaggagtttaagacaaacttatctgggtggccaacaaaaataatcaacattgaaattccctcaactcgtgcatttgatgcatatccttcattctcagaaatacctgaggccaacttgtccagcatggagtgcggactacctactcaattatctttctcagctcgggaaatatcagatggcacctttttcaaggcaattgaagattatgacccagacagcaagaggctcttgtacctgttagagaagttagtgttatctcattaatcattaaaatatattttgctagaatattttgatcattttatatgaaaagccaaaaaattgagacttctgaagcttcattttttttggaggggtgctgctaagaatggccatctaattacaatgtcaaaagggaatcatcagactgaaaatatgctcttaccgtaggattgttttgaatatgaaacttaagctcttcttccccaaactaaattttaaatttatttataaatatcattacacttttgagctttaataaggaactgtaaatagggtgctttcatttacaaggaattatgattatgaataaaaacatatcttctctaatatctattgcagtagctgtcctgaactgttggttttgactatgttttggggctaatagtgagttttcatttctattcttacatacttttttttttttgatgatcttttactacctataatgtttttattccttcatacagccctacacttttgcagttgagccatcatatgacatagtgtacttgtgggggcactgtatacaagcaaatattttgtttgctggtttagaaatttgactcaacttctgaactcgtctattatccacttcacaatttgcacggtatttcttgggccagatcgtaatcaatgttgtactatactctgttactagcagcggacacttctcaccgatatatttactggtggcatctgatatgcgtcttcatatgctctggaaaacgaatttcaggttatttgccttctatttgttcaaacatgatttgtactgctattcttggttaaccaagtgatcacttcccactttgccatccatgataagtaattggcgagaattatgatggatctgtagagctatattgttcaattggttgatagttttcatgatctagaaacatacaggctatagtgatatactgatatgctaaatccattgttagaaaaagttgacatgggaagggagaatacaaatagtgtagatgacagtagtacgaagctgaaaacttttgttctctgatttcgtaacaattacattctttctctacatttgccaatgtcaactacttatctctttactttagattgacaccataaatatgtgatt

SEQ ID NO: 17332 - DNA, 592 bp, Glycine max
  unsure (1)..(592): unsure at all n locations
  Clone ID: PAT_MRT3847_115656C.1
taggctcgagagcagagttaccatcccgcttcttctcatacgcctccataaatcaagggcctttatataacaggattggaaaattttccattctttgtaaattgtaatggcataaattcattcaaatgttgtcatatgaaattgcttttacagttttctataggattaaaactcttttacttcttacctgcctacctttgatatagttgtgatagttctgtggttcctttctctggttctgtaatgtgaaatcaacaactttaatatcctggcctagcagaggatggttgaatgtgcactagtaaaggggtcttagtcttagcattaagacacaatgggttgagaagaactaagcaaagagaagtatcaaagttacttctcattcaatcatcttgtgtgtgttgtattgtggactgctgcattgtgattgaatgacataattgagtgagacatgaaataatatgaatcaattatcagatgtttctacaaaatgttttgttgtgtcttgtactgttttgtcagttgagtattgtgagtggaatctcgaagagacaatccttttcctactattaangactaactcttctaaaaa

SEQ ID NO: 17333 - DNA, 323 bp, Glycine max
  Clone ID: PAT_MRT3847_115657C.1
gagtaaacgctcaccgggtgcttattggcaaagctataacttctgtcattttgtatacaacctaaatgcagctaacttcaacagaaaaagaatagccccgtctcttaattggttggtccaccaacgtatcccttgtaaactgaataactagggtgacctcactttgtcgattagcggcccttttgagcctagcacatttatggattttgttgttcttacaggagcaaagttggaataatctttacaagaccccatgacatccgtgagcgttacaagcccatcagagggaatttgccttacaatctgctattaaataccctgga

SEQ ID NO: 17334 - DNA, 1087 bp, Glycine max
  Clone ID: PAT_MRT3847_115658C.1
gtgctttcacggctggttccgctccaccttagcacagcgacgaccctgtgtcaccagccgcaactcgtctccatctctcatgtgctaatggccaaaacccccggagtcgtaaacttctcggcgactttctccctttttataccccccttaccattccccccttcgcttctaataccattttgagtcttcatttcaagtctaaactctttttttcttttaggtgtaggtgctgggtttttaattgctgtgttgtgtagcatttttttttttatgggatcggacacctggttttctttttgtaaaaagataataatgggagcggtttgttcggctggtatggtggagaaaaatggtgaacttggagggaagagtttggggctttctgggaagcttaagaaggaaaatagctttgtgaatcggagagaagctttttcagattcaaggtctaatagtggtcactctagaaagcaaaagaagcacgatactgggttttcccatgaacttggtttatcgtctccttcacctggggggaaacaggtgagtcagaggggttctattctgggaaaagcaggcgagagagcagtggaagttctggacacaattggaagtggcatgcctaagttaaacactaatagcgggtttgtctctggcacaacttctagagggaataagatatcaatactggcatttgaagtagctaatacaataaccaaaggaacaattttgtttcaatcactttctgaagaaaacattcagttccttaaaaatgaggtgttacaatcggagggggttcagctattagtatcaactgatgtgaagaagttaatagctcttgctgaggctgacaaaagggaagaactcaatgtcttctcaagggaagtgactagatttggaaatatgtgtaaagatccacagtggcacaacctagacagatatttctcaagattagactttgatgtcctggatgacaaacgatatcaggaagatgcagaaaagacgatgcaggagtttaccagcctagttcggaatactgctgaattataccatgagttaaatgcttatgaacgttttgaacaagattatctgc

SEQ ID NO: 17335 - DNA, 606 bp, Glycine max
  Clone ID: PAT_MRT3847_115659C.1
cgatggtagttgaagtatggtctaaagagggagacatcatcgaaaatttacctaaagtgcgtgacggaaaagaacgtagtcgtcgtccagaggacatcattgatgaggttagagaattagcaagagaaggttatcaagaaattaccttattaggtcaaaatgtaaattcatatggtaaagatatcgaaggtctggattatgaattaggtgacttattggaagatatttctaaaattgatatacctcgtgttcgttttacaacaagtcatccttgggactttacagatcgaatgattgaagttatagctaaaggtgggaacatagtaccgcatatccatttaccggaagctatccctaacgtagctctaactactgatatcatagtaggttatcctaatgaaactgaagaacaatttgaagaaacattatcattatatgatgacgttcaatttgagcatgcatacacatatttatattcacaaagagatggaacaccagcagctaaaatgaaggataacgtacctttagaagtgaaaaaagaacgtttgcaaaggcttaataagaaggttggaatatattctcaacaagcaatgagtcagtatgaag

SEQ ID NO: 17336 - DNA, 253 bp, Glycine max
  Clone ID: PAT_MRT3847_11565C.1
ttcatttgaacggggagcaggcccatccgccgcggggattttgtacagaaactccaccattttgtcacaccaagctgggcacaccctgacccttggactgggaccaagaaggccagggggcgcctcatagagaaaggaacgaacgccaagaacgccgcgatggccaaaaggaggccaccagagagagcgcttggggagcacaacaagaggctcatagggggccacactgggagcaagacggcaggggtcaagc

SEQ ID NO: 17337 - DNA, 199 bp, Glycine max
  unsure (1)..(199): unsure at all n locations
  Clone ID: PAT_MRT3847_115660C.1
gagctcgagccgattcagctcaaacggctttagcaccactctcttttttcttaatcgaagcatcnaaatttggtgcgcttttatagaacgccggcgcgaccctaccaaaactcctacccaccctggtccccgccgcccatccccttaaccgaccccccatcaccaagatctccgaggccgccttgaacctgaccccctc

SEQ ID NO: 17338 - DNA, 294 bp, Glycine max
  Clone ID: PAT_MRT3847_115661C.1
attcctaaaaccatacaaaatataagtagttggctaagagtacataagacatcaaataattgtggaagcaatgtcttccaaggttattttgatgatgccaaagaatcaagagttaagcgcaaagattcaagaatcaagtttcaagtttcaagattcaagattaatcaagatcaagattcaagactcaaagattcaagaatcaagagaagacttaatcaagataagtattaaaaagtttttcaaaatattgagtagcacaagaagttttcacaaaatcatttaccaaagagtttt

SEQ ID NO: 17339 - DNA, 317 bp, Glycine max
  Clone ID: PAT_MRT3847_115662C.1
attggtactcagaggtgcaattagatgaacaagttttgataaccctagagggatacatcacatgatctctcatgaatcagggggacaaatcccctagacagagcataaagaactttttttacttcaagggggctaggggcaaaacagcccaacattttttttggtagcaggtgactatacttggacatcaagggcatgaaaacgtcaacattcaaaggacaaacaatacccccaagttactggttgcaagctctccaacctataaagggaagaacctcaacccgcccatgtaaacgaaactaacccccgagagaagc

SEQ ID NO: 17340 - DNA, 343 bp, Glycine max
  Clone ID: PAT_MRT3847_115663C.1
ctctaaactaagaactcttcagtttaattgtgatagagcccacacatcatggctgaacgtcactaccaacgacaacaccagtaccctgtgcgctaccgtcacgatccacaccaacaaacccgttccttcgcccaccagagtcgtcaggccgacaccgtccacacgatgggcaggtacctcttgatcctagacatgataatcctcgacgccaccgtaatcgccctcacaattgataccccactgttggtaattaccagtccaggtatggtgcccggcagaatcaccgttgcagtactgagcctgtggttcctcgcctcaaatcgactctgatgtggaagaaatc

SEQ ID NO: 17341 - DNA, 275 bp, Glycine max
  Clone ID: PAT_MRT3847_115664C.1
aaaaaaaaaacaacaataaaaaaataaaaaatacataataagagcggggaataaaaagagtagtgaaaagactaaaaggcacaaataactgagtccagttcacaagggagtgtctcgcttctgacggcttcaccgagtaccccctcgagttgtgcctcttgtcaatacagaggttcggttatgtatttgatactgttctcctgtactatcttatccgacaaaagtgctaattggatcactcttctacagatttgttcaaccagtaccttaagagg

SEQ ID NO: 17342 - DNA, 361 bp, Glycine max
  Clone ID: PAT_MRT3847_115665C.1
cagaaaatgggcatgttggggtgtcttctgtgcattgtgggatcaactgttattgtgttgcatgcacccgaagagaaatctcttagttctgtacaagaaatatgggaattggccattcaacctgcattcctctcgtacactgcctcagcaattgccgtgacattgttcttggttttgtattgtgctccccgtcatggccagactaatattttggtttatactggaatatgctcgatagttgggtccttgacagtcatgagtgtaaaagcagttggcattgcgataaaacttacactggaaggtgcaaaccaggctttccactttcaggcatgggtttttgcaatggtttctgtcacctgca

SEQ ID NO: 17343 - DNA, 184 bp, Glycine max
  unsure (1)..(184): unsure at all n locations
  Clone ID: PAT_MRT3847_115666C.1
ggagaatgatcttgccctgaccacatagcaccgttgcattcatggagacacataaacacggcggtgacatttgtgcttgttttggcgaagaagttgtcgaagaccatggcgattntgtacatactgacgcaaagcttgcgtgctgggtgaagctctcccgtggtgaagggtacccaaagggaaa

SEQ ID NO: 17344 - DNA, 2979 bp, Glycine max
  Clone ID: PAT_MRT3847_115667C.1
cacccatcagcgtccggcgtccgctttcagcttgtccatctatccccaaattctgttccgaagaagaagcctcgtctcggataagggttagggtttctgtgttttctctttcttccgtgtaacttctacgtttcccttcgtcgctccaagagctatggactctgctctagtgatcaaggtgaaatatggagataccctcaggcgcttcagtgctcgtgttgatgagaataatcggctggaacttgacatggttgacttgagggcaaagatatgttctatcttcagtttcagtgctgatgcaaatttaattctgagatatgttgatgaagatggtgacttggtgactctagttgatgatgatgaattgcgtgatgtgatgaggcagcaattgaagttcttgaaaattgatgtacacatgaacaatgacagtgggggtaaatcaaatgctgggtctagtggaagtgccacccccatagaatcttgtcctgcctcaagcccatttctgtttagaaatgctatgctacgtgaacatctttctaaaaaagcagcatcttcaagtcctgtggttgataatcttgctgattcaattttgaaaatgggactaatttcccatttcgagcctcctgatacagctggtaaaagctcaaaaactggtgttcctgaagaacctatcactaaagcaatgggtccacaatcttcacatgtggactcagcctccaatgctagtgtcaatagtgatagtgctacccccataagatctccaattccaaacccttatctaagtggaaatgctgttaaagttgacgtctcatgttctgtgcccgaaccagtacgccagttttttttccaaatcatcaagttcaaatgctgctgcgtcttcaagtcagctgcctgcaaatctcgctgatttaatttccctagtgcctgaaccagtacgcgagtttctttccaatttatcacattcaaatgctgcatcttcaaatcagctgcctgttaatctcactgatttagtttccctactgggacaatctattctaaattctcattgccagcctcatgttgcaactggtccattcacaaaaaatggtgttcctgaagaacctatcacttctgaagcaagaggtcaacagatcccatctgcagactcggctttcaatgccactcaacaagtggaggcaggagttgcccctgttgatctcaatgtccctccttttgatccttttttagctcagttcttccctgatggtgatggcaagaagggtgaaatgccggctgtcgatagttctgctggtaaggatgacagtagtgggatatgctcaagttttgctggtcctaataacattcaacccagactacatcattgacttctggtgctttcattgaatgcccatttgctgggacatatattaattcttggacaccacttcctggaaactctcaaatgcccccatttaaaaggagccatagtcacactgatgcaatgtctggtatgttccataagggggtccgctgtgatggctgtggtgtctatccaataactggacctcgtttcaaatccaaagtaaaggaaaattatgatctttgcaacatttgtttcaatgaaatgggtaatgggacagattatatcagaatggaccgccctgcatctgctcgggcccctcgatacttacatggacatacaaaaaactttccaacattaccaccacatatttttaagaaaggtgccattttgaagcatgcaaagccaaaactagatagtaggtttattttggatgttaatgtgatagatggtacaatgatggctccatctactgcatttacaaagatctggcggatgcgcaataatggcactatagtctggcacaagggaactcaacttgtttggattggaggagacaagtttagtgactctcattcagttgacttagaggttcctgaggatggtgtccctttggagaaggaacttgacattgccgttgacttcacagcacctccattacctggtcgatacatatcatattggaggatgacaactccatctggacataaatttggccaacgtgtttgggtccttatacaggttgatgcatctctccaggactcattttatgatacctctcaaggtctgaacttgaatattccccttgatatcagtggctctaaaggacctcagattatagatatcaatgtccagcctactgaggaagatactgttcttcaaacccgcaatcctaatgctcccattgagcctgtgaatcaaatggttgataatgaaccaaggtttgagctggaaaatgaattccctataaatgaagctacatttgttggccctgctgcctcagcccctgctgcaacccctgtggcatcttcatcagtttcttatcctattattgatttatctgaaacaaccccagctgttccatctaatcagcaatcctcaactgtggatgtgccttcatcatctatggggactggtggaattaattctgtggaggagagtctacttaaagagcttgaggagatgggttttaaacaggttgatttgaacaaggagatcttgaggaataatgagtacgatctgtaccaatccctagactttctctgtggtgtttctgagtggtagtgggaccatccatttgcttgcagagttacgggagatgggttcccgtgacagagatgaataagaggctgcttgagaaaaacaatggaagcctcaaacgtgttgttatggatttaatcaacggcgagcagtattttagttgaaatgttagttaatagtagtttatgtaaaggtggcgacttgggcttctttacagtttaagccttgttattttgatttatatatcttatttcctatctcgatcttgagttgtggtgattcatcacaattgaacaatttgatctatcctatgtttggatttaagtatgttatgaactcaaaagtatatagcttaaaaaaaaaaaaaaaaaaaaaaaaaa

SEQ ID NO: 17345 - DNA, 340 bp, Glycine max
  unsure (1)..(340): unsure at all n locations
  Clone ID: PAT_MRT3847_115668C.1
aataatggatgggatgggggagttggtgagggaagttggtgagtatagtggttnattattggatgaggggtttgtggagtgagaatttgaggaggttgaggaattgttagatgaatgtagagnagattttgtggttgaggggggggggttattttttgaagatgttgagagggttnttaatgaggtnagaaaaagagtaggggagttaaggattgagtttaaaaggttggatggtgatgttnagaagttgaagggtagnagntagagaattggagtagagagaattganagagtttggggttgnttggngagantgttgtgaggagnaaaagggtgaagg

SEQ ID NO: 17346 - DNA, 248 bp, Glycine max
  unsure (1)..(248): unsure at all n locations
  Clone ID: PAT_MRT3847_115669C.1
accagtaaatggtagtgtacttttaacctctatctatnaaattaaaaccctagtaatcagtagattgaggtatatataaatgtagattcaattgcagatacagggtcatctcagacgagtggcagtcatcncaaagggtgcttgctgttgttattggctttanttgcgcatttgtaatttcattggtgcttcttgtcttttggttgcattggtacagatcacacatcctctacacatcttatgtggag

SEQ ID NO: 17347 - DNA, 645 bp, Glycine max
  Clone ID: PAT_MRT3847_11566C.1
ggggattgtaggggggataggttgagaaggaagcacagaacctctcataaatgtccttggatcatatgtaccctacgaatcactatcaaagatcaacctctggaaaacaagaaaggtcagcaacagaagctgacaagggtgtgtctttacaatcaaaacttgctaagcaatgtggtgtgaatgtcaaaatagcaccagagatagctataaatattgacaccaacccttttttcatgacacgagcaggaatcaacaagatagagcaggatgaccgaatagccatagagacaaagttgctgcagtcaaaggctcatcaatatggtgggattagtaccactgctcatagaaaggttggacctgttcagtatggtatgacaaggttgttgtagaagaatgttgtcttgtgaatagtttggccaggtggagcgttccttgtggagaataagaaaaaggttcttcatagtggagaagtagttgtctctggtggtgctttgtgtaagatgatgacatgagttagtgcttccacagatagagctagctttctctggtcaaaccttgtaaacattggtttcagttatcaataaactgtacaaccgaatttgagtccaaaaaaaaaaaaaacccacgcgtccgcccaagcgtaaa

SEQ ID NO: 17348 - DNA, 278 bp, Glycine max
  unsure (1)..(278): unsure at all n locations
  Clone ID: PAT_MRT3847_115670C.1
taacacttcagcctgatccatgtttaanatcaacatgtgtgcatgggnactaaagctttgctgttgtacncttacaatatacttgctagcacttggnggtggtggaatcngaggcngtgtacctgctcttcggagctgatgcaatttgatgnaaacaaaccaaaagnaggtgtaanctagccantnncntcaattngnttntgctagcatnacaattggggccagcttcannagtcannntgtagtttatgtgagcacggaatccaatggtacaaagg

SEQ ID NO: 17349 - DNA, 536 bp, Glycine max
  Clone ID: PAT_MRT3847_115671C.1
ggctcgagagcggatgtagttatgcccacaatgtcggagcggggactgcacattttctcgagcagcttgctgaataatgagctattaacgtttttgggaagagcactttgattggattggctctaacattctttggtggactttgcatactgatggttgcaccagcattaacatatcatcacatgaccaatgggatactctggaaaaagggggtacccatatgacagattatactggattcttttattttccaatatctttgttctggtattgccgtgattctaaacatcaccttagtgtaccaccctgtcctaaacctacccatgttgtaatttaaggcttacttggcagactcagatggcataggctcggccatgtaggctggtctacctctggggttagggaatggtcttcaatttatgggtgctcatgcaccaggatatgcagcagcagatgccgtccaggcacttgcacttgtaagcactttctggtgcgttattctgtttgggcagtcatgaaatcatcatgaataacat

SEQ ID NO: 17350 - DNA, 481 bp, Glycine max
  Clone ID: PAT_MRT3847_115672C.1
gaagaaaaaaaaaaaaaaggggggtttggatcctttctggtaaatttttaggggggccagaaaccccccaaggttttaaaaagaccggggaacatttgggaactccccccttccccccacctgttttaatgaaagggatttttggcttgaaaaatcttgatgaagagaaaatggtccgatgttgcgggggccccggggaatccctttaccccggggggggggggaaatttcgatccttgaattttgggcccaatacttggtgggctccataacatggccccgaagggggttaatggaatccatcaagggggcctcggggggggccgcccccgatcccccccatggggggggtttgaatccgaacaggcctccaatttttcaaagctttaataccctttggggggaggtcaaggaattggccttattggcctccccgaaaaccaaatcccacggccccttttttttttttctttaaaccttt

SEQ ID NO: 17351 - DNA, 422 bp, Glycine max
  Clone ID: PAT_MRT3847_115673C.1
aaaatttttaatttttaaaaaaaaaaaaaataaaaaaaaaaaaaaaaaaaaaaaaaaaaaaataaaaaaaaaaaaaaataggggcgcccgtttttggggttcacatgtttgtttcccggtgcttcccgagacaaaagccttttttttgtgttccttctattctcttttcttggccaggcttttccaaatgtttggttttgggggccccttgctctccccccttttttcggcttttgcacaattgcccttttcccctttgtgttccctaccaaaatggcccgccccctttgtcttttcagaattttgccctatttgtttgccttttgggcccccccttttttgggtcttttaaccccgtcggttggggtggttctcgccctagggcccctttattttgcgatccccttaagctccgctctttt

SEQ ID NO: 17352 - DNA, 500 bp, Glycine max
  unsure (1)..(500): unsure at all n locations
  Clone ID: PAT_MRT3847_115674C.1
gggaccttaaataacacataaaagaaacagaaaatgtaaaaaaaagaagttattattatattctacacaaagcgaaactatttttccaacactcttttgttttgntaaaatttatttcaaatcatcctttttttttttcaagtatcacttagcattagtaattttttaatcctaatttaaaagtgggattcaccaaaagtaatatttttttaataaatttcaattattttaagtgataaagatagtattactagcattcgtcttatattacatattatcataccgtataaataaatgtgtaatatgatccctactccaattccaatatttacaactccaacatttttatcctatttgcttatatttctttcttttatcagttttgtctttcttccgcttgtatactccaaaaatagggtattcattgatcatcttccatttttatcaatgataaatacgtgaccttaattcatgtgtctttattataacaaacacgtagt

SEQ ID NO: 17353 - DNA, 485 bp, Glycine max
  Clone ID: PAT_MRT3847_115675C.1
aatacctccactacttgaaaaaaggaggacttttttgccctcaaagccttttgttggtgacaatcgggtccttttgccttttgtcacctgcggcttcctccctgttagtaaaattgatcataatccataaggaggacgaaaaaggacacagacaatccagatgtgacagaattaacacaaagcacaaagcattgtgttacatcaaatcaaaccatctgtgcccttacgatctttctgctacaagtttgatcaacaaaaaaaataaaatcaattaacacaaaaaataaaccaacaagaaaaaaaagaagtgttagtcactgttcatcaagatgaacgacctattctcaagctccttcaagaaatacagtgacctgaaagaacagtcccacattgatgatgtggaagctgggaaggaaagtgtcaacctcgataagttcttcgacgaggtggagaatgtgaaagaagacatgagactagttgagaag

SEQ ID NO: 17354 - DNA, 297 bp, Glycine max
  Clone ID: PAT_MRT3847_115676C.1
ggcggtacttccttcgcagccgaaggatctccgacactcaaatcttggacccaacacaccgttttatcacataatcactgacaggggccgcaactcctatgtacacctatacaggacgaataaggaacaacaatttacttttgggggggggtagaaactccctacttaactcattgaacctcaaactcggaggaacaaaaatggggcgcgtgcctattgcaaacaaaggcctttgcttgcaagtgctcatccgtctgggtcgctctcgttggggccggtccccggtttggccccatg

SEQ ID NO: 17355 - DNA, 289 bp, Glycine max
  Clone ID: PAT_MRT3847_115677C.1
attctactttgtcaaaaaatttctctgaagaggtgcactcatgcagatagagtgctcatagtgctctaaattagcctgtgggtgctgcaatttatgggctagaacagtctccaccaggacgcatatgtgctgcaaggaatatcggacagtgagaggcctgtaacataccagatgactgcacgattgcaaacgatgggcgatgatggatagccgccactgtcgtgaagtacagacaaattggctgttggcattatgctatgagaaaggtaagacagcgagccgccttatt

SEQ ID NO: 17356 - DNA, 268 bp, Glycine max
  Clone ID: PAT_MRT3847_115678C.1
cgccaagctatgtatcaacgatagcactctaacgttgcggacactaagctacggcagcatgatcacaacgggataggggatgggacgtgtataggctgtgctatctatgaactaaaataatgcgctctgagactctatgttggacacaggaagatgcaacgaaaatgcattctgttgcttatgttgcgccacaagagcggctaaagcgagctgacaagagagaaacactgtctgggcagacacatgtggtgaactaagaccaatattc

SEQ ID NO: 17357 - DNA, 332 bp, Glycine max
  Clone ID: PAT_MRT3847_115679C.1
gggggacaactaaaaacctcacaattttataatgggaaattaaacccccatttttttttgccccaaattttgggggaacacaaaatgggaagttttggatcccaatccccccaaatgaagctggcacatccccagttaacacttttttgggggatgaaaaaacaaagttccattttgaaagcaaaaatgtcgatgcgttatttaaactagatgttgaaaaacaaaaaaaaaattttccccgaattccacttctttgcctgaggatgaaatccaatgaaccccactgcaagtttaagggagttgatcttgtctgcctaattatcaggaatttc

SEQ ID NO: 17358 - DNA, 479 bp, Glycine max
  Clone ID: PAT_MRT3847_11567C.1
ctgcaggtcgactctagaacattaatctagcacacatcaagcaatgtaaacttgaatcacacacacaaactcatcaagaaactcaccaagaaaaatggagaagatgagcaagaaagagatggaagaaaaacataataacgaaaattgtgtattttgcgaaaacggaaaagtgtttatctcataacaaaatgcttcccttattgtgaaattatacttattcccctacttatatcagtaaagacagaattatccctttctctaatactctcctttaattctgtatctatcatttaaactcaacattacaataacagtaaaagaaaacatcaaatcacagatacaacaccctcacagcacttaacagagatcttcactgcacttcaatcactctcaatctgctccttaactctttgaactgatcaatcttcaatggtttagtgaatatttatgctacttgcacagtagttggacaatactta

SEQ ID NO: 17359 - DNA, 275 bp, Glycine max
  Clone ID: PAT_MRT3847_115680C.1
atttcttcgtcacttttctttatgtgacccgtataaatgtcggcttttgggcagtggtatggaagatattgcggactcatgtgtggctgattaaacatgacgcttcatttgagattatgacaaggaaaattgcgacctgaaccgtgatctttctttgcagggcgtaatatcacgttgtcctcatgatccacggcggaaaggcccacctttcccctcaccgtgcctttcatgtcatatggcgccttgtgcaccaggtcgccctggccaagatctgg

SEQ ID NO: 17360 - DNA, 440 bp, Glycine max
  Clone ID: PAT_MRT3847_115681C.1
ggtaactcatgttcttggtagccatttttctcttatcatgttgtcgaagctttatttcttgtagacgtgccaagctacaacgtatcttttatggttcttggtggcttgaataaatggattgggtcagcatattcctcttgcagaccagccaaataagcatcgacaagatagtcttcggataagtgaagtttacaagaaatcacatcaaatgcattattaaattctgccaaggtgccatgctgttgcaaaaacatcaaatctttaaggcgatcttgatggcatgtatggtggtgcctttctctgtagccatgtccaagattgatggaggcataataccttttgcacgttagctgatgaagctgattagaaatagcctccaccatgtatgaaagtgcatcaacctttgcaagcttttgctctatttgaacaaatctttcttc

SEQ ID NO: 17361 - DNA, 354 bp, Glycine max
  Clone ID: PAT_MRT3847_115682C.1
caccgttcctacaagtctacggacacggctataaagcgtctgccatactcaagtatccacgggtgattgggtagatttatcgactttcttacttcctttctagtagggcttccactacagtgaataatgtgacccacttctatgctatacaaattgttcatatgacccctattacacactgtgaacccgagatcaaggtcatatttgtaactgatccacttattggccttgtcctaagctactacctggccatcgagtcaatagccggatctgcttaatgctcatcctagagccccaaaaggtgtcttagggctgtgatgaaagacaggggcaccatgttctgcaggattcgct

SEQ ID NO: 17362 - DNA, 192 bp, Glycine max
  Clone ID: PAT_MRT3847_115683C.1
ttcgattgcaacgactcatgtgactacaaaccaaccaggtgtttcccctaactgaatcccaaggaagcttgatggcagctcttctggccaaaataaaaaataattgttccaaatagatatggagggggcagcgctcatttttttttttgaataaggaagctgatgtgttctgcctcacaatataataagttc

SEQ ID NO: 17363 - DNA, 246 bp, Glycine max
  Clone ID: PAT_MRT3847_115684C.1
caaaccttgctctatactacacagtacacacactagaagaataatggcttccatcctccactactttttagccctctctctttcttgctcttctcttatcttcttatccgactcagtcacggctacgtgaccaatatgccttgttgttctacccgttcgaaatgatcgttccacagtgctccattgcggctgcctcccagaaagaacccctctgatgctagtaccagtcctggtggacctcaatgg

SEQ ID NO: 17364 - DNA, 497 bp, Glycine max
  unsure (1)..(497): unsure at all n locations
  Clone ID: PAT_MRT3847_115685C.1
gagcggccgcccnnnnnccnnaaaaaacgattttaaagtccccaaacaacaaaaaccacggccgagggggncgggggggaaaaagaaacagcgcccccccaacgccaaaacccaaccanccacgcggggnaacaaccaggcaaagaaaggagaagcacaagaaacagcaacaaaaaaaaaggagcacggancncggcgcgaacaaaaancagaaccgnggaagggaaaaccacgacacaccggcagcanccacacccggaggggaacagacagaaaaacccgcccccgacanaagaagcgcccggaannccanaaagacacccccccaccgggacacagagggaggagcacaaacccanagcgcaggcgccaccggaaanangagcccaaaancacggcggacaagcaccaagccaccggcccaggcaaacaaggccccggccaacgaggcaaggggcncaaaacccaaaagaanaaggggcccacccaaaagaagc

SEQ ID NO: 17365 - DNA, 180 bp, Glycine max
  Clone ID: PAT_MRT3847_115686C.1
tttgttgcaaaaataaatatccattatgcaacgaaaccacatagtgattttgagtaaaagagaaactcatggtttgtactgccagtctcacaatttaacaaaattttatatgcgataaaccaatactcgatctgataacctaaaagtgaatccagataaaaaacctaacaatccataact

SEQ ID NO: 17366 - DNA, 296 bp, Glycine max
  unsure (1)..(296): unsure at all n locations
  Clone ID: PAT_MRT3847_115687C.1
tttcttttttttttttttanccaaaagcgccgaactttgttggaccggcaatttcaaaacataatcttaccttgtttggatcccacactggattttccaacaaaacccgagagcatgttgctgttttcaaaataactgaatgagttgaccacacactcttttcccgtatataaaaagagctttcttttaccgatcaaaattgaagaatggtttgctttcaaactcggtgaaaagtgatggaaaattaaagggcttagaatgttaaaaaggaagcccttatatttttttgaggtttt

SEQ ID NO: 17367 - DNA, 474 bp, Glycine max
  Clone ID: PAT_MRT3847_115688C.1
catctatgtatgacgtcctccttctttgggggggggggggggggaggctaaagggtagccttaatcggataggaggatgaaagataaagacaagacaattcggggttggtgcggttaaactcacaggcaggcgccatgacgcgaagaagaggctttatgggcaataaaaggagggacccaacgaccccagggaagagccaatgttggcggatagcgggagagtaacaaaggttcgtacgtatagtaggaaggtaaatggaatgcgtattagttggcgtaacggtggttaacctgcgtttataaggggcaagttgtagaagttggaagtacaaccgtacgtggcgtggttagtacgaaaggtgttcccgggtggcgagtgaaattgagaatacgtagtttagtggttatgttagtggggagtttgcaactacaagttgtaaagataaagctagcagttgggcagcttggtacaat

SEQ ID NO: 17368 - DNA, 325 bp, Glycine max
  Clone ID: PAT_MRT3847_115689C.1
ggcttcacaaactcacacactttgtactctccggggttccttgttagatccacatctctctacttctcccttaaatggctccccttctacaatgttccatgcccctcctctatctttccaatcaagctctggtaccccttaccagcatctccaacccaacttcagtttccctttcaattaacgtaagaacttttccatactttacattgcatcccaaagggcttccgtttcagcttagatgtgctgcaaaaccagatacagtgaagaatgtatgtgacatattcaagaagcaattgccactgccacatgaataatctgttactgt

SEQ ID NO: 17369 - DNA, 1507 bp, Glycine max
  Clone ID: PAT_MRT3847_11568C.1
ttctcacatccgtgtgagcctttagcgggatacaccacagagccaccgatgaatcctccgtagtccggaagaccgaagttaccgatggcgccatcgcgcttcgccttcagcttatgcggggacagaacagttatactgctcttctccaccacaaacctggcatcaacaaccaccaccaccaccaacaacaacaacaaaacagccgcagccacgaaaggtttcatggtttgtttgtatgtgctgttgttgttggcagtgaaaaacagaagaaaaaacaggggaagcaagagtaagaagaaggacgcgtgggaaggaagactttgcaagttaccggtggaaagttttttgcttaaagagagtgttgttgtgttggtttaaggtgtggagggttgcgtttcgcaatcaaacggtgacgtaaagggagggtaagcaaacgacaggtgaaaggaacaggacctcgtgctattttcctttgtttctatggcttctgcagaagtagagttccgatgctttgttggtgggcttgcttgggccaccgaccacgatgctctcgagaaagccttctctcaatttggcgaaatcgtcgaatcgaaggtcatcaacgatcgtgaaactggaagatccagagggtttggatttgtgaccttcgccacagagcaggcgatgagagacgcaattgaaggaatgaacggccagaacctcgacggtcgtaatataaccgtgaacgaggctcaatcccgtggaaaaggtggcggcggcggcggcggcggctacggaggaggtggtggtggttacggtggcggcggaggttacagccgcggtggaggaggatatggtggcggaggaggccgccgtgaaggtggttataaccgcaacggtggtggaggaggatatggtggcggtggcggcggatatggaggtggtggaggttatggtggcggtgggagagaccgtggatatggtggtgatggtgggtcccgctactcgagaggaggcggtggttcggatggaggaagctggaggaattaagattacgtgaatttttaggtttttagtgggtgaaaaaatggggggaggttgtgttgtatcatccccttgccttgatattaattgtgataattttaggtttggaatatgcgttgtggtttgagcatctgttactgttatggttgggtttttgacatctgataatgaatctgtgtactggaaggattactgggtcttggtcatccagattgaaatacctgaaaatccttgctacttatacatctcaatctgctttgcagcttggttagaagacgataagtcccaaacaagtgttcaatgttcttttcttaccaattctatatcaaaattgtattaaaaaaccaatattgtactcgagtgaatttgctaactcaaaataaaatgaccacaaatttcaggggaaaaaaaaaaaaaaaaaaaaaaaaaaaggaaaaaacgatctaaaggaaccaaactaacaaacgcgaacatgcaacaacag

SEQ ID NO: 17370 - DNA, 204 bp, Glycine max
  Clone ID: PAT_MRT3847_115690C.1
gcaggcggaacgtattgctacgatgccatagcaccccacgagcagaaggcaaacgcggcaaccatggatccggaggctccatctactcgagaaagggaactactctgcaatcacggtggtccttcgtccgccgcatccagagacacaagaaggtcgactaagctcccgactacgtggagaaagtctacaataaactctccgaca

SEQ ID NO: 17371 - DNA, 175 bp, Glycine max
  Clone ID: PAT_MRT3847_115691C.1
atctttgtgtgagtacacagctgttgaggacatattgttggctccaaaaccgaagaatttgcactttgctcatgctgcttctcttcctctagcaattgagactgcttatgaggctttggagaggactggattttctcctggtaagtctattcttgttctaaatgctcctggagcg

SEQ ID NO: 17372 - DNA, 983 bp, Glycine max
  Clone ID: PAT_MRT3847_115692C.1
tcccacgcgtccgccctaattcacacccaaagagaaaagaaaaaaaaaacaacagtggtacgtgatgccaccgaagttcgatccctcgcaggtggtggacgtgttcgtccgagtcaccggcggcgaggtcggcgcggcgagttctctcgccccgaagatcggtcccttgggactctccccaaagaagatcggagaggatattgcgaaggaaaccgcgaaggactggaagggcctccgcgtgacggtgaagctaaccgtgcagaaccggcaggcgaaagtgacggtggtgccatccgccgccgcgctggtcatcaaggcgctgaaggaacccgaaagggacaggaagaagacgaagaacatcaagcacaatgggaacatctccctcgacgacgtggttgagatcgctagggtgatgagcccgcgctccatggcgaaggatcttagtgggaccatcaaggagattctcgggacttgtgtttcggttgggtgcaccgtggatgggaaggaccccaaggatctgcagcaggaaatttctgatggagatgttgaggttcctcttcattgacgttagtgaaatttcagtgtttttttttatttgtttcgattatgttgtttttgttttcggcaattttggttttttttttacaaggataaaggaaattgagtcatagaaatagtatggtagttaagacttaagagtgctggttggtaaatgatataacattgttggaattttgagtaattttgtgatggagtggtgatttgtaggggttgccaaaccatttgtctaattttaaggttggatcgtaattttgttatttgccgtattgtcgtgtctttttgagttatacctttgtattactggtatttatgagaatgtggttaatgtgtttctaattgtaattgtgttatgttgagacagaataccttatattgccatgaaaatttaaactatattataaaaaaatataataaatttattc

SEQ ID NO: 17373 - DNA, 495 bp, Glycine max
  Clone ID: PAT_MRT3847_115693C.1
aaattattctaaaatactctctttataggtgattgcattatttgctactattaatatatatatatatatatatgctgcatactttaattttcttagtaggtgagacttattgcgttcctcttgaaatcccaatcacaggaattgacagtgagaagtcatggttaatgtcacaactaaaatttgagaaaaaatttgggcaatcagctgttttcatagcctcaacacttatggaagatgggggtattctaaaaggagcaacttgtgcatcactcttgaaagaagccattcatgtcatcagttgtggttatgaagataagacagagtgggggaaagaggtgtgacatatcccttggctacttatttaagctggagtttattatatgtatatgcaaatgtttgtataactgaactaaattccaatttcctttcaggttggatggatatatggttctgttgcacaagatatattaacaggattcaagatgcactgtcatg

SEQ ID NO: 17374 - DNA, 1300 bp, Glycine max
  Clone ID: PAT_MRT3847_115694C.1
cctagcgctgggtcaacgcgttttaagcgtgattatttcattgcgcagtaaaattgagatgaggaagggaagaaatgaaaagaaaagaagcagagtggtaaacaaagagaaacaacaaaacccagaatctagagactaataacggctcttgctttgtgaatagcataccatagcaacaacaacaacacagaacacacaaagaaaaaaggtttcattggatcgtaactggggggcacttgtccaaattggaaaattcccgagtgattagggttttgatcggagggtgtgattgaaaggaagactgtgcttgttcattctctccgtgggggttgcgtaaaatgggcatgggctctgatcttttcaggggttcatattgtggatttagagctacggtggttgagcattcgcacttgcagattgcttaagatggtgtttaatattgcttctttgagcatggaagaagattgtctatattaataacagggaatcagttgatcaggatttggagaaccgttcttgggcacactataaagccttctgggtcttcatttttgttttcttttttgtctttttgtctttgctgggggatcattttggtttagggatttgacacaaagaaaaagctgttgattcttagttggctcacaaggaaactagagtatccgatttcagtggtcctttttggtttctgaagcagccctttgaattgatatagttagtctgagcttaacactagtgtaggaagcatatactgattggaattgtgttgaaccatttgtcgactttaagtagttagaacaagtggttgctgtgctgtgcattgattttgcatcagtttttagttgtatagtttgagctgtttgaatattttggtgaagggtagtaaacgttggtggtttccacaatttgtgtttgtagtaagaggcttatggaggaatattaaagctggaaatgaatgcggtgacatggtgcatggacaggagcatagttgctggttcgttccctttctggaacagggctactggaaactaattcaagcactctcaaatttagaagaattttacactaggcgtatttggattttgtgcaatgtcgcgctgttttccatttccaccaccaggatatggaaagaaggctataacagatgaagtggacttattagaaaaggaaaagcagaaagaaaaaaaacataagaaagataagaaggacaaagagaagagggaaagcaaggaaaagagagagaaagaaggaagagatgggaagcataaggaaaagaaggacaaaaaggaaaaacacagag

SEQ ID NO: 17375 - DNA, 319 bp, Glycine max
  Clone ID: PAT_MRT3847_115695C.1
ggctcccaagagacagggagagactataccttaagggcataagaactatgagctcatggttaatctgcagctcgggatgagacatgctgttggaagacctgctccaagtacatatcttgatttgacgtcttctgcatttgagcctaaagaaaaagtgagggctctattttccccagaaggatctaagcacacgccacctaaccaatcttgtgagtttagatggtagactactgccccgtattgttcagggctctcagagaattgctcaaaggggatcctgctgattacatgctatcattatgtgggaatgatgcccttc

SEQ ID NO: 17376 - DNA, 674 bp, Glycine max
  Clone ID: PAT_MRT3847_115696C.1
aatcttaataaattgattattctttgcacaagaaaaattacatacaatataaattatgtatctattttacaaagtaagtaattgaacaagtagtttgaaaaaaaaataacaccaactaaaacatgatccactaaagatgacactaataatttcctccctctaattatgtttacccaagacattgtacctacagaaaacaattaaaatatgaaaacaatattacacacaattgaaaataacctattctgttttagtactcttctaaacattttttccccacgtttctcacagcagcattcactcacatattacagttgttcatgaagttgcagaagctatagcaccatatacttttccttcacaatatggggtaaaacagggaaaatcattgacagtattatttaatttaccaaaaccattgaagaactcatccaaccttgttgatttagcaggttcatacctttgtagacatgcttgtttgaaaactagaagaaaatggattcaggaacacactaggcctaccgtattcactttttatatcacaaacagcatcagcacctccaagcttttgcggtgctggaagaaactgtgattcattgggaactttatcttcaaacaccacccacaccatgcttattttagtctctagtgtccatgaaagaagagttggggtt

SEQ ID NO: 17377 - DNA, 773 bp, Glycine max
  Clone ID: PAT_MRT3847_115697C.1
tttctagtactgaagtttaccccattgcttcaaagtttaggggaagtaattgatgtgtccatgcttcatgtgaagcctggtgaggcagtggcagtgcactggctgcagcattcactgtatgatgcaactggaccagattggaaaacactgaaactccttgaggagttggagccaagaatcatcaccttggtggagcaagatgtaaaccatggagggtctttcttggaccgttttgttgcctccttgcactactactccaccctctttgattcccttggagcatacttacacaatgatgattcaaaccggcaccgtgtggagcatggccttctctccagggagatcaacaatgtgttggccataggaggacctaagaggagtggtgaagacaattttaggcagtggagaagtgagcttgctaggcactgttttgtgaagcaggttccattgagtgacaattcaatggctcaagcacaattgatattgaacatgttttcacctgcttatgggtatagccttgcgcaagttgagggaactttaaggcttggatggaaggatacaagcttgtacacagcttctgcatggacctgctgtaattctagctagatatatatcttaataaaggttcatagcttttccaattgggtcttaaaagtgttcaaacttcaaagtagtagctggagatcaattgagctgtatattgagaagatagattgcaactttttaggggattaataaataattctgtagccattttcatatgttcacccacc

SEQ ID NO: 17378 - DNA, 156 bp, Glycine max
  unsure (1)..(156): unsure at all n locations
  Clone ID: PAT_MRT3847_115698C.1
aggcaaggggactctagtaatnnnnntgcttctcatttggcctgcattgataactatgcattcaaaattgtatacatttgatatttgattttgggatagcagggataagctctacctagtgggatatggctgggttgtttttgctcgagccgaatt

SEQ ID NO: 17379 - DNA, 373 bp, Glycine max
  Clone ID: PAT_MRT3847_115699C.1
ggcacttgtggattcgatgctctagatcactagaaacagagagatgcaaacgaaagtcctcgggttataggttccttcaatttttgaaacatagacgatccatgcggaacatgtcagacttctgcttatgatacactgtgtatagagctcgaactcatgatgcgatatgcaccaactactagcttgctttgaagacacacaacatctttagcttgaagaccattacagaggagctcgttgtggctacaaacgagaacaataatggccaacactatatcttactctccatagcaggtaatcgacaaccttactattctgtcggactccctgaatacgatgccatggacacatttgttgtaattatagttggcgc

SEQ ID NO: 17380 - DNA, 676 bp, Glycine max
  Clone ID: PAT_MRT3847_11569C.1
acaataatatactaaagtttcattaataaaatacttgtgaccaaactattgacatttcaaaattcttgtccctcatgctatgatgacaaaaatctgatcgcagtagtttcaactttcacacaaaccagtatgtatctctcacattcatgagctggacaaaactgtaattaagcaagagatctttcatacatgattctcccagggaagctaagaagaagattctccctcaacatggttccttttcctgtgaaagatgccactgatattatgcaagagaactttctttgaaactgacaccttccccttttctaacttcttcatctccaccctgtttggaggtgaattctgaatttgaatcctatagtgctgaggagatagttctggggatatcagtgtctcagccaatatttgagatgcagcttctgctgctttcttctgctctcgttcgcgccactttctgagctcaccctccacagccctctttgctgcttcagccatttcagcccttttcaacgctgcctgtgtttcactcttcatatcctcaatttccttttgagtttcctctaacctctttagaactttattttcgctggcctttgcagcttcaacctgtgctgaggcagcagccactttgatatctgctaatttatcagactcctcaaccttatgaactaag

SEQ ID NO: 17381 - DNA, 304 bp, Glycine max
  Clone ID: PAT_MRT3847_1156C.1
ctaagctcggaattcggctcgagacggctgcgagaagacgacagaagggcgtgtcccttgtgtcgctaccctatgccctctgtccacgactagttcatcttttattatgtttataaatcttatcattatcttatgttgaatattgtgtggttgatgactgtgttagaattcgatatctttcgaagacatgtgataacattgttctaactttgtttaatttctttagtttatctctcttttagaacaagaatcacaatgaattaatgcctgcttaattggatcaattgtgattgtctcaacttta

SEQ ID NO: 17382 - DNA, 442 bp, Glycine max
  Clone ID: PAT_MRT3847_115700C.1
aaagattcttctttctttgggcactctttgtgttttatataaatatatacaagcaggggctgagaaagtgaactcagcacttctctaatacaatgtgtatctcaaacccttcaacaatgtagcccttaatttttaacatggtatcagagcaagtacaatcccgttctgactgtttccggcgttgccaccgtccgccgccatctccggccgccgccgccgtcttttcttccggcaaacccaggttaggtgcgccttgaagagcgcgatccatccctagaagtcgcgtgtcctgaatctcagccacgcgccgcctccggtacgtgcagtccacgcgccgccctccaaaagctcgccggaccagttccaaaagtctcgccatctccctctgggcacgtttcagcccctgtttcaatctcaactgttcccagctcttgcgtccctt

SEQ ID NO: 17383 - DNA, 292 bp, Glycine max
  Clone ID: PAT_MRT3847_115701C.1
aggatacatgtttaaacctttaaaaaacaagctggagcgaacatagcaaccataggtttaagtcaagagtttcacttctacacactccgagaaaagaccattattatgtcattgacctaagaccaacaccactgtaattcgtatcgggatgcgctgccctatgaaaaagttaatgctacgtccaagaaaataatgaccaatctacgggcctctattattgaggtccctgccaccctagggtgaggtaaaaaccgattttcgactaactcactgggcttaaaccagaactcca

SEQ ID NO: 17384 - DNA, 401 bp, Glycine max
  Clone ID: PAT_MRT3847_115702C.1
gggaacaggacaggttaacaagatggatccttgatagtgggatttgcatttcccattaaaaaaaaaagagggaattttccaatggaattgggaaccaaaatgattagaaaggaggagggaagaagaagcaacccaaacccccccatttacattttacttttacataacaggtttgcttatgcttaagctttttttgcagtctgcaactttcacagttatcaagtggggataaaataaaaacaagaagctaaaaattcccacgtccttccagagaaagaagaggggacaaaaccgaacccgaaaccgaaaaaaacgtgaactttttttgtttttttattcaatttggagagagagaaaaaaagtttggagaaatgggatgattcaataggccatgcacttga

SEQ ID NO: 17385 - DNA, 279 bp, Glycine max
  unsure (1)..(279): unsure at all n locations
  Clone ID: PAT_MRT3847_115703C.1
gnngaggatnggttntgttgaagatgtngaatgatctaggcaaggtcagaaatgttaataaagtttcagacactactttcantgtacttgccagactgggtaagcaaatcgctttaaaatttngaagcnagatcagaaaactggtgacttgntngaatacanaatgcagggcagcacantgttagggcatattgtcttccttgtactagttctgncaggnccacttatnccagatancatncgctgntatagcagtggangccggacattgtattaccg

SEQ ID NO: 17386 - DNA, 677 bp, Glycine max
  Clone ID: PAT_MRT3847_115704C.1
tcgacccagcgtccgggcaattctccacctcacgcagaaccatttctgccacaagctcttcttcgccaaccaaacggtgcgcgtcaagaagaaccccgacctccccctccggttccgttccgacggtaccttcaagatcctccaggtctctctctctctctctctcttcatttgctttcatttttgaactctttgaaaatccttccatgtttggcaggtggctgatatgcactacggcactggaactagcgtgacacggtgcagggacgtgttggcctccgagttcgagttttgttccgatcttaacaccactcgttttttaaagcgtatcattctagcagagaatcctgattttcttgcctttactggtacttcattaattaatcccccccgtttttttacatcgacggttaaagtagcatagtagtattaatttgctttctaaccaaaaataaaaaaggtagcgtaaatatatcttaaacaattcttgctctgactcagtgtccctttctcttccctgatgaacaggaggttaagacaaaaaaaaaaaggtgtgaaaaatgttacggctatattgcacgtgtaataattttttatttgatagcttgtatttgtaacggtaatctggtgcgtattgtctatataaaaatgtttacctatttggctaatgtttggtc

SEQ ID NO: 17387 - DNA, 494 bp, Glycine max
  Clone ID: PAT_MRT3847_115705C.1
ttttttttttttttttttttttttttttttttttttttttttttttttttttttttttttttttttttttttttttttttaaaaaacccaaccccggaacaagggttttaaacaaaaggggcccccccaaataaaaaccccccaaccccaaatattattcccccgccccggaaaaaccattcaaaagctttttaaaaatttggggaaccccccgggggcccttaaaacccccgcccctaaaatttttggaaaaaatttttggggccccgggcctttccaacaatccccaaaaagttgttttgggtttaacaacccccagctcaaaaagcttttgggggcccccaccggaatccgcgaaaaaggccttttcccccgaggcatttttctcaacaaggggggggaacccaggggcaaacaaaaggcccttgtcaaaagggtcctgaagggggccttttttccaacccctcaacaaccccttgaaggatgagcggccc

SEQ ID NO: 17388 - DNA, 247 bp, Glycine max
  Clone ID: PAT_MRT3847_115706C.1
cataacaaaatatcgggaacaatttaaaatagtccaatgggcagatgtacacctaaaattcctaaggaaactaacatggccaatgaatacgggacattctgttaaaaatacatatgccatgtaacttagggtgtcgaccacatggaatattcaaggcccttctttccaatttccaaaaatggtatttctttgatattattagatgcttgtacttgctagaattctgtatcatatggagcactgggtg

SEQ ID NO: 17389 - DNA, 247 bp, Glycine max
  Clone ID: PAT_MRT3847_115707C.1
tgacaaaccgcccttctttgataattttgattacgccataaaattgaagctccttttcagcccatgttaaaccttttctagttttctcttggcttatacacacgcaaacacacgacacaacacatgtcacatgttgttggcttaatacgcagagggagtgtgagacgtttgaaagatcagaatcggacaggctagcttagctccatgtctgactcactcctaactttccattctctttcaaccattc

SEQ ID NO: 17390 - DNA, 490 bp, Glycine max
  Clone ID: PAT_MRT3847_115708C.1
caggcaggagagggggtacttctacgactaaagagcatattctatgaacttattgaccccaccatggtgagtgaatagttggcgctgacatagatcaaggacgggaggccatccttccatatccaagacgactgaacttgatttggcgcatactctttcttgctgacctaggggtgtatggcctcacggatacatgtctctaacccctttccgactatgcgttttctgacccatccaatgactaagtatctggagatcattggaaccatgttaacgatgaggacgcgttcggttacgctaatccaaaagagggttaggagaaagtgcttgtcatttgcttaacgatgaacgacaaattgatagcttatgctttctatcctagattttctgagtctatctgccttaaaactgatgatgcggattatgctggacatgattgactgagcaatattgtaactactgtaacaatttcgataagattgctaagaaa

SEQ ID NO: 17391 - DNA, 579 bp, Glycine max
  unsure (1)..(579): unsure at all n locations
  Clone ID: PAT_MRT3847_115709C.1
tacggctgcgcgaagacgacagaagggggattttcttgtaattttgaaaaaacacagtgaaagtggtggcacggcagcaaaacaagcgacggggaagcacttcctcttccgatttgggaactaaccaaacagatcacagcttctagggttttaggttccgtccaattagcggtttctctctctctctcttcagaaatggataacagtagctcagaacagaccgtgcaagatggcaaactctacagaaacctcaattctctcatcgtcgctcatcttcgcgacaacagtctcactcaggctgcaagtgctgttgcttcagcaaccatgactccactgaatgtagaagcccctcctaacaggcttctcgacctggtcgctaagggtcttgcagtggaaaagggcgacatcacaagaggcactggtttcactgctacactgcctctgcctcacacaacagctattgatttcagctctgtgcctgatgtgaaggttcatcaaagagcttcccaagcatgaaacgcgacaccttttcagacacaagaatatngccagatgtgctanggttagtgctgatggaag

SEQ ID NO: 17392 - DNA, 351 bp, Glycine max
  Clone ID: PAT_MRT3847_11570C.1
actttatttacaccacatagtcccacactctctctttacagaatgagatagacttcgggggggtttgatatggtagcgggggcctttgacgctaacttagaacgtgtgatgctattgaataacagcgagaatgagcatcactctccagatgactatgatgattcgcagatctgggaaatcgttcatggaaaagggggagagggagaagatgcataggtgttcgtacggatgatggtgatgataatttttattctgagaagatgaatattttcgaaagaagtttttatgatatacgacggccatgtccacatattatatcataaaaaaaaaatcatcttacaaggggattat

SEQ ID NO: 17393 - DNA, 321 bp, Glycine max
  Clone ID: PAT_MRT3847_115710C.1
gcgaagcatgctctctctccacatagaccccatccgaaaacacaaacctagtcacgttgccgaaacccctatggatcctctaagagctgcactctcttttatccctcaaaaaccaaaaccctaatggcagagcgcggaggtggcgaccgtggcggggaccgtggcggtttcggaccctgctttggtggaggaggggaaggaggtcacgggggctaagcccggcgccctggtgccggccgcgtgaatccggagccttgggtcgctctgaccaaactggcccgccatctgaaagaagcagatcaccgagccctggaacagatc

SEQ ID NO: 17394 - DNA, 580 bp, Glycine max
  Clone ID: PAT_MRT3847_115711C.1
gcggcgctcgaggcggccggattcttatcgttctcaatccagctcggggagatccaaacgaaacgcaggagagacagacagagaagagaatggacgctattgattctgtgttcgatccgctcagggaattcgccaaggacagcgtcaggctcgtcaagcgatgccacaagcccgatcgcaaagaattctccaaggttgctgtgcgtaccgcgatcggtttcgttgtgatgggattcgtgggttttttcgttaagctcatcttcattccaattaacaacatcatcgtcggatctggttaggatgaggggaatcgcaatcgcctcaggaattcaagttatcaaacaaaatgagaggcagaaagagttccaacttcaaatagatagctcaatgaaattaattgtagttctgctgtatttcatttttggtttacctttgtatcttcggaagcattacaattttatttgaaatgtaaaattttgtttttccatgtgctggacctttagacacattgttttgattcaggaaaagaatgaaaaatatctatagttagccgtcaatcttagttctgcttttcctcctc

SEQ ID NO: 17395 - DNA, 277 bp, Glycine max
  Clone ID: PAT_MRT3847_115712C.1
cgggggggggacaacgcctggactgttcccaccaaagtgaaacccaccggcgagccggaccgagagggggccatgagacagacaacaccgaggaccccgccggccgaccctgaagagagaatgaccaaacaaaagagagaaacaaggaccagcggggccaatggagacccgcggaggagaccaggacgaaagatgaacagaatgcccgacaccagtcgcagggcgaacaacagaaccgcgagggcagccagccaaggacggaagaagaacagacgcg

SEQ ID NO: 17396 - DNA, 1449 bp, Glycine max
  Clone ID: PAT_MRT3847_115713C.1
attgtggtagtaatactaataaccagtgactaagcaaaaatggttcagatatcagtttcggtggtttcactctatcgccacccagttccgatggctctcctcgccgtcacttcgcgcgctcccttcctcttctccccaaaccctaaaccactttctccatcctctttctactcccacctctctctctctcctcgctctcccaggttcccttctctccgcttccgctctgccaccggagacgccagcgacgccggcaagcccgccggtaagatctccgacgagtggggcgaggactacgatcccgaggccgaagcattgacctccaagcttcccgactcggaccctcccaaggacgaggacgagtggcaggaaggaggggcgcccgacgccggcggctacgtcgacggcgggaacggaactccggtcaccggagctgaggatccggcggaggaggaggtggacgataagttggaggcgctgaagcgtgctttggtggatactttgtatgggaccgagttagggattcgggccgggtcggaggttcgagctgaggtatccgaattggtgagtcagttggaagcggcgaatcctacactcgcccccgtggaagaacctgcccttctcaatgggaattgggtgttgctgtacactgcatcttctgaactgttgcctcttctagccgcgggaagattgcctttgttgaaggtggacaagattacacaaacaattgatactagtagctccactattataaactccacaacattgtctagcccttttgcatccttgtctttcagtgcatctgcctcatttgaagttcgaacccctacgagaattcaggttacatttaaagaaggttcaatacaacctccagagataaagtctaatgttgaactaccagaaaatgtagacatttttggccaaaagcttagcctacagcctctgcaacaatcccttggcccacttcagggtctggtggaaaacatatcgcgtgtcatttctggtcagccacctcttaagattcccatccctggcgaaaggacaagctcctggcttcttactacatatcttgataaggacttgcgaatatcaaggggggatggtggtcttttcgttcttgccagagaagggagtccacttcttgatcagtaggaaagtaatcatactcctttcttcttcccccatgtcatccccgtcccctgagaataatgtgaacggcgtattcaaaatctctccattctttttgtttattttcctcttctcaagctaatgtatatttaaaggagtgacgggttatgttgtcaggatgcaattctacaatctataaataatcagatagataatgtcaagcccttgttagctttggcgaaatattgatttggggatggaatatgaaatcgattttctgaagttactcttgagattaatgattatgagactgttctcagc

SEQ ID NO: 17397 - DNA, 266 bp, Glycine max
  Clone ID: PAT_MRT3847_115714C.1
acggctgcgagaagacgacagaagggatcattatctactacacttactttggacttgcacaattgcacaacccgccgcgatttgtgcatacaattcttcgggcacaatgtcaacgagaggcctactagatttaccttctgtcaggacacgaccgttgaagtttatgaggatgtgggagatttttagtgatgataaggatctcacgtcatccgagattgcctattactgggatgttattagtgaagagatacttgagggagagatgc

SEQ ID NO: 17398 - DNA, 341 bp, Glycine max
  Clone ID: PAT_MRT3847_115715C.1
tagcctttaagtgaaatcctgagcttccattgtgcgcactggtctattacaacgaagccctctccatcctgttctatctgtgactagcatcatggcctcaatagcagtgttattgttggctatgtgtgtgcttcctgcaattattgtggccattcacccagcaaataaccctttttgcttgaagggtcatgtctactagtacccttgccttgctgatttcgataccttatctaccacctactttacttgttctgatattatgttgcaatgcaatagcattattagcaactaagtttgctacacgaaaaaagtttacacctacttaaccctaacatacacaa

SEQ ID NO: 17399 - DNA, 241 bp, Glycine max
  Clone ID: PAT_MRT3847_115716C.1
ccgcgcagacatgagtttctgggggtctgtatcaagtccttgtaaaggacaagtaggtaattccagccagtactttgacttcagtgatatatataattgtagaacaacaatttctctactgaactgttcaatactttatggtatacagagcctggaactgtttagggtgggggccagtgctgcatgcatgccctacatactgttttggagtcaattgtacgggcaatttgctattttgtgc

SEQ ID NO: 17400 - DNA, 381 bp, Glycine max
  Clone ID: PAT_MRT3847_115717C.1
ggggggtgggttttgatttctttttttttttattttttgttttgtttttgggaaagaaaaaaaatggggggggttattttttttttggggctatgacctgtttccacctcccaaaaaaaagaccaattgtggtggattgtttaactaaactctttgtggggaggggaggttcttcttagccctataccttttaagggggtcgacccgttgttatactcattaaattgtggagggaaggaaataaatctggcttttcaaactccttggggaagtacccttgtaagttaaaacctaccttttttttttcctaccaagggtgactaattaaaaaagtggtgtttttaccttgaccttatgaagcaaacgttttaaaagttttgg

SEQ ID NO: 17401 - DNA, 663 bp, Glycine max
  Clone ID: PAT_MRT3847_115718C.1
atggaaactcttcatccatcatctcctccctcacacccgaaactggacacaaatatccatgtagaagtcgcagattttagcggaggagcgtgcgttgatgaaggtgatgactccctgtggggtgccttatggcccaagccacaatcctccatcacgattatacccaccaccacgagcaccaaaatcatagagagccctgacctgcctcttgcgagcatcaacaagatccataatgaatatgccattgattctcttgacgtcgggtttcgtgatgccctgcatgttgtctcgcaacaccgtcctctgccccttggctcctccctttcccaaacccttgcctcacttccacgaccactatatctgccaccatcacccccaccaccatatccaccaccaccacgccgtacagttcatcgttcacaactttcactccctcttgttgcttcttcttcttctgaccatgcaacaacagcatcatctcttcaatttggtgagctcccttcgtggcctgcacccattggagcagaagttagagctactagtgcttccaagagccacaaccaagcaaagaaaaggcacaaggagtttgattcaatcgtgaggattgaggagcacaagaatcaacaaggagaggtgactgacagagaaaggactaacgtgtaa

SEQ ID NO: 17402 - DNA, 540 bp, Glycine max
  Clone ID: PAT_MRT3847_115719C.1
tcatccatcatctcctccctcacacccgaaactggacacaaatatccatgtagaagtcgcagattttagcggaggagcgtgcgttgatgaaggtgatgactccccaccaccacgagcaccaaaatcatagagagccctgacctgcctcttgcgagcatcaacaagatccataatggtaaccatctttctcctaacatgtggtcgggtttcgtgatgccctgcatgttgtctcgcaacaccgtcctctgccccttggctcctccctttcccaaacccttgcctcacttccacgaccactatatctgccaccatcacccccaccaccatatccaccaccaccacggttccattgaagccacagcctccaccaaagccactgcttccaccaccaccagggagttcatcgttcacaactttcactccctcttgttgcttcttcttcttctgaccatgcaacaacagcatcatctcttcaatttggtgagctcccttcgtggccttctcgccattcacgatgttgataacccttagggttgtcat

SEQ ID NO: 17403 - DNA, 256 bp, Glycine max
  Clone ID: PAT_MRT3847_11571C.1
agttcgagtcctggtgcaccggaaggggtgacaagcggggagagaaaaaacatggcgcacgcatccttgtaccgaaactatgggaaaaccttcacgatgctcacggagcccagtcgagaaggagcgaaggtacgccgagatgtaaatggaacctgagtactgactgtgttgctagaggacggtgtagggggaggattatgtggttcactgtatacggtacagcgccactattactgggacgacgtgcaagaaaaac

SEQ ID NO: 17404 - DNA, 765 bp, Glycine max
  Clone ID: PAT_MRT3847_115720C.1
atggaaactcttcatccaccatctcccccctcacacccgaaactggaaacaaatatccatgtagaagtcgcacattctagcggaggagcgtgtgttgatgaaggtgatgactccctgtggggtgccctatggctcgagccacactcctccatcacggttatacccaccacgacgagcaccaaaatcatagagagccctgactttcctcttgcgagcatcaacaacatccatagtggtaaccatctttctcctagcatgtgctcggtgtatcttaaggactttacgggttttttcttagaatatgccattgattctcttgacgtcgggtttcgtgataccctgcatgttgtctcgcagcaccgttctgtgccccttggctcctccctttcccaaacccttgcctcacttccacgaccaccatatctgccaccatcacccccaccaccaccacggttgtatccattgaagccacagcctccaccaaagccaccgcttccaccaccaccaaggctgacgcgggtctgcgcttcattgacagtggtgttcggttgtcatggtcctagccgtacagttcatcgttcacaaatttcactccctcttgttgcttcttcttcttctaaccatgcaccaacaacatcatctcttcaatttggtgagctcccttcgtggcttgcacccattggagcagaagttagagctgctagtgcttccaagagccacagccaagcaaagataaggcacaaggataggatcaatgctctgtga

SEQ ID NO: 17405 - DNA, 650 bp, Glycine max
  Clone ID: PAT_MRT3847_115721C.1
aaaaagccaaaaaaataagtcgattcgtttttagcccttataaaacgaaaacggattcttgaacctctttcacgctcatgtcacgtcgaggtactgcagaaaaaagaaccgcaaaatccgatccaatttttcgtaatcgattagttaacatggtggttaaccgtattatgaaagacggaaaaaaatcattggcttatcaaattctctatcgagccgtgaaaaagattcaacaaaagacagaaacaaatccactattggttttacgtcaagcaatacgtagagtaactcccaatataggagtaaaaacaagacgtaataaaaaaggatcgacgcggaaagttccgattgaaataggatctaaacaaggaagagcacttgccattcgttggttattagaagcatcccaaaagcgtccgggtcgaaatatggctttcaaattaagttccgaattagtagatgctgccaaagggagtgggggtgccatacgcaaaaaggaagcgactcatagaatggcagaggcaaatagagctcttgcacattttcgttaatccatgaacagaatctaggtatgtagacacatggatccatacatctcgatcggaaaagaatcaatagaaggagaatcggacgatatctttttcgaaacaaat

SEQ ID NO: 17406 - DNA, 702 bp, Glycine max
  Clone ID: PAT_MRT3847_115722C.1
atggaaactcttcatccaccatctcccccctcacacccgaaactggaaacaaatatccatgtagaagtcgcacattctagcggaggagcgtgtgttgatgaaggtgatgactccctgtggggtgccctatggctcgagccacactcctccatcacggttatacccaccacgacgagcaccaaaatcatagagagccctgactttcctcttgcgagcatcaacaacatccatagtgaatatgccattgattctcttgacgtcgggtttcgtgataccctgcatgttgtctcgcagcaccgttctgtgccccttggctcctccctttcccaaacccttgcctcacttccacgaccaccatatctgccaccatcacccccaccaccaccacggttgtatccattgaagccacagcctccaccaaagccaccgcttccaccaccaccaaggctgacgcgggtctgcgcttcattgacagtggtgttcggttgtcatggtcctagccgtacagttcatcgttcacaaatttcactccctcttgttgcttcttcttcttctaaccatgcaccaacaacatcatctcttcaatttggtgagctcccttcgtggcttgcacccattggagcagaagttagagctgctagtgcttccaagagccacagccaagcaaagataaggcacaaggataggatcaatgctctgtga

SEQ ID NO: 17407 - DNA, 2604 bp, Glycine max
  Clone ID: PAT_MRT3847_115723C.1
cggctgcgagaagacgacagaagggcagttatcgatctacgagtctttgccattgatgatcagcatttcgggtcatgcacctattccttttccacctccttgcttctctcatgttacaatcctcttgccgctgagctccctttctcctcggtccacagagacaaaatgtaagacaggtgccaacagttcatcacgaaagaaaggactagctgagccgagatcactaactaaaacgaatttaatactaatcgaaaatactaatagaatagaaatagaactgtcttttcatatagatatcccttcaacacaacataggtcatcgaaaggatctcgaagacccaccaacgcacgaaagccgggatctttcagaaaatggattcctattcgaagggtgcataaccgcatggataagctcacactaacccgtcaatttgggatccaattcggttccttaggaggtatcgggaaggaattttggaatgtaataatatcgattcatacagatacagaagaaagggttctctattgattcaaacgctctacctacgagatagggatagagaaagaggaaaaaaccgaggatttcacatagtacttttggtcgaaaaatcgatctgatttttttcgtacttttcgctcaatgatgaaatgggtcagattctacaggaccaaaccttgtgggagttaaggaatgatggaagaaaagaaataaaaaaaagtaaataaaaatgcagtagaagagtcctgattccaaacgaaaaaattcaaacttgattgaaaaggatctttctgattattgaagaatgggacaaaaggattgatcgcgaaaaagatttcttgttcttattagaagatcgtgattggatccacatatgtttggtaaaaagaaagaaaaatattcttctttgagaataataaaaaaggaaagtgttcaattggaacatgaaaacgtgacagaattggtcctagttactcttcggaacggaatagaagaaggggagagattctcgaaccgaactaggaaacggatccaatgacttcaaaagaattgaacgaggagccatatgaagtgaaaatctcatgtacggttctgtagagtggcagtaagggtgacttatctgtcaacttttccactattacacccaaaaaaccaaactctgctttacgtaaagttgccagagtacgcttaacctctggatttgaaattactgcttatatacccggtattggccataatttacaagaacattttgtagttttagtaagaggggggagggttaaaaatttacccggtgtgagatatcccattgttcgaggaaccctagatgctgtcggagtaaaggatcgtcaacaagggcgttttaaatatggggccaaaaagccaaaataaatgattttagcccttataaaagttataaaaaaacggattcctcctttcacgctcatgtcacggcgaggtactgcagaagaaaaaaccgcaaaatccgatccaatttatcgtaatcgattagttaacatgttggttaaccgtattctgaaacacggaaaaaaatcattggcttatcaaattatctatcgagctatgaaaaagattcaacaaaagacagaaacaaatccactatctgttttacgtcaagcaatacgtggagtaactcccgatatagcagtaaaagcaagacgcgtaggcggatcaactcatcaagttcccgttgaaataggatccacacaaggaaaagcacttgccattcgttggttattgggggcatcccgaaaacgtccgggtcgaaatatggctttcaaattaagttccgaattagtggatgctgccaaaggtagtggtgatgccatacgcaaaaaggaagagactcatagaatggcagaggcaaatagagcttttgcacattttcgttaatccctgaacaggatctatatagacacatagacccatgaatccatacatctcgatcgaaaaagaatcgaaattgatgaatatatctctcgaaacaaacgaaaaggaaacgaaaaacaaaaacataaatcatggatcaattaagccctctcgggacttgcttaagaatgagaaagaggaatcttatgtaaataccacagaataaggtttggtcctattcatggggattctgtaaatattccattccaaaaagagaaaaaattcgaaacaattgggattttttggagattggatgcagttactaattcatgatctgacatgtacagaatgaaaacttcattctcgattctacaagaatttttatgaaagcctttcatttgcctctcttcgatggaagttttattttcccagaatgtatcctaatttttggcctaattcttcttctgatgattgattcaacctctgatcaaaaagatatatcttggttctattttatctcttcaacaagtttagtaatgagcataacggccctattgttccgatggagagaagaacctatgattagcttttcgggaaatttccaaacgaacaatttcaacgaaatctttcaatttcttattttactatgttcaactctatgtattcctctatccgtagagtacattgaatgtacagaaatggctataacagagttc

SEQ ID NO: 17408 - DNA, 554 bp, Glycine max
  Clone ID: PAT_MRT3847_115724C.1
cgggccagtcatgggttgggcctttagaagggagccaccaccaaagggtaattaccaaagtagggccaccaaaaggtattcttccccccaccgggttctttccttctatttcaacaccctccctcttaaggaccccccagtccattcccggaacctgaccccaatattccaggtgaaagccccaaattttagcggaggagcgtgcgttgatgaaggtgatgactccctgtggggtgccaccacgagcaccaaaatcatagagagccctgacctgcctcttgcgagcatcaacaacatccatagtggtaaccatctttctcctagcatgtgctcggtgtacgtaacaacattgcaaataaaattctctagaaagttcttaaggactttacgggttttttcttagaatatgccactgattctcttgatgccgggtttcgtgatgattctcttgacgtcgggtttcgtgataccctgcatgttgtctcgcagcaccgttctgtgccccttggctcctccctttcccaaacccttgcctcacttccacgaccaccata

SEQ ID NO: 17409 - DNA, 306 bp, Glycine max
  Clone ID: PAT_MRT3847_115725C.1
cacgcgtccgtacacgcgtccgaacacgtgcgaaaaaacaacttaagatgatcactctttgactactaggcaataggcttgagtgggaaacctaactcgatataaggacccaccatctcccttggtttggattgttattccataaaattgaatctggtgttttacccacaccaacggaggaattaaaatatacacttgatatgttccctgcacattccttattacacataatttaatttcataaaaggctgttcgatattaagcatattttatgataaacattttgcactgtctacgatgctcacg

SEQ ID NO: 17410 - DNA, 264 bp, Glycine max
  Clone ID: PAT_MRT3847_115726C.1
ctaaacggggccgccctctatattgggggggggggggggtttttttaaacagaactgaatcgtcatattttatttcatgataaatcgaaaattaggattaacacataattttttatcaaaccaaggcgataataaatgattatcaaaatcctcatgtcacaacttattttctccaccctaaataatggggggggattatatatcctccaggtcacaccaaaataaaatatgacccaaatacaaggccaaagattgctacaccag

SEQ ID NO: 17411 - DNA, 335 bp, Glycine max
  Clone ID: PAT_MRT3847_115727C.1
gcgttttagccgcgacgcacttcataagctgagagcctatggcgagggccgagtactgccaagaggcagcgacaacaacgtgctcaggaaggagtatatacaggagcttagcaacgataatatacgtggggataacatggatacgactttactgaagacttgacataaggtgaattgaagaccgaaaacgggtacggatacggatgatagctctacagctgaagctgggctcgcactgctgtcgtactgaggcactcagacgaagcaactggcttagaccacaatgacgacacagactatgtcagagatctgacatcaccgggtcaagactggac

SEQ ID NO: 17412 - DNA, 342 bp, Glycine max
  Clone ID: PAT_MRT3847_115728C.1
ctgaagagttcgaaagcggaaatgctcgagagccatcactcctgatcaggcagagataccgggaagccgcatacttgatcaagaagggaaagatgtgtgctctcttcatgaaccatcttgatgcacgaactggtcgtcttgctggaaccacccaatactctgtcaataaccatatggtgaatgccagccttatgaacattgccgataaccccagcaatgtgcagcttactggtatgtataacatggcatagaatgcccgtgtgcccatcatcgtcaccggtaacgatcgtttcacactctatgcacatatcatccgtgatgcgcgaatcgaaaattctactg

SEQ ID NO: 17413 - DNA, 245 bp, Glycine max
  Clone ID: PAT_MRT3847_115729C.1
tcttcttccactgtctgtctacactacggacagagcttttttcacaccacagctaaaattgctgcaatagagcccttcttctcgcttcttcttctctatccacatccaaacccaaaccaagttctttctgtctcattcccttgataatgtaaaatcacagacaaacagaacaagctagtcaaaacttggctccaattagcctttcttgccatggtttgcggtgaaacagattagcgtcacaccat

SEQ ID NO: 17414 - DNA, 861 bp, Glycine max
  Clone ID: PAT_MRT3847_11572C.1
agtatctatgtccctttgagacttattatgatattctctttgacaagtgtttggtaacacatttttttgagggtgcagtattttttaaaggctcaatttcactttgataagaatcagttagctgacttgatggtcatttttgaaattgcagggactgtgtcataggtattaattacaaagtaatattttaatttaaattgattgtccttttatccttttacatatcttcaatttctttgagtttacatattttaattacaaagtaatattttaatttaaattttttatttaataaataagaatatatttaagatgtgtacgttagtaaaaattaaaattattcttatttgatttgtatttagtctatgtctaattcttattcaagatgtgtacgttagtaataagaatatatttaagatgtgtacctaagaatgatttttataccctttcccccctttcacattgctctatatgctagaagtcatccttaaattttgtaaggttggcgggcaaaacttctgattttatattagtgcctgtatcaagttaaggccttagggattgggagtttaagccttttcatacttcctgcttacaagctgttttatcttcctttgtaacaattgtatattttgtctataactcattaattctcaagcaagataaattattttaattttatctattttaggcaatgcatgctgctccaatgtacattgcagagacagctccaacaccaatacgtggacaactaaaatctctaaaagagttctttatagtacttgggatggttgtgggttcttgcactttcttcggctacttggctgtctccacgggcttcacttatgccacaacggagtt

SEQ ID NO: 17415 - DNA, 729 bp, Glycine max
  Clone ID: PAT_MRT3847_115730C.1
aattcggctcgaggaggcatttaggttgtttgaatggatggtttgttctggggttgtgcctgattcggtgacacttctggcgcttctggttgcgtatgctcataaggggttggtcgatgagggaattagattgtttgagagcatggacagggactatggagttgaacctcgtattgagcattatggtgctgtgatagatatgttggggcgtgcagggcgattacaggaggcttatgatctgcttacaaatattccgattccatgcaatgatgctgtttggggagctctgcttggagcctgcaggattcatggtgatgttgaaatgggggaaaagcttataaagaagttgttggagttgaaaccagatgaagggggatactatattctcctgcgtgatatctatgttgctgcaggtcagactgtagaagccaatgagacgaggcaagccatgctggctagtagagcaaggaaaaatcctggttgtagttgggtggaaggctgaagtttaggtgtacattcgcagcaatcatcatgcaaggcaatggtgatgccctctgtgcagtgcaggctgtagagttgttctcatggaatcctctatatttctgattttttccgctatattgttgatacagggcagaaaatcggcaagtagaatggtcgaaattatttttagatgacctaataactgttttcattgactgttctacctcaaattcaaatcatttgatc

SEQ ID NO: 17416 - DNA, 2498 bp, Glycine max
  Clone ID: PAT_MRT3847_115731C.1
cgggtgaatgaacgaacccttaggctatgctatatgattttctgaacgttctcacgacacgcctactcattgcactcttcgatcgcaactctctttttcttccaaaagggaaaacgaatctcaaacttcacaagtgtttgaggcgccatggcggatcggttgacgcgtattgccatcgtcagcaacgacaggtgcaagcccaaaaagtgccgccaggagtgcaagaagagttgccccgtcgtcagaaccgggaggttgtgtattgaggttacttcctcgtccaagattgctttcatttcggaggaattgtgtattggatgcggtatttgtgttaagaaatgtccttttgaagctattcagattatcaacttgccgaaggacttggacagggatactactcatagatatggtcctaatacttttaagctgcataggttgccggttccgaggcccgggcaggtgcttgggttggttgggactaatgggattgggaagtccaccgctcttaaagttttggccgggaaactgaagccgaacttgggtcgattcactaatccccctgattggcaggaaattttgacctattttcgaggatctgaactgcagaattattttactcggattctagaggatgatttgaaggctatcatcaagcctcagtatgttgaccatattccaaaagctgtgcaagggaatgtggggcaggtgctagaccagaaagatgagagagagaagaaggaggagctttgtgctgatcttgagcttaatcaagttatagatcgtaatgttggtgatctttcgggtggtgagctccaaaggtttgccattgcggttgttgcgatccagaatgctgagatatacatgtttgatgaaccttctagttatcttgatgtgaaacagaggctgaaagctgcccaagttattcgatcattgcttaggcctaatagctatgtaattgttgttgagcatgatcttagtgtcttggactacttatcggactttatttgctgtctatatggtaaacctggtgcatatggagtggtgacacttcctttctcagtcagagaaggaattaacattttcttggctggctttgttccaacagaaaatcttaggttccgtgatgactcactcaccttcaaggttgctgagactccacaggaaactgctgaggaagctcagacatatgctcgatacaaatacccaaccatgagcaaaactcaaggcaattttagacttcgtgtagctgaaggagaatttactgattctcagattattgtgatgctgggtgagaatgggacaggaaagacgacatttattcgaatgctggctggtttattgaaacctgacaccatagaaggtggatctgaggtggagatgcctgaatttaatgtttcatacaagcctcagaagattagcccgaagttccaatcaactgttaggcacttgctacatcaaaaaatacgtgatgcatatactcatccccagtttgtgtcagatgtgatgaagccacttcttattgaacagttaatggaccaagaagttgtgaatctttctggtggagagttgcagagagttgctctgtgtctctgtcttggaaagcctgcagacatctatctgatagatgagccaagtgcgtatctagattctgaacagcgaattattgctgccaaagtcattaagaggtttattcttcatgcaaagaaaacggcttttgtcgttgagcatgatttcatcatggcaacatatcttgcagacagagttattgtttatgagggccaaccatcaattgactgtattgcaaatactccgcaatcattgttgtctgggatgaaccttttcttatcacatcttgatatcacatttagaagggacccaactaattttcgcccaaggatcaacaaacttgattcaaccaaggacagagaacaaaagtctgccgggtcttattattaccttgatgactgagttcatactttggggctgttctttcaccaacacaaccttgcatctgtttgagcttttcatgggatctcagatttggttcagttcatgccttgaaatataagattgccatttttgccgatgaaagcatctttctcaatgaatagaggagcctgcatgcaattgcaagccctatgttggttggtgcattttgtatatttacccttatatttagtgcagttactcatcaccaggtttgctacgacttgggtgggtgaatctgaatattacatgagtttatattggtcatggttttcattcgatgtcctaagtccagaggaacattcataatgtcagactgagtttatcgccaatttcagttgagtatgtaacgaagtttacgttcattccatgttacttaatttagatagatgtcttctgtttggaatatgttgtcgttgaggctgatatcttcgtggatatatatcattacattttttagatgaaattgcggctattatgtgattttatttgaagggtggttgttatttttt

SEQ ID NO: 17417 - DNA, 441 bp, Glycine max
  Clone ID: PAT_MRT3847_115732C.1
gccattgcggttgttgcgatccagaatggcaaacctttggagctcaccacccgaaagatcaccaaaggtttgccattgcggttgttgcgatccagaatgctgagatatacatgtttgatgaaccttctagttatcttgatgtgaaacagaggctgaaagctgcccaagttattcgatcattgcttaggcctaatagctatgtaattgttgttgagcatgatcttagtgtcttggactacttatcggactttatttgctgtctatatggtaaacctggtgcatatggagtggtgacacttcctttctcggtcagagaaggaattaacattttcttggctggctttgttccaacagaaaatcttaggttccgtgatgactcactcaccttcaaggttgctgagactccacaggaaactgctgaggaagctcagacatatgctc

SEQ ID NO: 17418 - DNA, 3314 bp, Glycine max
  unsure (1)..(3314): unsure at all n locations
  Clone ID: PAT_MRT3847_115733C.1
gtgagagtagttcttttgaaagttcagattttgatcactctgctgttgaagaatgtgcagcagatagaagttttacttctgcgtatctggagcgcccctcaagaagtttgcaacagcagcgatcctgcactaaaagtgagaagccaatagatgtactgcgaagagtttgtgggaatgataaatgtgccgattgtggagctcctgaacctgattgggcatcgctaaatcttggtgttcttgtttgcattgagtgttctggtgtacatcgtaaccttggtgtccacatatcaaaggtcaggtctcttacattggatgttaaagtgtgggaaccttctgtcataagtttatttcagtctcttgggaatacctcggccaactccgcccgggtcctaggttcgcatccaagtagtgcctttcaggttgatcttgtccctacaggcttaagcaagtctgataaaccaatgatgttcttcatcaccaaaccttgtcaatctgattctctatctgtgaaggaaaagttcatccatgcaaagtatgctgagaagctttttgttcgcaagccaaaggacaatcaataccgtctcttagtagcacaacaaatctgggaggctgttcatgctaacgataaaaaagctgtataccgttacattgttaattctgatgttgatgttaatgctgtttatgagccaacatgcagcagctccttaacccttgccaaagtaatgctattacaagagcagactagccatgatcacagctctactttagcagggaacacattggactggtcctccactaaagaaggccaggtcatggacaatctagatgggtgcaccctacttcatctcgcatgtgaaactgcagatattggcatggtggagctcctcctacagtatggtgcaaatgttaatgcaactgattcgagaggtcaaacacctctacatcgctgtattctcaaaggaagatctacatttgcaagattattgctttctaggggagccgatcctcgagctgtggatgagcagggaagaacccctattgagcttgctgctgagtcaaatgctggcggtgacagagaagtccatgctccatcgactgattctaatggatgagagtgataggcaaaaacctcggagtataatacatatataaaatatggaagattggattatgtaaatttgtatttcataaattgaaaagctggttttttttttttttttttttaagtaaatgtcactagtgtgagggattaagggagagaggtaggttgaaatgcctgccccttagtcatgtgcaaaatagtgctaagatctgtattgtaaaatggccacattggtcttagtaaaagagttatgcatatgctgcactggtagcacccagcctgcacttcgtaatatgatgattgtgtatttttgtttacttttgaggtgaagctgcgatgcattaggctagggatttgtgtatgttgtgtacattggtttttgtgaaggtgttgttgtggctgtaatttatcagatttgaggttttgcttccggatcatttcacctacaaagaactacactttgcaganagtgcgctggaccaaatggactggattgaaaaaatcactggtgttattgcttcattactgagttctcaaattcctgaaaggatgttgcctgcaagcccaatgggaagtggtcatcataggtctaccagtgagagtagttcttttgaaagttcagattttagatcactatgctggtgaagaatgtgcagcagatagaagttttacttctgcgcatctggagcgcccctcaagaagtttgcaacagcagcgatcctgcactaaaagtgagaagccaatagatgtgctgcgaagagtttgtgggaatgataaatgtgctgattgtggagctcctgaacctgattgggcatcactaaatcttggtgttcttgtttgcattgagtgttctggtgtacatcgtaaccttggtgtgcacatatcaaaggtcaggtctcttacattggatgttaaagtgtgggaaccttctgtcataagtttatttcagtcacttggaaatacttttgccaactcagtctgggaggaattattacaatcaagaagtgcctttcaggttgatcttgtccctacaggcttaagcacgtctgataaaccaatgatgttcttcatcaccaaaccttgtcaatctgattctctatctgtgaaggaaaagttcatccatgcaaagtatgctgagaagctttttgttcgcaagccaaaggacaatcaatactgtctcttggtagcacaacaaatctgggaggctgttcatgctaacgataaaaaagctgtataccgttacattgttaattctgatgttgatgttaatgctgtttatgagccaacatgcagcagctccttaacccttgctaaagtaatgctattacaagagcaaactagccatgatcacggctctactttagcagggaacacattggactggtcctccactaaagaaggccaggtcatggacaatctagaagggtgcaccctacttcatctcgcatgtgaaactgcagatattggcatggtgtacggctgcgagaagacgacagcaaatgttaatgcaagtgattcgagaggtcaaacaccactacatcgctgtattctcaaaggaagatctacatttgctagattattgctttctaggggagccgatcctcgggctgtggatgagcagggaagaacccctattgagcttgctgcagagtcaaatgctggtggtgacagggaagtccatgctccattgactgattctagtggatgagagtgataggcaaaaatctcggagtataatacatatataaaatatggaagattggattatgtaaatttgtatttcataaattgaaaagctggtttttttgaaatgtcactagtgtgaaggattaagggagagaggtaggttgaaatgcctgccccttagtcattttgtgcaaaatagtgctaagatctgtaatgaaaaatggccacattggtcttagtaaaagagttatgcctctgctgcactggtagcacccagccagcactttgtaatatgatgtttgtgtaattttgtttacttttgaggtgaagctgcgatgcattaggctagggatttgtgtatgttgtgtacattggtttttgtgaaggtgttgtggctgtaattttccatttttgtatttttgggattacttggtgccttggtgggacaggtgctgaggatgtcatgtccctagttctctaatattctgatgtatttatttatatgataaaaaaattatatattttc

SEQ ID NO: 17419 - DNA, 512 bp, Glycine max
  Clone ID: PAT_MRT3847_115734C.1
ccctcgcttccggtcagaaccgggaggttgtgtattgaggttacttcctcgtccaagattgctttcatttcggaggaattgtgtattggatgcggtatttgtgttaagaaatgtccttttgaagctattcagattatcaacttgccgaaggacttggacagggatactactcatagatatggtcctaatacttttaagctgcataggtgagttgatttgatttgtttcactggagaaatttgaggctgtggttgttttgtttggtttgtgatggactgatttgtggtggcaggttgccggttccgaggcccgggcaggtgcttgggttggttgggactaatgggattgggaagtccaccgctcttaaagttttggccgggaaactgaagccgaacttgggtcgattcactaatccccctgattggcaggaaattttgacctattttcgaggatctgaactgcagaattattttactcggattctagaggatgatttgaggctatcatcaagc

SEQ ID NO: 17420 - DNA, 1362 bp, Glycine max
  Clone ID: PAT_MRT3847_115735C.1
cggcacgagctctctctctctctctctctcaattcttcaggcaccttcaaaatttctctctagagtcacgatgcttgcgacgctcaaatccgaagagtccagtggtcagttacagctcgtcgaacgagaagacatagacgacgatgaagatctcttcgaagccatcgacaaactgattgctcaaggcatcaatgccggagatgtgaagaagcttcaggacgcagggatatatacttgcaatggcttgatgatgcacacgaagaagaatttgactggaatcaaaggtctatccgaggctaaggttgataagatctgcgaggctgctgagaagcttgtgaatttcggttatattaccggaagtgatgctctgctcaaaagaaagtcagtgatccgaattactactggaagtcaagcgcttgatgaattgctaggaggcggggtcgagacatcggcaattacagaggcgtttggagaattccgatctgggaaaacacagctagctcacactctctgtgtttccactcagctgccaactaatatgcgtggaggcaacggaaaagttgcttacattgacacagaaggaactttccgaccagaccgaattgttcccatagctgagagatttggcatggatcctggggctgtactggacaatattatatatgctcgtgcctacacttatgagcatcagtacaacctcctccttggtttggctgcaaaaatgtccgaagaaccattcagacttctgattgtggattcggtgattgctctgtttcgagtggacttctcaggaagaggagagcttgcagatcgccagcaaaaattggcacagatgctttctcgattaataaagatagctgaggaatttaatgttgccgtctatatgacaaatcaggtcatatctgatccaggaggtggcgtgtttgtaactgatccaaagaaaccagcaggagggcatgtgctagcccatgcagccacggtaaggttgatgttcagaaaagggaaaggggaacagcgcatttgcaaagtgtttgacgcccccaacctgccagaggctgaagcagtgttccagataacagcagggggaattgcagacgctaaggactaaagagtcgcttctgagttgtgacttctgggccgaatccacaaaagaaacagtagtggctgaatatttctggtaaccttaatcttccagatatttgctacagtttgtatgaaaagtgttgttccttgaacacttttactattttccagtgatatgatatgagttccccttagttatacttatacacgtttcctttattgtaagttgcgatacattttgcaatttgaacgtttcacaaacattgaaaatcttgctgc

SEQ ID NO: 17421 - DNA, 861 bp, Glycine max
  Clone ID: PAT_MRT3847_115736C.1
gttcctaaccctacaagcttcgtctcgtaaagaaaatgaggacagtgctttcgcgcttgatccattccacgccttccatttccaggatcaatgcagtgtcaatccgcgggagagatctcttctttccaaatgtctgctttaaagttgaagaagcagttaatgtgcctccacccccaacggaaaaggttgttctgtttggaggcgattggtttgttggatcacacttttttagagaagccctagaacgtggcatgtctgctgggagtcctagcaggtctggtaggtcatccctgcatgattcctgggctaggaattttgcttggtatcaagggaatctcttttcaactgctttattgagaaaacatctgagtggggtggcaaagttaatctctcaagtgtatattctggaatatggaagggactgtcttgagatgcatgttggagctgttgaacctggtgagcgtgctttagtggttgatgatttgattgcaacaggtggaacactctgtgcagctatggacttgttagaacgtgtgggagcagaagtggtggagtgtgcatgtgtaattgaattaccagaattgaagggtcgtgaacgtttgaacgggaagcccttgtacgtgttggttgaatatgtggagatatgatgattatgaagtgtgcaaaagaatattaagatgtagatttgggagatgatgtgtctttcagtgggtgctttcccattcggattccaattctagcttgtagtaggaacgatcaaatcaaattaatgatgcatttgtatgacccactcttatgggtctcgtcttctcatctctgcttcctcactctttttcgaataaaattaatatctttggctac

SEQ ID NO: 17422 - DNA, 255 bp, Glycine max
  Clone ID: PAT_MRT3847_115737C.1
cattttatctgtaaatatattaactttaagaaaatggcaaatcaacgaatcactccaaatgcattctggtaaaaactagccttttatccaaacatccctctcctacagaatctattactgagacaattagaatagagagtaattcaaacaagcacttattttacatgacttacttttggttgcatctatctccctcagttctttggtttccccctggttttggatacttcatccacagatgaagcaggttagttg

SEQ ID NO: 17423 - DNA, 369 bp, Glycine max
  Clone ID: PAT_MRT3847_115738C.1
caaaatatattttttattttgaatctttttgaggcttttttgggggcaaaaacccctaaagcatttttcacacaacattaatgacaacatggttgggtcactttttaaacaacccagactttttaggttcaattaatagcttattgaacatgacaaatgccccgttgaacggttccttacaactgaacctagggaaagaaaatacgcacaaacccaaaatcacgaaaaacaggttaactgaaaacagtccgcttcatagcattgctgaagggctttatatcttaaactaggtatttacactttgggacggaatctttcatattacatggcgttccgccaaatttacctccagcctttgcatttttcctt

SEQ ID NO: 17424 - DNA, 339 bp, Glycine max
  Clone ID: PAT_MRT3847_115739C.1
cccacgcgtccgcaccactaggaatggaagtccagggcggatacctgatgatctaaactggggtcacatagattatggctgctggctatagacatagctgagcgtagtgaacttgatagcacacctagcggcgtctatgataggtacatataacagacccgagggaactctgcgctgcaaagcgcgttaacgggtacattgcatgtagtcacactatacatcacataggaagttcacttcactcgtacaccagtttggcacctacactgaatgctcaagtggcagatccaagcatgaacgacgtagaaatgttatgataaccagagctattacgtgtca

SEQ ID NO: 17425 - DNA, 383 bp, Glycine max
  Clone ID: PAT_MRT3847_11573C.1
ccacgcgtccggatttttgttttggtgaatgagtcaaatatgatggtaatacaccacagctacctcttttaattttcaccttccaaatttattgcatccttccttcatttctccattcgtgtttaatgatagaagttggttgaatttgggatagacctaatagttatatgcaggggtgccactaaattagaaaacattatttgagaaggagacaaaacacaaaaaggggttcgtggcggtgatgatgatgaccaccacccatgctgacaatgatatttttttttggacatatcttcccttgtcaattttaggatgctaggatatggaagctcagatctgtggagggggatgacgcgcggaggatcatggagggattggtggtc

SEQ ID NO: 17426 - DNA, 534 bp, Glycine max
  Clone ID: PAT_MRT3847_115740C.1
gcaaggtggtactatttttggtaagtaaggtaaggcacgcgaactaatgcaattcggctcggagtaaagtcaaagtggtgcttttcccaaacttgaagagttcaaattttgttaatagtaagcgatgatgggaaagctaaaggtgtatgcggatcgaatgtcccagccttctcgagcagttctcatattctgcaggtttaacggaattgactttgaggagattaaagtagacatttccaaacgccaccacctttctcctgaatttagagaagtaaaccctctgcagaaagttccggctatagttcatggaagcttcaatctctccgagagccacgcaatccttgtctatcttgcttctgctttccctggaattgctgaccattggtatccaagtgatctttacaggagagccaaaattatctcagtgatggattggcatcactctaatttacgacatggagcagtgaactatgtaataaatactgtactaagacctgcaactggccgtccacttaatccaaaagcagctgctga

SEQ ID NO: 17427 - DNA, 148 bp, Glycine max
  Clone ID: PAT_MRT3847_115741C.1
tagcggctgcgagagacgacagaaggggggggtgggatagctaacccgtttcgcccttcctcgaagggtagaaccgacacctccttcatgggggatggaaagctttatgctttttggaatgacccacctgggcctaacaccattgact

SEQ ID NO: 17428 - DNA, 326 bp, Glycine max
  unsure (1)..(326): unsure at all n locations
  Clone ID: PAT_MRT3847_115742C.1
aaaaccaaaggcgaaccgaggacgcttcaagacagtaagcaaccaaccgcagcaaaaccagggggccgacagaagcaagaaaaaggagagaggggcacaacaacaaaacgggacaagccaagaagagaagngggaaccaacccacactccagggcacggacagaagcgaccaacagacaaccgcgngaggacaaccaacaacagcagcagcaacaaacgggangggacggnnggagcaccaaacaaggactgagcaaggcggaaacaacgacaaacacacggcagcggggggagaaaaaagcgcagcaacaaaggacacaccggcg

SEQ ID NO: 17429 - DNA, 246 bp, Glycine max
  Clone ID: PAT_MRT3847_115743C.1
atcatttccacattcctgggaatagaacttcccagtggaggtatgtggtcctaataatggtactgaaacgcggagctcttagtgggcaaatcaaactatatcgcattttattttccttattgacaatgccaaacaggctacagtttttgatattctctctgcaatcctttaagattgtggaattgctggtgatactcttatgccagctgtttctgttacacaagctactgccagatcttctcaaaa

SEQ ID NO: 17430 - DNA, 429 bp, Glycine max
  Clone ID: PAT_MRT3847_115744C.1
gtgcttgggccccaaaaaccgccaagaaattattccatacacgggcggataaacggccccacacaaagaaaagggggggggggggacttctacacaaaatccccacaaatttaaatcaagcggggcccggaccaattaaaaaacggggccggcttaaaaaaatgaaaaaagctggacccttaaaactggagcttaaacctcggggttgggccggaaaccatccttaataagaagagccttaataaacaaaggctggggaaatcccttctacaatttggcagcgcaaaccctattggtgttctggggagacaaaatcaccttggcctgttccaagagagggaagtggttccaggagaagatgggctaaacaaaacttgggtccatttccaagttttcgttgggcaacacccccccggggtaagaaaagtt

SEQ ID NO: 17431 - DNA, 357 bp, Glycine max
  unsure (1)..(357): unsure at all n locations
  Clone ID: PAT_MRT3847_115745C.1
ccctcttattatttncatttaatatctctccttctttaaatcttcctcccaattataacttaattttttatctattcctaataaacacatttcttcaaaacaattaccttaaatccccaacctttctcaaaatcttcaccactattttctatttaattttccaaaattttttcattcatcatacattatactatttcaacttaattacctatattaacttataaatacttttttaaaaatatattttattcaacacaacatatatttcttatttatcaatacacatccttctaaataaataaacatttaacaaaacatatttttcttaacaatttcaattacatattataccattat

SEQ ID NO: 17432 - DNA, 187 bp, Glycine max
  Clone ID: PAT_MRT3847_115746C.1
gaaaaggagtataagggatggcgatgatggtgtattacaaggtactgctggcacagcattaagtgctaagtgcagatatacaatttttacatatggaagatttcaaatatgctcatcaacaggtctgtacaagcggattcttctgaatccataaatatgacctagcttcaacaatggaacgaactat

SEQ ID NO: 17433 - DNA, 1078 bp, Glycine max
  unsure (1)..(1078): unsure at all n locations
  Clone ID: PAT_MRT3847_115747C.1
tnngggggnnnnnnnnnnnnnnnnnnnnnnacnaacaaaatactcatccaatttgctgcttgcacagatggaataaaaaaaaaagatttgggattttctgagagaaatcaccagagcagaaaagaaaatgaagaattggtcgtggaagataattaaatccttcgcttattaaacattacgagagaggaaagaatgggaaatggaaactgttgatgaatataggaaaattcacttcaaataagtgcagaagccagagtttgtttttaagcaaagaagctctattctaatattgttgaagagattatattgtgttaaataaacactaatttttttcacacttgataatgaagcagtaggccataattggctggtcccgcaaattcccaattaactatgtgcagtttgcgcataattttgaaaaagaaagtattagaggccgggagaggtgcagcagagagtaccctgagaaagcgctcggcagcttctggaagtcacgctcagacacgatgtcattctcgccgccaataactgcagagtgcaccaccagagtttgtttttaagacaacagcaaaggaagctctattctaatatcgttgaagaaattatattatgttaaatgaacactaattttttcatacttgataatgaagcagtaggccataaattggctggtcccgcaaattcccaattaactatgtgccctgagaaagcgctcggcagcttctggaagtcacgctcaggcgcgacgtcattctcgccgccgccaccgcgctgtgcagcggcaacatcgactgcgcgcatctcagctccgccgaaatcctggtcaataaggattggcgaagaggagaagaggaggaagctggtttggagaacgaagaagaagcgcgaatgttggatttgatggatgatctgatggacgaaattgatgttcgctgcgcgattctgctgcacgcggaagccattgacgatgagatcagatcggaggaggaaccagaacggagcgagggtttagggtcgtgcttttccgcaagggattattttaattttggttccccttctgtcgtttctcgcagccgta

SEQ ID NO: 17434 - DNA, 380 bp, Glycine max
  unsure (1)..(380): unsure at all n locations
  Clone ID: PAT_MRT3847_115748C.1
acgccagcagagaccccagcggganccccggcgcgacccacggcgccgccctcccagccgcctcctaagagagaggggccaggaggaccgatagcggggcatccagaagagcgcccgaaaagcccccagccagaacaccacagaggacagaggcgccgagccacaagggagagcacgagaagaggccaacggccaagaccccggaaaagggcaccacaaccacagcagacagaagggggccccgcgggaaacaccnccgcaggaaaggccggggcaaaaggggccggccgaccggacgggagacccgccgccgaccaccaccacaagggacccggagcagggaacaacaaccggagagcncaccaacagggaggaggacg

SEQ ID NO: 17435 - DNA, 428 bp, Glycine max
  Clone ID: PAT_MRT3847_115749C.1
gttactactgacttgttagagcaggaactaagaggaaaactaagtccctgtgcgcattaaaacgagcacctcctgttgggaaaaactccacctcatgacggaggattgccacccaccataatgggcgtagtgagagacgcacaaactgttgagctcgagttggtccatatgtgcaaaccagaccataaccctatgaaagcacacccgcagatcctactctgatccctgggagataatgacggtttgagaatatcacccccaatataggaaaaaatcgaacgactgtgtgatgggattgccaaaaagccaagccatccatccgtgtgaaagcccaaagacaccgaccagggctaccatttaatccagattccccttaagaatttgccttccgttcgtgggaatcactacacaatggccccaacctggtt

SEQ ID NO: 17436 - DNA, 1419 bp, Glycine max
  Clone ID: PAT_MRT3847_11574C.1
tgtctctcccttttttcctttgcaccggttcatagttgttcagatgtttattttttttttttttcatagaataagtatcttttatttattaggccaaggcatcttggagttacatgacgagaaaataacataagcaagtggtacagacattaatagcactacttataaacatggttgaagagcaccatataacagtatccttaggactcttcccataattccaagtgcaacaactattattttttagtctttcgtactttttactcttgcatcttcagcttatttattgctgcttgccttcttcctagtctggcttggaattttctttggggttggtttcgagaccggggctttggaagtgcctgaactaggtttggcagaagactctttcttcacctgtcctgcagatggttgagagcaacaagatttttcaacaggtttctcagctttgagtgatgccattttacactattcttctaagggaacacttctcttcgcgcagcctccccctgctgtggccttagcgaaggcgaggttcaaagatgtgcagatgacaaagcagtgttgataacaacctacaaggcaatcacaaccaccctttgccgccggccgccaccgccatggcaaatactacgtcagcagccgcagccatgctgctatcaggttcggcagcaagcaaggaagcgctaacaaactctgcaggatattactcttcttcaattccctatgcttcaatggcaaccctatcagcttcagctccattcccaaccatcactctcgacttgacccaaaaccccaacaacgccatgcagctgcaccgagtaccagcaggccatggcgccacgttccctctgccactgcatgcggcagctgctggtccccacctactaggtcaccccttgttcttccaacagaagcttccaccggcagcattaatgccccttcttcaacgacaaccttcgtcgatggtcgaaacggttagtgcagccattgcttcggatccgaacttcactgagctttgcagcaatctcatcaatcattggagtaccaagaagaggcaatgacggtaacaacaacaacagtggaagtggtgctattccaggttcaccgcagcttcctcaatcatgcactactttctccaccaactagcggaattttgagaaactatatacttaatttctctatgtatatacacaaattaaaagagaagattaggcatgcgcgcttaatttactgtttttttattttcttatatgtaaaacagattaatagagtcacctctgattctgaatgcatgactctataaacaaatcgtttgaaccttaccttcgacttgcaggagtgtgcatgtagagttgatgcttttggtacaatagtctggatataacttatgttatatacgtcacagatttgcaattt

SEQ ID NO: 17437 - DNA, 777 bp, Glycine max
  Clone ID: PAT_MRT3847_115750C.1
cgcccgggaaataggctcgaaagggcccgttcacaatccgtcccccgaccggcacgcgacgacccgctctcgccgcggaagcagctcgagcagtccaccgacagccgacgggttcgggactgggacccccgtcggacgcgtgggcgcgaatctattacagccccagaaagagggtgagaaggtggaggaacatcctcagaaggttcatgagggagagcaagaccttgtgtagatccaagcctatgtcctttcaatatgaccctgttagctactcccagaactttgatgagggttgccatcttgatgaacctaggccaggcttgcaagatgttaggtgggattcacatcattgattttttgtaactgtggttattacatgtttaggcttgaatgtaagaaggacaatgaaatggccttttgtttttgacacatggcaggttttagttactgcatggtacaaacaaattaatccttcttctagtttgtatatggtgtatcttattcatattttgtcataatacaaaagttctattcattgaaaattaatgggttttttgtatgtgtatatatatatatatatatatggtggatctaccagtagtactagtagtgatatagtaatatgtcatttatattagttgctttactgtgcaatcttttgattgctgcaattctgtttttgttatttgtagtgctgctgtgttccattggttggattctcaatagaaaaacatgaagcagtacttggttacctaagattttatcacgtaatgcacc

SEQ ID NO: 17438 - DNA, 681 bp, Glycine max
  Clone ID: PAT_MRT3847_115751C.1
gttaaggtgtgcaacccactgctacattgctcgcaatatattgtgtcaccagcaaattgcgaggatgaattcattctggccagcagcagcaggttctgcatcactatacggggctaagcccagcaatcttaatgttgtaccctccacagagttgcatgggaatgttcccggcagggctgcaaactcttctcaggacaaagggcatggtattgccatgtttccaggacatattgggaaggacaaagcctctcagcctgccattgtggataattcatcaagaaaacaaattttgcttcagcaagctttacccccaggagcagcacctagtaatatcttgcatggccctgcattcatattcccgctgaatcaacaacaagcaagtgctgcggcatctgttcggcctggatctttgaagtctttgccagtttctagtaatggagcaccctccagtgtctccaattcaacaacaaaagcctaatacggtaaggttgttgcttcgatgaccacgaggacgatgaagctgcatagccttttagggttagggatttctgaaattgtgtttttagggttagtaaaaaaaaataccactgaggttaaaaattacaaactgtttcactgaaaataaactggggaccaaaaatataatttgttcaatatgtaatgttaaaaaatcatttatga

SEQ ID NO: 17439 - DNA, 503 bp, Glycine max
  Clone ID: PAT_MRT3847_115752C.1
ggctcgagaatttgttggagatgagatgataataaccaaaaaaaaaaaaaaaaaaggaagaacaggaggtgtggatttttctcaatctcaccagtcactctcaacctcaagggtccctctctgcattcagatttcagatgcaaatggccattgaacatttatatcattctccacctttgtatcaaaaccagtgcaatcagaaaaaaaaaaaaaaattaaaaaaggagattttcatttttcatggctttcattcacagtgcaccctctgcttaggagtagtgctcctttctcttccagttttgtgggaatttgtaacagagcgaaagtatgaattctccaattcatgccccttcaccaccttcttcctcttcttcttgctcttataaccgtcctcctccatgcatcgctcatacttctcgtaatttcaagtttcctcttgggaagaagtactttaggatggtttgaaactcaacccttggtttctgagcaattactcaacaggc

SEQ ID NO: 17440 - DNA, 158 bp, Glycine max
  Clone ID: PAT_MRT3847_115753C.1
agcgatgaaggaggaagaagtagtggagatacaagttcagtctcatagatggatacgacatcggaccaatacgttactccccagactcagccatcgaactgctcgaggaccgcatttttgaagactggaccaaagacaagaagattatacaaaaagca

SEQ ID NO: 17441 - DNA, 334 bp, Glycine max
  Clone ID: PAT_MRT3847_115754C.1
gttatttaatatggtttttgtctagatataattaatataaacaaaggttctttctctgatattagaaaaaaaaaaaaaaaaaaaaaaaaaaaaaaaaaaaaaaaaaaaaaaaaaaaaaaaaaaaaagaaaaaaaaaaaaaaaaaaaaaaaaaaagcaaacaaaaaacaaataaaaaaaaattggggggaccacagcaacggatcacttggccccagaaataaattctggaacaggacacaaaccactgcccaatttgccataaaaaaggccgaaaaaagattggggcacaaactgggcaccgccaacccagcggaaaaaaccattccccctaaa

SEQ ID NO: 17442 - DNA, 144 bp, Glycine max
  Clone ID: PAT_MRT3847_115755C.1
ccggtccttaattcccgggtcgaccgcacgcgtccgcacactcgttcggctgactcctcatatacggagcttgctacatatgctaaagacaatggctaatggggagatgcttataacagggatgtgaggcttccatgcgaaaaa

SEQ ID NO: 17443 - DNA, 276 bp, Glycine max
  Clone ID: PAT_MRT3847_115756C.1
atggtgatagagatggtggtgatatcaatagtgatagtaatagtagtaaaggcgattgatgcggtaatggttgtggtgataataacattgatggtggttgtgacaacaatgttaatggtggtgatggcagtaacagatgatgactgtgatagaggtggtattggtagtggtgatggtagtagtagtaatgtcgatgatggtgatggtgatagtgatgttggtgattggaaagacattggtgacggtgatgaatgtagtattgatttatggcgatga

SEQ ID NO: 17444 - DNA, 233 bp, Glycine max
  Clone ID: PAT_MRT3847_115757C.1
cacatttgttcactcttcttctcttgcggctagggtcagaccgcactgtcttctagacttgaagaaaatgggtaacgagaaggttcacatcagtattgtcgtcattgagccatgtcgactctggggaatccactaccactggtcacctgatttgcgagcttggaggcattgacaggcgtgtgattgagacgtttgagcaggaagctgctcagatgtacaagaggtctttcaag

SEQ ID NO: 17445 - DNA, 852 bp, Glycine max
  Clone ID: PAT_MRT3847_115758C.1
acgcgccgtaagctcggaattcggctcgagggaaagcatggggatgccctgaaaacattgagtttatctcgaaaatttagcttgccttcattaaatgatgagggtttaagaaaggctatatttggtggagaaagtgcagcattttctgatagtgaaggaacgaactatacttttggctttcactttggtgaatctgaataccttcgctcacaggatgacagaaagctgttagaaatgttgtttccttttcccactattttgccttcatttcaggatgatcttcctgtgtcagagctcttgccttttcagagaaacagcagtcttatttcaagagttcttcgttggatgcaaaatgttgacctaagaattactccacttcctctggttattatgcagtactgcctaaccgtctacattcagaaacaggtggattatattggagtgaatatgttgttaaagttgatgaacgaatggagattcatggatgagcttgcagtgttgcgagctatatacttgctaggttcaggtgatttgctgcaacactttttgactgtaattttcaataagttggataagggtgaagcatgggatgatgattttgagttaaacaccatattacaggaatcaatcagaaattctgctgattgtatgctgttaagtgctccagattcattggtagtgtcaataaccaaaaatcgtgttgacggtgatgaggaagctagcacagctggtgttttgagtactcctcgtcaaagtcatgccaatagctttggaattaatggccttgatatgctcaaattcacgtataaggtcccttggcctcttgaactcattgcagatacagaggcaatt

SEQ ID NO: 17446 - DNA, 789 bp, Glycine max
  Clone ID: PAT_MRT3847_115759C.1
gaagacaggaagttcgatctgttttagctgaagctcctgttcaaccattggagcagccattttattggatttctagtgaatggcttcgtcaatgggcagacaacattattccaattcctcttgacaacacgccggtccaatgctcacatgggaaagtcccagtttcaaaggttacctcaatgaagcggttgtctgctaaagcatgggatacattgttctccaagtatggtggaggaccagcattgtctcatgataaccactgtcgggattgcctgattcatggggctatgacagtggtgtcagctgacacctatcgggatagaagagaatcaatgaagtcacttgcacgggatattctagatggaaactgcctagatggaaagtattacatatccagaccatggttgcagcagtggtggaaaagaaaagtccttgatgctccatctgaagctgatgctggaccaacagcagccattagttgtccacatggtcaattgatgccagagcaagctcctggtgctaagcgggtgcttattcctgagatcttttggctcttcttatatgaagatgctgtttctgtaaagcctgatgatcctttgggtggcccaactttttcttcagattctgatgagtgttcccaatgcagtaatgaattatctgaagtagcatgcttggaggactccttgagattagttaaacaaaaacaacgtcagaatcatgagaaattattccaggctaaaagtttgcaactttctctgcacagcaagtatttcttggtgcctttgtcat

SEQ ID NO: 17447 - DNA, 175 bp, Glycine max
  unsure (1)..(175): unsure at all n locations
  Clone ID: PAT_MRT3847_11575C.1
atgggttcgctcgaggcaccaaccgccgcggacaacggctccgctcccnccgccggcaacngaaaatccnactnnatcaacggcgcggaggcggcgccggancncnacgcgtcgaagcngcncagatngtcagtnnncncgnnggaagtgagtangcanatcatgtgcngttgag

SEQ ID NO: 17448 - DNA, 584 bp, Glycine max
  Clone ID: PAT_MRT3847_115760C.1
ctacactacaactccaccgagaacatgaaatatgccaatgtgtacctttccaacaaaagttaatgagccaacaataacatagacttttttactattgctatcattgccactaccattatcaccgtcaatgccattatcatcgccataaatcaatactacattcatcaccgtcaccaatgtctttccaatcaccaacatcactatcaccatcaccatcatcgacattactactactaccatcaccactaccaataccacctctgcattgtcaccaccatcattaccgccaacattggttgtcaccatcaatgtcattgccaccactgctagcaccaccacctatcacagtcatcatctgttactgccatcaccaccattaacattgttgtcacaaccaccatcaatgttattatcaccacaaccattaccgcatcaatcgcctttactactattactatcactattgatatcaccaccatctctatcaccattgttaccgcaatcatcactagtatctttatcgctgatgttgacatcatctctattgtagtcaccccacacaaaaacattataaaactaaatat

SEQ ID NO: 17449 - DNA, 642 bp, Glycine max
  Clone ID: PAT_MRT3847_115761C.1
tgccatacatgctggatcgctatcccatgaaaccaactcaaatggatgagtttgggtgtgccaaaccattcaacgaggttgcccaatattttaaccgtaaattaaaagaagttgttgagcaactgcggaaagaattgccaggagctgcaatcacctatgttgatgtgtatacggtcaagtacaccctcatcagccatgcccaaaaatatggttttgagcagggggtgatagcatgctgtggacacggtgggaaatacaacttcaataatacagagagatgtggagcaaccaagagggtgaatggaacagagattgtgatagccaattcatgcaaagatccaagtgtgaggattatttgggacggaatccattacaccgaagctgctaataaatggatcttccaacaaatagtcaatggttccttttcagatccacctcactctttaaaaagggcttgttatggtaaatccattaggagacataaattccagttattgtaagagagaatttggatccatgtgcttaaactagcaggtcttatttagtgtttaatgaattatgtttggcaaattttatttatcattgatgtgtattttatatgagatattaagtaaaaaaatttacgagattttaccccatgtt

SEQ ID NO: 17450 - DNA, 1545 bp, Glycine max
  Clone ID: PAT_MRT3847_115762C.1
tacggctgcgagaagacgacagaaggggggacggaattcggggatacaatacaaatgtaacgtagtagttgaaaattttgttgcatcagatgaaagctatggagttggtgggagagaaatggatagaaattgtgacgtgtttggtaatttcaacaacattaatgcggagtgtaagtggaagtgaaagcgagtgcattttcccagcgatattcaacttgggagactcgaattcagacactggcggtctctcagcagcgttcggacaagctcctccccccaacggaatcacttatttccactcccctaacggacgcttctccgatggtcgtctcataatcgattttatagccgagagctccgggttggcatatctgagggcttacttggactcggtggcctccaacttcactcatggagccaatttcgcaacggccggatctactgtcagacctcagaacacaaccatatctcagagcggatacagtcccatttccctagacgttcagttcgtgcagttctctgatttcaaaaccagatccaaactcgttcgccaacaaggaggggtttttaaggaattgttgccaaaggaggagtatttttctcaggctttatatacctttgatattggccaaaatgatctcactgctggctacaaactcaacttcaccacagaacaagtcaaggcatatataccagatgtattgggccagatctccaatgtcataaagtgtgtgtatggggaaggtggaaggtcgttttggatacacaacacaggaccattggggtgcctgccatacatgctggatcgctatcccatgaaaccaactcaaatggatgagtttgggtgtgccaaaccattcaacgaggttgcccaatattttaaccgtaaattaaaagaagttgttgagcaactgcggaaagaattgccaggagctgcaatcacctatgttgatgtgtatacggtcaagtacaccctcatcagccatgcccaaaaatatggtaagcaataaaaaaacaccaaatgcagagggtttaggaattttcttttgttgttgttgcatatttattcgtggaaattgtaatgaaatactcaatatgcaatgtttggaatggaaaggttttgagcagggggtgatagcatgctgtggacacggtgggaaatacaacttcaataatacagagagatgtggagcaaccaaaagggtgaatggaacagagattgtgatagccaattcatgcaaagatccaagtgtgaggattatttgggacggaatccattacaccgaagctgctaataaatggatcttccaacaaatagtcaatggttccttttcagatccccctcactttttaaaaagggcttgttatggtaaatccattaggagacataaattccagttattgtaagggagaatttggatccatgtgcttaaactagcaggtcttatttagtgtttaatgaattatgtttggcaaattttatttatcattgatgtgtattttatatgagatattaagtaaaaaaatttccgagattttcccccc

SEQ ID NO: 17451 - DNA, 483 bp, Glycine max
  Clone ID: PAT_MRT3847_115763C.1
tttcttctgcaaagggctggcgatggatgtttggggggcttatctatattagcggggggatcggagtcttttccttccttgtccttcgtgagacgtacgcgcccgttatcctcgccaggaaagcaaaacgcctccgccagaggacaggaaatgtccacatccgcgctcgagggcagaagacgaaacccttgggtgttctcctctcccgcgcgtgcctccgtcccctccagatcctgattttcagtcccatcatcctggcgctctctctttacatgagtcttgtctatggcatcatctatatcctcttcactactctctcgaccgtcttccagggtgtttatggcttcgataccggtaattccggtctcacgtacctcggctatgccgcggggatggacctgtccctcatggtagcaggatatttcaacgatagtattcacaagaagctcagcgagaagcaccacgaggagatgccagagtttc

SEQ ID NO: 17452 - DNA, 119 bp, Glycine max
  unsure (1)..(119): unsure at all n locations
  Clone ID: PAT_MRT3847_115764C.1
tcttntttctaacttaggattccntctccaacaatggntctcgncngtttcnactattcttccctcttcagcagtgttgcagttctagctccntcttctctcgtntcggatcttcctcc

SEQ ID NO: 17453 - DNA, 554 bp, Glycine max
  Clone ID: PAT_MRT3847_115765C.1
ggctcgagctggaagttataagttatggagagaattcttgcacattgttcagagaaatttctccagatttaaggtttcagaggttaggaagatgtatgcacatgcaattgaagctctatctgcttcatgcagcaagcactctaggcaggttcttcaagctgccaatccttcttcaccagatcctgtatttgttcagttagaacttggtcttgtggatatatttcttagtctttgcagatttgagtggcagactggttatagagaattggccactgctttatttcaggctgaaatagagtttagtttattttgtcctcctttgctgctcactgagcagagtaaacacagactgtttgagcatttttggaacagtggtggtgctagagttggggaagaaggggctcttggttggtccacatggttggagaaagaggaggaaactaggcaacgggttatgaatgaggagctctcacgtgaaaatgaaggtggtggctggactgttggtcagaaccatggtctaaagataatgagggtattgccaatgttgaacatga

SEQ ID NO: 17454 - DNA, 202 bp, Glycine max
  Clone ID: PAT_MRT3847_115766C.1
atgggctcttcttctcctccggacacgagcaagagcatgtagctagagcgatgctccggctacatcaggagactcgacagcgcgatgctcctcgtcgcctcgtcgaaactcctgttccgtcgcactatcttagtggcactcatgcgcgacttgctcttcaggttgagcgacactcggctcgggccaggctccaggtcccagc

SEQ ID NO: 17455 - DNA, 631 bp, Glycine max
  unsure (1)..(631): unsure at all n locations
  Clone ID: PAT_MRT3847_115767C.1
ccacgccgtccgccaaactattgcaattgtagctgggtaaagaagagcttccaactttgcgttgtcctcacgaaaagcatctccaactcatatatgtggaagtgcagaaatgaacctgcttgtgcatgcagtcactaccatccgttgcatttagcgtttccattcaccttctgcagcttctgattaaccattgaatcagcttgcaaaacacaagagagtttttcagcaagaggcattggcagaatcaagttcactaatgtctttcgaagatgttaacgctgctgttagtgagtttgctaggagatttaatccaatattaaaaggagattgggaatctacaaaggcttttcttgacaatgacccaagtgcattgacagcaaaggtcactgcaattggtgggactgcacttcatgctgcagctgtaggagggcagtggcaaattattgagaagttggtgcaacatgtgcctgcacaagtactttcagatctggacttgatgggttgtacttgcctgcactatgttgcaatgggcgaaagcacaagtgctgccaaggcattggntggctaaaatccttccttgacacaacttactgacaagaaaggattcacaccactttatctatagtattac

SEQ ID NO: 17456 - DNA, 468 bp, Glycine max
  unsure (1)..(468): unsure at all n locations
  Clone ID: PAT_MRT3847_115768C.1
aacnaacaccttatattttttattaggaaaaaaagcccccttttattagaataaggatcattttcagttcaattaaacacccctattcttacaaaaggggaaaaaaagaaaacaatataaagtttataacccaaaaattagttaatctttttctaaagagaaaaaaaattgacacccccaagagccttggaacgggttttccttgggtctactacccgcctttgacttttccaagcccaaggggtctatttacatttctaccaccaacaaaaacgggtatcaccattcaccaccactggttgaataaaatactattctcccaccactctcacagtagcagggagccactcttgggagccccggcgatcggagtaaccatcatttttgagcctaaacagcatggaagagtcatggccacgggggcttgaaataaaattctttttcagtggggggaaacaaggaaccaac

SEQ ID NO: 17457 - DNA, 288 bp, Glycine max
  unsure (1)..(288): unsure at all n locations
  Clone ID: PAT_MRT3847_115769C.1
gagagaactagtctcgagtttttttttttagtttttatttaaaaaattgattttttctccagtttttttatatgcacctttttacctatatatattttacacaagaacttcactacagtatgtgctctcatacaaaatcacaaagagttcagaaaaaattgaggtggaagttcataatcactttgacnctggtattatgcttccatccttctaaagacgagcaattcgcacggaaattgaaaccgtaactggttacgtaataattcatacatgagatgctctttctac

SEQ ID NO: 17458 - DNA, 227 bp, Glycine max
  Clone ID: PAT_MRT3847_11576C.1
tacggctgcgagaagacgacagaagggaggtatgttttcattagtcatgtttttttttttttttatgtattatccattagccacgccatgtgtccccggttggccaaataaagaaggagcttttgggttactgttccgtaacctattcagataggcgtaatgttcactggtcttaccatataggggtaccagaatgggatttggcaaaaagcggccgaaaacagggg

SEQ ID NO: 17459 - DNA, 158 bp, Glycine max
  Clone ID: PAT_MRT3847_115770C.1
gtaccaaaacaattgaagtccctggaaaaaagaacatgtcctgctctaacgccttaaagatatgatgcggataaatgcacttgcaaaactatacccaaacgtattattaacctcaaccattccgataggctccccttacataatcattagtctatccc

SEQ ID NO: 17460 - DNA, 430 bp, Glycine max
  unsure (1)..(430): unsure at all n locations
  Clone ID: PAT_MRT3847_115771C.1
aatgtagatgtaatcaaacataaatgcattatatctgtagatagaatactcactagcttagtgagtacattgtagtttgttggcgagcattatgaagaatcaatgctattttaattaagcgcatccgtctcttctcacttcatgtggtactgttcaacattgattatgaaattcatatactgtaatttagcaatcacgtcaagggtgagttataatatatatactccctccctctcttcatttgtaaagttcatgatcttgttcaacaactcgaaaagatttacatcaataaataatcacataaataaatttaacatcacataataatttaaaatcttgaaatttaaatttgtaagtcttgtatttacttatatgacattcaaatttttcattcttatatttcttttattatgtggaactntatctcata

SEQ ID NO: 17461 - DNA, 273 bp, Glycine max
  Clone ID: PAT_MRT3847_115772C.1
atttcagcacactggcggccggaactagtggatgcacatgatcgaatccgtatggcgtgcgcactaggtcaatcttgccatgtagtatatgagcgctctacgacagatccgaggcgaaacagggacaagattaggcccgaactagtatatttccataatgcttccggcttatcgtcttttcgagcaagtgtatccatgcgactgccgaactcttcgaaagccttgatgctttctggatcataaccgcccacgaactgatgaacaccgcaagca

SEQ ID NO: 17462 - DNA, 1152 bp, Glycine max
  Clone ID: PAT_MRT3847_115773C.1
agctctggttctaggaaggaggttatcaggtcgaacaagaagaatgttgatgatggttcttctcggtctcgcaccagggaggctgatggttcccgtgggaaaaaggaggtgcctaattttgttaaggttggcaatgttgtttctggtaaattgacctcgaagattgtcaagaagaagaaaattgttaagagagtggtgaagaaaggtactgcaagttccaagtcatctgcgtcaaattcactaccggctaaaacccttcctggaactgtgaaagcggagagtgttgcacgtatttcattgactgcctctggtcctgagaaaattgaagctaatttggatgagaaaagcaacactgtcatccaaagcaacactgttgatgaggaggctaagcctgactgtttgccccctttaccaaaggaagggaatgtattgaaagaagatgcagaggtaggcttattgcagccgagtttggggccacattccgggtcacaagagtgtaagagtgacaaagattctgatattgggaaagtatccaggtttgaaaaagataggaaacatttcaaattctctatctagtgcttctagtagtgaagataaaaagagtgattctgatggtttagatacaaatgattctgtccatgataatgcaaatacatctgattgtttagatgcaaataattctgtgctaaatacttacaaggttactaaatcattaagtggaagtaatatttccgtagtcactaacatcgattatgataataagcaattatgtcagaatgaagtgtctctatcacctgggaaatattcaaatgtaggatccccacagaataggaatcttgaagatgtaggggatgaacttttgaaaagcagtgataccttttcatgttcaggaaaaactaggattcaggatggtctagattgcctacaacatgccagtgcactgaagcacagttccgataatggatcatctaatttagaagatagtacttgtgttgactgttctggaattatgcattgtgctggaaagtaagtgtcccctggtgatgtcgtcatatcccctgagaattgggacacagaaaaagcattcccaaattctaatatttctgctggatctggtgaaggggacacaaaaaaaaaaaagaagggcggcct

SEQ ID NO: 17463 - DNA, 456 bp, Glycine max
  Clone ID: PAT_MRT3847_115774C.1
acgcccacgcgatgattctcgcgtgtgaatttttttttcaatatttatgacggtatgttgactatatcatataatttgttgatattaataaaaaggaaacggtttaaaagacagaaaaattattaatgggatgataatggatgaattataaaatgtcaaactaatagccctatttttgctccccttaatcttttgtttttgcactatgttctttgtttccctgtacacacaaatcatatgcattcggtcactgaatgatggatgacacactcttgcttccatagtgtctttggttcaattattctctctttattaagccaattaacaagtgtctaaggcattaaagatgcagcttaattacaagttataacatctgaataagttgctctttgtaaaaattggtgagctagtaaccagaaattcaacatttaagtgtttgctttttattattttttt

SEQ ID NO: 17464 - DNA, 261 bp, Glycine max
  Clone ID: PAT_MRT3847_115775C.1
taaatcactctaaactctctttgcctagtacttggagagagagtaagtttcacatagggccgtgtatgcactggcataaaagttgtgatggcaaccacaaccaaaaacgccaacaccatcaccacatctcaaagtgtgaaggcccttgtgactgtgaagcaaagtgggggtgggattataagaactcttgtcaatggaggtcttgatgggatcagagaaatgcttgggaaaactcttgttttggagcttgtgagcgatgag

SEQ ID NO: 17465 - DNA, 435 bp, Glycine max
  unsure (1)..(435): unsure at all n locations
  Clone ID: PAT_MRT3847_115776C.1
aattcggctcgagctcaagtcaatgtgagatctcaacaaactttatcgtggaaggccaataatacgattgctaaacacatctctactcctattttcctctattgctaattttgtgtagtaagataaaatttattggatgtaacaattaaactttagtatcctgttattgttctttaagttggataaagatagatttagcaaaaaaggcatgtcagaataaattcaagtcgattatttgtagcggaatgatttggaaacaatgttttctccccaataattcattgcttttatcagcttttgaagttgaagttgaaacttggtttcatcaatttctgaatgaacaattgtgcttgttattcctgttgttctctcaatcatcaacaaacaatntctgttgattttctctacacttgttttttgcaagatgcatcatca

SEQ ID NO: 17466 - DNA, 323 bp, Glycine max
  Clone ID: PAT_MRT3847_115777C.1
atggtgtgattgtttttattgtggtttttttcaaacccaccatttttttaattttcgactatttttttcacaccgcgaactactttatcctcctggatttttttcaccccaccaactacttaatcaccctggatgagttgaacaccaccaacttcttaaacgtgttttagtgcttccaccccagcatgtttttaatgatgttggggtactcccaccccatcttttttattatcctgtttaacttgtgccacccttttttttttatcctcctaagctgcttccaccccatcttgtttattaccctatttgggatctcccgcctg

SEQ ID NO: 17467 - DNA, 232 bp, Glycine max
  Clone ID: PAT_MRT3847_115778C.1
tgggactcaggcacattcatctctatcgagtaaattaactatgaagcctatcctactattatccctttccgtcctgcctctctttgctttcgtggctctttcagaagatcttgacctcgttgtggacatcactggctcttccattttcgcaggtggcacatattacattgtgccatgaacttggggcgctgccggtggtggactgtgttgttgtcggatcggatgactcctt

SEQ ID NO: 17468 - DNA, 1684 bp, Glycine max
  Clone ID: PAT_MRT3847_115779C.1
tcggctcgagctcgagccggttctgtcttatccaaaatgttgccacttgtgtacatactcatagctcttcctgcagtagtgttgctattgatcctcttcaaagccaacaaaaacaacccgccacgtccaccaggtccaagaggccttcccataatcggcaaccttcaccaactcgacgcttcgaagctcaatctccaactagggcagctctcaaagacctacggtccccttttctccctccgaatcggcttcaagccagccctcgtcgtttcctctccaaaactcgccaaagaagtcctcaaagaccacgatctggacgtgtgcacaagacctccctctctcggccctctaaaattaacctacaatgcccttgagcttatcttctctccctacaacgaccactggagagaaatcagaaaaatctgcgttgtccatttcttcagctccaagagaatctccgctttctcccatgtcagaaaatccgaggccaagcgaatgctgcagatcgtatcatcccacgttgattcttccaaaacaaccaacttgaccgaggttttgatggcggtatcaagcgctataatatgcaggcttgcctttgggaggaagtatgatgacgacggcgccgaaaaaagcaggttccatgggctgcttaatgactcgcaagctatgttgctctctttttttgtttcggattacattccgttcttggggtggattgataaactcaccgggatggttactcgtctcgaaaagactttcgaggcgttggatgggttcttgcaggaagtgcttgacgagcaccttgatcctaatagggtgaaagtgaaacagaacgaagagaaggatcttgttgatctgttgcttgagctgaagaagcagggtcgcttgtcaatcgacctcaccgatgatcaaatcaaagctatcatcttggacatactcatagctggaactgatacaactgccgctacgtccgtgtgggtgatgaccggattgataaagaacccaagagcaatgggcaaagcccaagaagaaattagaaacctgtctggcaacaaagagttaatagaggaagaggatgttcaaaagcttgtgtatctgaaggcagtgataaaagagacactaagggtttatgcaccaacgccactggttccaagagaagccattagaagtttcacaatagaagggtacgaaatacaacccaagacaatagtgtatgtgaatggttggtcaattcagagggaccctgaggcttggaaagacccagaagagttttacccagagaggtttttgaacaatgagatagattttaaggggcaagattttgagttcattccgttcggtgcagggcgcagaatttgcccaggaatatcactgggaattgccacagtggaactcataactgcaaaccttcttaattcattccattgggaaatgcctcaagggatgaaacctgaacacatagacactgaggggctgccaggacttgctcgccacaagaagaatcatctttgccttgttgccaaaaaacgtatgtgaatgaaataactaacaaagggcctctaatgtaataaagccattttagcttgggctttgattttgagtatgcaaaatggatccccatgttgcagttatatgcctttcaaaaataaaataatttaaaattacaaatgttttttttggttct

SEQ ID NO: 17469 - DNA, 961 bp, Glycine max
  Clone ID: PAT_MRT3847_11577C.1
aaagatcaaggttgaaaaatgaaaattttataacaagaggatttccaactcttattaaaagaagattttccgacatgcataaacgcagttcatagtttcatatatatctttataaatatcatatggggatgaaggtggctaggcctcttcattgcagatacacacgacctctaagcatggcccctatagcttccaatggagaatgggggccacatctttaacttagggaaccaagatgaggtcattgataatggttgatgttcatacggaaaaagaggatgcaaggccaaactgaaggccccagagctcaaaagatcctttaacaaagtcatagtatcctcctttcagtgacaatgttttgttcaccaagccatctctaacaaatgggtaagttagcaggtttccaagggaaacattcacagattctatggacaaaacttagatgcagccccttaagtgtttttagtgttgttctctaatcagaattggagttttatcccaataatcctcataataagggtcttctcacagtgtgagcacaactcagcaaaaggggcatccccatgctgtgtcttcacctttgcctttgcaggcaagccaattttgacccactcctcaataaaatcagtagagtaggttccatcatatgggaaagacagaagccccttaataccaccacaagcactgtgtccaatgaccacaatctccgacaccttaagatgcaaaacagcatactcaactgcagccccagttccagcgtattttgactggtcatatggtgggacaatgttggcaacatttctgaccacaaaggcctctcctggttggaaatctagcacatgagatgggcacacccttgagtctgagcaagcaaacaccatgaacttggggctctggcctttggcaagttcaccatacaaagctggattcttgtcgtatttctccttcttgaagtgaatga

SEQ ID NO: 17470 - DNA, 238 bp, Glycine max
  Clone ID: PAT_MRT3847_115780C.1
ctgttatatttaatcgattctcatgccaactattaacttgaaacaaagaaattgatcaccttaatacacctcctctgctaataaacacccccaaattattcaccttctaccactataactctcatatcaagacacaatcttttcaacaaacataatacctcaattattacatttacattttcatgatccaagaacttttctttcctcatgtatattcctctgtttatacttaaattca

SEQ ID NO: 17471 - DNA, 392 bp, Glycine max
  Clone ID: PAT_MRT3847_115781C.1
cacaactggcctattcatataagtacttgtgtgggggcatgtgggtttttaaagaagggggtttgctgaagctacatttcatccttcatgaagctggtcacgattttgactcgcatataagcgcttggctctttcttctgttctagtgagtgtgagaccttgcaatgtatcttcatcctatgcaagtgaactttcccctgattttggaggggaggagggggaggggctcactcgttttagctctttttttacagaccacacagaatgcagttgtcttgacctcacgtctgtctcttctgttgccaagtaatgcagtactgttctgatctgccgctattaaaacgcatagggaaacgactggagtgtgattaaacaagctgttcctccaatgc

SEQ ID NO: 17472 - DNA, 254 bp, Glycine max
  Clone ID: PAT_MRT3847_115782C.1
acctccccctaccaatcccgatctaatttcctgggggtccagcatactcctaataagacaacaaataattccaattcatatatgaacatttttgcctccttattggtgtggaatgtggaattgggattccccgatgaattcctatctcatttcctttggcttcaggataggcctaataagaaaacatataatttcaattcatatatgaacattttttccttcttatttcttgaaaatgagcaatttgtattccc

SEQ ID NO: 17473 - DNA, 363 bp, Glycine max
  Clone ID: PAT_MRT3847_115783C.1
ggttatagatgattatctgttgtttgttttttttattttgacaaagacccaatggggacatgggcattgacaagatacacaagccccgaaaagattttggaggggattatgtccacatgggtgaaattgaaaaagaaattgttcgggacgacgacggacaagattgattatggccaaattgctgccatgaggaaaattgtcaatggaggaattgttatgtgagggatgaagagcacgctcacccccagagatgtttttggaaaaatagaccatggatgcgagggggctattgtgggttaaacaacaattacttgatgagccctttttgaacagggaaaacaatgccaactatatacatcccga

SEQ ID NO: 17474 - DNA, 398 bp, Glycine max
  Clone ID: PAT_MRT3847_115784C.1
ttcccccaacccccagggtggggttttgttgagaaacagacctcgccccctcagggccatgcccgcccaaacgcattactaggttgttttcacatcccaacacaacgcagaattaatgggactaccatcgtttaataataaagatgtaggaccacaaaacacaggacctgatatatttttctcttgtcggttttgaaggcacttttacactccatagaggggccaaaggtagctgcaatctgatcctgctttttctcaaacgctcggcgatggtgaacgcatgctcaggacattgtgacacattgatccttgggtcacatagtgtgtggaaccgctagcttaagttgttaaatgtgaccgtgcttgaccccccaatgctctgggtgacattttgaccc

SEQ ID NO: 17475 - DNA, 261 bp, Glycine max
  Clone ID: PAT_MRT3847_115785C.1
gtgaacagccgcgagaagacgacagaagggggggcaaattgagaggagacgccgtttactaccaacgacagaggagaagacaaatgtgccctcaagcccaacgcagaccgcaacgacaaagcgaagccgataaggccaaccagccccggtatcaggagccacgagcaagaaagagaccacgcccctggggacggagacgcacgagaacagctcgcggtcaggagagcgcgcgaaacagccaagcgggaagacacaggcacg

SEQ ID NO: 17476 - DNA, 500 bp, Glycine max
  Clone ID: PAT_MRT3847_115786C.1
gcaaattgcaaaatcaaaactttagagaacctagcgattaggtatgtcttcttcccatgtttattatgtgaatggcgctttggaatcatacaaataaaccccaacgtgtttcatcatcgattcacccaaattcaacgaaacaacatcctcatatcaatggagccatcggatccaactcacgcttctccagatgaatttgattctttgttggaagaactagaatctgcccatgaacatgtgcaggaccgtattaggcgccttgaagcgataacttccagaaccaggcagtattcgagttggccgctgtttcacactccaatccaaataaccaactctactggacaaaccagcgcgctagctgatgctcgtgaagaagaaatgccgagccgggaagttgaggaaagagtcgttgaaagtgggagagggttcaaaaggaaaggtgcccatttagtagctaaggcattggggaggattgaaacagatgccaataaggaaggggg

SEQ ID NO: 17477 - DNA, 478 bp, Glycine max
  Clone ID: PAT_MRT3847_115787C.1
ctacaaacaagggtctctttaatgggtctcggtaatattgggttctacatcacaataatgaatacagaagttatccgatttcctttgtattaaatgctaggcaatattattacatacaatcatgcttgatggtatcaatagaatattatagtatagatatatgtggttatgaagcacgttgctcatccaataatccaaaaagcagagtaattaaagatgctttgtttctaggggtttcaactttcaactactctggccgtacaaccttttaggggtttaatgatgagtagtactgtggttgagccaattaatgccaaattgttggcataattaatatttgggttgattggaagtgtcggtgatgagacagctagaagaagagacgaatcctgatgatgctgcatttggttgcaatggccttgggacaatgctactaccattgctgcaaagttgccaagccaagttggaaattttttgc

SEQ ID NO: 17478 - DNA, 313 bp, Glycine max
  Clone ID: PAT_MRT3847_115788C.1
aattcagccacctgcacccgtttaactaagggagctagtgcacaagtgaggtttcagcctagactatggcgtttcctggcagcagcttctgatcaaggagcgtcaatttttgatgttgaatctgacacacatatttacaccctacactgacatcctgaaccggcgacctatatcatgctgggatgggaatggtgatgccttggcatctgtgagccctaattggctgaaggtctggagctcgtcctcaggacgacaatgctttcatgaggtcagctccgctgggacgccaacgccttcctgtgttttccctcca

SEQ ID NO: 17479 - DNA, 471 bp, Glycine max
  Clone ID: PAT_MRT3847_115789C.1
gtttatcttgttctttttttaacaactttcacaagaaaaaagttgatatatagaggaatggctacacctttgaacgagacaagggaaccagaatggaagaaagcgtggacagctgggaacactttgctatctgcacctcctcttccactactcgccatagttggcatcgtggtgttcttgctatgggtttcatcacaattaaacaccaactactcatccatgcaaatagccacaaccaacgtgaacttgttcctcttgtttttgcttcttgtgttgaccctcatagcccaaggaacacgcctcgtgcttcctgcagcaccaagcgtgacaagtttgtatgatgcagatgtggagtcatcggagtcatcatcaatgccatggggatggattgtctctgccttgatgcttttggttctgatatccaaccgacttcaccctatctttgtaattgcaacagtggttgtttatgtg

SEQ ID NO: 17480 - DNA, 1048 bp, Glycine max
  Clone ID: PAT_MRT3847_11578C.1
tttttgcttatataattaactaagattaatttggcatctttctcggggttgcgggctatataaagatcaaggttgaataatgaaaattttgttacaagaggatttccaaactcttatcaaaagaagattttccgacatgcataaacgcagttcatagtttcatatatatatatttttataaatatcatatggtgatgaaggtggctaggcctcttcattgcagatacacacgacctctaagcatggcccctatagcttccaatgcagaatggtggccacatctttaacctaacaaagaagaaaaatgcagtggtgaaagaccataaaaaaatattgcatgtttctttgatcaaaatggattgaacttcaaatttggaatagagggtgatggagaaatctccatatccacttttattattaggaaattcagcacatgcatgcattcataacaagggcaatattaatttcagagtacattttagataggagaatacttagggaaccaagatgaggtcattgataatggttgatgttcatacggagaaagaggatgcaaggccaaactgaaggccccagagctcaaaagatcccttaacaaagtcatagtatcctccttttagtgacaatgtcttgttcaccaagccatctctaacaaatgggtatgttagaaggtttccaagggaaacattcacagcttccttctcacagtgtgagcacaactcagcaaaaggtgcatccccatgttgtgtcttcacctttgcctttgcaggcaagccaattttgacccactcctcaataaaatcagtagagtaggttccatcatatgggaaagacagaagccccttaataccaccacaagcactgtgtccaatgaccacaatctcagacaccttaagatgcaaaacagcatactcaactgctgccccagttccagcgtattttgactggtcatatggtgggacaatgttagcaacatttctgacacaaaggcctctcctggttggaaatctagcacatgagatgggcacaccctttgagtctgagcaag

SEQ ID NO: 17481 - DNA, 374 bp, Glycine max
  Clone ID: PAT_MRT3847_115790C.1
tcgacccacacgtccgtcctgctgctagaagacgacacaagggccatggcgcgtttattataaacatatgggcttgtgccttctggtaatctttatgttttttgttacaaaagagatcatcaggtaatatgcatcaataacatacttagtctacagcacatttctcctggcataagacatactatatgaagattataatcatggatggcatgacaaacaaattggaactacttaacaatactaaacccatagctctatgggttattccccttgtttgtactccggcaacattcgcattctcaggagttctctttcacttctatacgccaactggacaagactgcggactcaatgtcttattaatactatgacca

SEQ ID NO: 17482 - DNA, 1207 bp, Glycine max
  Clone ID: PAT_MRT3847_115791C.1
gcaatcctttcccatattaatgcaccttctactagtttacgccaattcttcctctatgagaaaatgtgaatgataagcctaaaactgcaatgtcatttcaaccaccacagttactgtcatctccataactggccctgtgactttgatatttttatgaggagttgttgaactttgcctttttgtgaaccaagctagtaaattcccccatgtgaactaatttgatgtaaaaggtagaagttattattttccatttgaaggtttttttacaaagagacactattcttttgcataggaagagttatctagtcaatttggataatccttgagaacctcattcttatcttctcttgggattttctgctttttattttgttctgctcaagtttatggtttttgttgaaaatgatgaaatctccatcacaatcaacatatgaagcaagccattatgatgactatggatttgatctgcaacaagacttttgccagttcttggaggaagcaaggcaacatggaaaggaagcaaaacttaagagttcatcagtgcatccagaagaatctaggaaaacaggatcagagaaagagaaaaaggggaagaagtcatggaaaagttctctggcttcatggtggaaggctgacaagaaaagcaagcatagtgaaaaaacctccaacaattctaaattaaaggattctggtaaaaagcatgctcattcttctggtccaatgtatagatcctccagaagttctgatggaaaacactggcgcccatcatctggtcctcttgtgagtctcttcaaatcctcaaagaaggatgaaaatgagataccttatatttctctccaccaacacaataatagccctcctgctgaacagaactatggccctctttatgtggtaaattgacttgtgtatcactagcatagttgcaaattgtggtgacacaagcttcattgagaaaaggctttctaatttgtattggttgttatgggagaattttgctggacaatgtaatagaacaactctttgtgagaaaaagaatattattgcttttgattttgaatgagttatatttgcttgttggatttgttagaggacaaacataattcaaaataagtcacctttgttccttgttgtaaaaacattcatatgtaatgtgataagaatgccaaggggacacataaccccggggggcgcccctgaatatgatttt

SEQ ID NO: 17483 - DNA, 1149 bp, Glycine max
  Clone ID: PAT_MRT3847_115792C.1
acggtctcaataatgattgcaactataatttaaaaccatgatcataaactagttttgtataagtacttataatttggtataactaaatataatcgtttatgattattttttttctttcaaaagtagtttttttgagcactcctatttgcaggacttgttggagcgcttcgccttcgataacgtgtgcaagctagcgttcaatgtggaccccgcttgtctcggcggcgacggcacagctggcggcgagttcatgcgcgccttcgaggacgccgcggttctgagctcagggaggttcatgagcattttaccggttgtgtggaaaataaagaagctgttcaactttggatcagaacggaggctcagagaatcaatcaccaccgttcaccaatttgctgattcaatcatacggtccagattggaatccaaggaccaaatcggagatgaagatttactatcacgtttcatcagaacagagaatacctcaccggagtttctgcgcgacgttgtgataagttttattctggcggggcgtgatacgacgtcgtctgctctgagctggtttttctggattctgcaagcggcgatttcggagacgatgaggttgtacccgccagtgccggttgacacgatggagtgcctaaacgacgacgtattgccggacggaactagggttgggaaggggtggttcgtgacgtaccacacgtacgcgatggggaggatggagagcgtgtgggggaaggactgtaccgaatttaagcccgaaaggtggttggagaatcgagccgagagtccgtttcggtatccagcccgaaaggtggttggagaatcgagccgagagtccgtttcggtatccggtgtttcacgcgggtccacgaatgtgtctggggaaggaaatggcttatattcagatgaagtcaattgcagcttcgttattggagaggtttgagattgaggctttggataaggacacgtgtccggagcatgttttgtctttgacgatgaggatcaaaggagggttgcctgtgagtgtaagagtaaggaatgaatgaatgctagggtcaggaatattctctccacatgtacctgtcttccaccactctgcaaaataattgtaatttctgctgttttaatgaaatcattagtttgaat

SEQ ID NO: 17484 - DNA, 525 bp, Glycine max
  Clone ID: PAT_MRT3847_115793C.1
gcgagcctatatgccctgcagaatccttcctgttacggtcccctttcttgaaacatccttcattgcaatattggcaggggaggaacggggctggctcggaggaagagaggtggggaggtgatcacggttcacagaggagggaactgaatgacattccacgattacataaactgtcataggcagccgaagagttcacaagtgtgaagcctgcaagccggcggttgccgctgtgtaggaaagaagctaaagcacttccagagcctgtccggagctcagaggttcggaagacttatcgaccatggagcgcgcgtcctgcttgttgctgctgctgctgccgctggtgcacgtctctgcgaccacgccagaaccttgtgagctggacgatgaagatttccgctgcgtctgcaacttctccgaacctcagcccgactggtccgaaagctacaagtgtgtgtctgcagtagaggtggagatccatgccgccggtctcaacctagagccgtttctaaagcgcgtcgatgcgga

SEQ ID NO: 17485 - DNA, 1872 bp, Glycine max
  Clone ID: PAT_MRT3847_115794C.1
caaagaaatatatatctaattttttttagatcggaactgattcaactcatgcattgacacatcacaccttatcacgatatcgatcaccttcatcacaaatggagcttctttccttcctcttcctctcccttctcttcttcctctatctctacatccagttcctcgctagaaaaaaaccccgcaacaacaaagccttcaaagactaccctctcatcggaaccctaccggagttcctcaaaaaccgccaccgtttcctcgagtggaccacccaagtcctccgcgactcccccaccaacaccggcgtcttctctcgcccctacaaactccacggcatcttaacggccaaccctgacaacgtggaacacgtgctcaaaaccaaattcgacaactaccccaagggagaacgcttcatccacctcctccaagattttttgggtaacggaatcttcaactccgacggcgacctctggaaggtgcagcgtaaaacagccagctacgagttcagcaccaaatcgctccgaaacttcgtcgtcgacgccgtcaccttcgaactccaaacgaggcttcttccaattctctccaaagcctctgaaacaaacaaggttctcgatttgcaggacttgttggagcgcttcgccttcgataacgtgtgcaagctagcgttcaatgtggaccccgcttgtctcggcggcgacggcacagctggcggcgagttcatgcgcgccttcgaggacgccgcggttctgagctcagggaggttcatgagcattttaccggttgtgtggaaaataaagaagctgttcaactttggatcagaacggaggctcagagaatcaatcaccaccgttcaccaatttgctgattcaatcatacggtccagattggaatccaaggaccaaatcggagatgaagatttactatcacgtttcatcagaacagagaatacctcaccggagtttctgcgcgacgttgtgataagttttattctggcggggcgtgatacgacgtcgtctgctctgagctggtttttctggattctgtcctccagacccgacgtgcaaagaaaaattcgggacgaaatcgaaacggttagatcggaaaaatcaaagggtaaaataaaataaccaatgatgacggtaaaaaatgaaaatccaccagtaaaaaaatatttaaatatataattttcttatttgaaaagaatatattttttaaaatttagtttagatgtatcttacgataatgtgcaggcgcgtttggatacgaggaggtgaaggagatgcgctacctgcaagcggcgatttcggagacgatgaggttgtacccgccagtgccggttgacacgatggagtgcctaaacgacgacgtattgccggacggaactagggttgggaaggggtggttcgtgacgtaccacacgtacgcgatggggaggatggagagcgtgtgggggaaggactgtaccgaatttaagcccgaaaggtggttggagaatcgagccgagagtccgtttcggtatccggtgtttcacgcgggtccacgaatgtgtctggggaaggaaatggcttatattcagatgaagtcaattgcagcttcgttattggagaggtttgagattgaggctttggataaggacacgtgtccggagcatgttttgtctttgacgatgaggatcaaaggagggttgcctgtgagtgtaagagtaaggaatgaatgaatgctagggtcaggaatattctctccacatgtacctgtcttccaccactctgcaaaataattgtaatttctgctgttttaatgaaatcattagttagaatatataacatgatcaacgggttctaattaattagggagggggggaaggggagggggaga

SEQ ID NO: 17486 - DNA, 1117 bp, Glycine max
  unsure (1)..(1117): unsure at all n locations
  Clone ID: PAT_MRT3847_115795C.1
attaccttcacgcgaaaacgatagaagtcgtatccggaggaaaagcgcaatacagaaaaagataggaaaaattttcgcattatgtttgtattgagaacaatgaactctacttttcttacttgagatgaggcttcccactcgatgagtgctacaaacattctaggccaatattagtgtagactgtagacatgcgctttctgaagtgctgttttaattgctctatacgtaccatgtatacaaattaattcgttttttcgtaaagaaatattcaatgctacgactggagcatttttcacactcaaaatctcaccagataagctagatcactactagttaaggtatacaggacagctcttgaaagttttgtcctagcggcatgattaggaccaactaaaacactaaatgcatgctttggtaaagccaccgaagaactttgatcaaagataaagaaaaaagaaaaaacaagaggctcttgaaaaatgtccaaagtttcagtaaagtaagatgacacacaaaattttgaaactcaaagctacataaattttaggcttaaaaatgtcaatagaagtcaatgatatatttcatagccaacaatcctccctgactaacaatacataaggcaaaaaattctctcacactccatgatgcatgcaagagttcaataaattgtgattgctaaaaaatttaaacattcaaagagtacaacaaaaattaatgtatctacacaaacattgaaatttgatagaacccgttctaaacttaatctttggaatttagttccaatcctttcaattataatttaaaatagtatctaagatctgaggtcttatgccgctaattctagtccggaagtcaacaactcgctcaattggccggacaaactcgtcataaataacatttccccacttatatgaccagtgttactcttccaagggcacttttgttccctcgacctacgccttatactcggagcttctgcaaaaatattgatcctataactatgaaaaaactaatttctttaaactgcattttcgaattcaaatntaagcaatacaataaccattgaaggagaggttccctgaccagatgtttttaaagggcacccaatgctatgatc

SEQ ID NO: 17487 - DNA, 614 bp, Glycine max
  Clone ID: PAT_MRT3847_115796C.1
cttgggctctcagttactcctctgtctagtatggtagcgtaccaaaaatgcttagggcacaaaacccctaactagaacggaggagcaaggcctgaactacaagattgcctaagatgtttatttatcttatcgaacacacgtcaaaaatcgcttataaataagagttatacgggaggactctataagggcacacactaatggaatgtagtgtaccctgatgacacgctttctaaacatataactaatatcactactggtcaaggtgcaaatgtttatactgctgcgcagaaaatgcttattcataaatgaaatgagctaaatgatggtactacttctgaggacaataaaggagctgaaaataggattattgtaatcatgttgtacaaagactgaggagatcatctgatgaaggacctactactgcaactgcttcttgagttgaggcaagtgcaactcctactgcaacctgtgcgtctgctgcgcctcaagctcctgctaaaactggagcaacgcctacacctgtatactgacccagctgctcctgcttatgctgcagctcctgctgctatatctacaggctctgctgagccagagactgatatatatgggcaggc

SEQ ID NO: 17488 - DNA, 333 bp, Glycine max
  Clone ID: PAT_MRT3847_115797C.1
cccacgcgtccgcccacgcgtccggggaaactctactaatttgccttcaccccaatcagtcgggagttccattcgcaggctgcaagatgaatttccactggctcgaaggcaatcacttcaaagatttcttgagaagagaagaaacaggtacagtactagcaacctttcctctttagtgctgtctctaatcagtttggaatttccaatattgtatttgatatcatgaatcactctctttaatgtatgtcaaaatttattggaactataaatcatgaatggaattcataaagtcaggagtcacatccacataattttgtgatctctaacaaattt

SEQ ID NO: 17489 - DNA, 412 bp, Glycine max
  Clone ID: PAT_MRT3847_115798C.1
tttttaatataacccatgcgaaaacgcccaattatcaaggattttttgaaaaggaagccgcggaaacaaccatctggagcaaaatgaaagcgtgcggaattgaaggaatacaatgggaatgtacgcggtaacctgtacaaagaccggggaggtcaaataaataaagaagtaaataatgcaagatcggtgaataattaaaatgcaagaaggacacgcggaggaaacggatacaaaggatggaggtagaaacgatccagaaacacagaaatgttgaaacacagccagcgggaataatgcagactgggctctccaaatgcgagagaactcaatcaggactatagctgttgacctcccactgaaatatgtgggaacaagaggcggatttgtgaaccagtttcttccccgggggact

SEQ ID NO: 17490 - DNA, 256 bp, Glycine max
  Clone ID: PAT_MRT3847_115799C.1
ggctcgaggaaatacaattctcatttatatcccaagtacttgtacaccagctagtgaggtgccggtgtctctcagggattgacgcatatagtaggcctaaaagcctacgtactcaattcattgatatcaaatctggggtgagctgtctgcaagtaccttaatcaaaggttgaatgggacagtatatgcacatatgtgatccatagcactggctaagaccctttaaaaaaaaaagcaaatagggcggccggcacatt

SEQ ID NO: 17491 - DNA, 278 bp, Glycine max
  Clone ID: PAT_MRT3847_11579C.1
accagattaagtttcccctctggttagtctgttcccaccaactgcgaatgatgtttctgttcacctcagctatttccacagataccacatttttaagcatcatcccaagtcgatgcagagcaacctcggcacctccgatgccagaaaaaagagacaggacattgatgccatttggaaaacgacccttcaacactgaaaggtggtaggcaactgtattaacctgaaatcaaatccatttacattcagtcaaagagctttttcaaaggaagccaagaggg

SEQ ID NO: 17492 - DNA, 476 bp, Glycine max
  Clone ID: PAT_MRT3847_1157C.1
aaacagcccccccccatacataggtttgaacgggttataacaaaaggggaaaacataaggggggctaacttaaaaattacttttaaaaaatttttccggggagaaataaaaaaaaatttggggttacaaaaaaaaaaactttgttttttgaaaaaaaaagggggcccagtaaaagcctttaaaggggcagtcagaaaaactaaaaaagcccgtgataccgaattttaaaatttaaaattaacagcttttaaaaagcatcctttagggggggaattggggatttaaggggacttcctttattagggggaaaaaaaaatgaaatcacgggccgggggactccacatgctcgccaaaggggttgttttgaggggaaaaatacatagggaacatttttttcctcagttggggaaggaaaatggaaaaaaatttcaagagggttagtggccggggccatcaaaacaagctaagaaaagcct

SEQ ID NO: 17493 - DNA, 369 bp, Glycine max
  Clone ID: PAT_MRT3847_115800C.1
ggggtgaaaattaaaaagctttgccatgttaaagtttagtttggacaagggttcacattttgcaagaggaattttttccctttaaaacataccggttccttttttatacttgaacacagttcccttggccccctaacattattttatacttgaaccccgtttccttgggcacatacatagaccccacagggttttttgttttggttaaagggaacaacttggaaaaaacaaagtttgctaactgggtttagtcgggggcttcaattttaaagaccctggcatttctattaaaaggggggtgatgaaacttgggaaccagggcaaggggaaacccttgacccctgttgggttttaggtgttcaagggtac

SEQ ID NO: 17494 - DNA, 207 bp, Glycine max
  Clone ID: PAT_MRT3847_115801C.1
tacacacgtccgcccacgcgttcggaaaagaggaggcatttaatcacagagggggggtgtgcaacggccgtgctactgtgcgccgcggctggcacgtaacgggtggaggaggcggctaacccgataccaatggttgcggaggtggatgccgaggtagatccgttgatagggcattgcctgcacgcgctgaagatggctagggtcatg

SEQ ID NO: 17495 - DNA, 271 bp, Glycine max
  unsure (1)..(271): unsure at all n locations
  Clone ID: PAT_MRT3847_115802C.1
cggggttgttaatatgagcacgagcaagagcgctcttttggtatgaaagcctctccttcaaccctgaagctcagagccatggatgatgcgtctacgtgcggtcagcagatggacgggcagagagaggagagaagggttacagacacttatagagagctatgtgaaagacgagagaggtaagagggtgaagtgtggttatgagattccactgcaactggaggaggcgtcgagggggatcncagggagtgcgaagttcagaggtaggaatttg

SEQ ID NO: 17496 - DNA, 397 bp, Glycine max
  Clone ID: PAT_MRT3847_115803C.1
gtaacaaaatctgtattgatttgggaggtgtccgaaactgcgagggcagcaatttgggcttacagaaaattaatgcatataacctttgcttattaacattacttagggccttcctgcattcatacatgttcaatatattagctaataataattaaagggaacatccttattcatgaccaccggaagcccttaatacagcatagcacaccatcgggggggcacctggggccaccataagaaaatagctttgctctaatacttgacatcctaacgtatctagaagacccacccactccatattgcccactgtgtgccccattcaagaacatcacaccctgggacgcacaattacaacctatccacttactatagggaggattctcctactaggctactt

SEQ ID NO: 17497 - DNA, 173 bp, Glycine max
  Clone ID: PAT_MRT3847_115804C.1
ttgttttgttgttcgtggaggaacgacagacataaggctgtatgagaagttgctggcgggaaaggaagaatgcgatttgcttcattcataccgtatgtagcaccgatggaacaagctcaaagtgctgaagtctacttgagactaggcccttttgaggtcgaatgttgagaggg

SEQ ID NO: 17498 - DNA, 343 bp, Glycine max
  Clone ID: PAT_MRT3847_115805C.1
ccatataattattcctagctctatgcttcaacgaggcgattttacacaccgaaatggaatggttggagaatcaacttactgtgagaagcctgttgctgagaactctctggtccctcatactggaccaccacttctatcaccgtcacctgctggtcctactaccaatggttcacaatattatcattactactgcgactactacttggatggacggagggcaagctagctttttgctaagtcctttctaggagcgcatgttgtctacaagattgaagctgctggatcacactgaggcacttcctatatctggggtgtgactgtagacagtggtgaacttcctcta

SEQ ID NO: 17499 - DNA, 154 bp, Glycine max
  Clone ID: PAT_MRT3847_115806C.1
ggagattggacataatataaaggtgattggaacaacgagtcgagaggaaggggggtgtatgaatcgcaattacaatgactttaggtttccagagataaaagcatacccatgggagaagatttttgagaaaaagaggcctccagaagaaattgat

SEQ ID NO: 17500 - DNA, 252 bp, Glycine max
  Clone ID: PAT_MRT3847_115807C.1
gagaagttgaagtgaaagaatagcaaaagatgaagcacaggcagaagaaaatgcactggatgggcttttgctctcacaagaaaaatgggtaactacctaagcaattgctcttctctcttttttttttaagcagtttgtatggcacgcttagcgcaaggctacgcttagcgtgtccatatgatgtttgggttttaaagcccatgcgcttagcgccagttctcgcgcttagcatttcctgcagctcaaattggt

SEQ ID NO: 17501 - DNA, 554 bp, Glycine max
  unsure (1)..(554): unsure at all n locations
  Clone ID: PAT_MRT3847_115808C.1
tccgnaaaaaattttaaaaaaaaaaaaaaaaaaaaaaaaaaaaaaaaaaaaaaaaaaaaaaaaaaaaaaaaaaaaaaaaaaaaaaaaaaaaaaaaaaaaaaaaaaaaaaaaaaaaaaaaaaaaaaaaaaaaaaaaaaaaaaaaaaaaaaaaaagggggggccctttttaaggattcaatttttcctccccctttttggcggcgggtatttttttttttgtgcccctaaatttaatttattggcccgttttttaaaaccgttttacttgaaaaacccttgggtttcccaattttaatccttttgaaaaaattccctttttccccagttgggttattacaaaaaagcccccccccattcccttttccaaaaatttcccccccttaattggaaaatggacccccctttttaccgcccttttaaccccgggggttggggtgtttccccccaggggcccctttacctttgcaagccccttagcccccgtttttttggttttttccctttcttttttccccagtttcccggtttttccccgtaaatttttaattgggggc

SEQ ID NO: 17502 - DNA, 789 bp, Glycine max
  Clone ID: PAT_MRT3847_115809C.1
cgaccatgataccttctttattcaaaaagaacagcgtcttaacaaaatatgcctaaagttaaaataatgttttaaaaagataaagcttagaaaagaacaaacttttttataagcaagaactagaaagaatgtctttggacaaaattacacaatgatgtcacattcttttcagaatttattcaaccgcacgtcgagcgaaagttatttacaaaaaactatatatatgacatgcaagtatatgatactgtatgatcaaaaaatttcttggttcttgatggcaaaggcaaatatttatctggccgtagagcgagatgatcggctacttggatttgtgcgattacccctaaatatggcttccaggttctggaagcatccaggagtcctaaccttccagcccctcttttgagcaagatggtagtatatgtcttccaatctcccaattatttgcctaaatgttggccttctgtatggtttttcatcccagcattcctcaattaactgttttagcccataagcataaagctttggtgaagctctaaatggtggacgctcattttcaacatatgctttaggaacttcattttctggctttgcaaaaaacggtggacaaccttcaatcatctcctggaatatcagagcaaatgaaaatacatccacatttgtgtcgtattcctcatttctatatacctctggagcaacataacgccatgatgtatccaggcttgccacgggtttgtcttctttgaccattttagcaactttaaacaacttgctaactccaaagtctgc

SEQ ID NO: 17503 - DNA, 245 bp, Glycine max
  unsure (1)..(245): unsure at all n locations
  Clone ID: PAT_MRT3847_11580C.1
gtcgcangcacgcgtacgtnagctcggaattcggctcgangaanacaaagtgaggtaaannaatatngctnagnataaaattgtctanctgantganatncgcaagctngatgatattnnaaaannaagganntgtacatnaaggttcaggttcgacntcntaganntatagatgattttgtccatnatgatagnccaagctcanaaacttcganaggntgatggcccttgaaattttannaatg

SEQ ID NO: 17504 - DNA, 778 bp, Glycine max
  unsure (1)..(778): unsure at all n locations
  Clone ID: PAT_MRT3847_115810C.1
accgacagacccaggtaagcggacgagagccaagcgctctccggaagacgacccggatggggtgggcatggaagaccgcagatcggggtgttgggaggtattgcatcacctggcaggcgcgaccgtagactgaccagcgcagtgcacctgatggtgaaggatgcgaaagcggtggagccgggtgtctatggggccggaactctagggacctgaggtgggttctggtgcgcagagcagcctctagcgggtgtcgtttttaggtcgataggctccctatgaggtctggccgggaacagcccagaactgcaggctgaggggaaggtgtaaagtcggttattcacccaagggaagaaaggctgtgtagggtcaagagctctgtgtgggctggcggtctagattttgaatgcggctggaagagcaagtttttttttttttttttcctttctttcttgtttctattgagaacggaaaaacaataaaacaaagcgaaaaccatgttactctgtttagaatgccccagtctcccagtccctttcctaattctttgactctgatttcagactccctcgctttgcttttcagttgcaggttctgatctttggtactacgggagctgctcttcagcccctctcctgctcctggacctatggattctccatctagtgtttcttcttattcctcctcctncctctccccatcattttccacgtcctctgtgaacagtgactttagcttcccttctgataacgagagggagggcaagggcacccatgagctc

SEQ ID NO: 17505 - DNA, 301 bp, Glycine max
  Clone ID: PAT_MRT3847_115811C.1
ttctgatttgttctctcatatctgattttaccgtcaccggaatccaactcaaccttggtcggattcttcagtatcatcgcatctccattcgttttatcctctcaataatagattttacttcacttcaaattcaaggtttgatttgaagtttaaagtcctaatatcttaactgttgcgtaaaacaaccaacacacaccatcatctgaagccaatacaacaacctataactatcatccaattcatttttatcttacaaatctactaatgtatttgttgctactcaccaatgtcttgtttcctc

SEQ ID NO: 17506 - DNA, 479 bp, Glycine max
  Clone ID: PAT_MRT3847_115812C.1
gtatactcttgtataaattactatttgttggttacactattatttttatcgttgtgtccaaaacttaattctggagggtttaaaccccacaaacaaaaccctgcgagaaaaccccactgaaggggggggggggcacatttaggtaaagcaacggacccttggcagggcaattaaagggggaaaaaaaattaacctaaccctagttttggagacataacatccctatttaacaaactatgatatcaacattctaccccaccctaaaatgcaatttgaaactggatccattaagtgggtcccccccgcgggcatccccaaattagtcctacatacataacccagctccaacccccttacaaaagaaaagaccattcctatgacatcctcctacaccccaaaaatacccttgtgttaacccccccaattttaacccccaatactcctccccaagatgtggaggcccaaaacctaccgtggcc

SEQ ID NO: 17507 - DNA, 549 bp, Glycine max
  Clone ID: PAT_MRT3847_115813C.1
tatgatccatatcctgaacaaagactttatataaggcttgggcacaaatccataacaagaagaagcaaaaaaaacatatatggattggaaatcggatggtgtgagttgaagcaaagtcaggatgaccaacatgcaaattgtcccagcttacaagaatgttgtggaggcgcagtatgttgaaatgatggttccattgtgcgagaagaaaataaagaaaaccttatccaatcttaaaggcatatactcggtaaatgtggattactatcatcaaaaggtgactgtgtggggaatttgcaacaaatatgatgtgctagaaactgtgagaaacaagagaaaagaggctcggttttggaaccaagaagataatgttttattagagaaatcacaatcaccctcatcttcaccaccaccatcctttcctcacaaggattttaagccctctttagctttaaccaagcatctacaaattacagctagctagcctatgctaaaagaacactccctcattatgcttcatttggattcttcctgtttgaggcaagctaggtt

SEQ ID NO: 17508 - DNA, 895 bp, Glycine max
  Clone ID: PAT_MRT3847_115814C.1
atcacattagaacaattacatattagttcatggacaagctcttactttagagctgggcaccaccctccttcccttctttttatattccaaatgtcctgtgtccgtgttcccacaccttccctcccctgttcaaaataccattaccatatcaaaaaccttaaccccattaattcataccctccccaccttcccgaccgacacataacagctttcgaaccaaacctgttccttcttccttaatggccacaaacatcatccaagcaaaatggaaccaccactccaaagaagacgaagatcacaaagacgtggagcaacaagaagaagaagaagaagatgatgaagcattgtcactctgcgatcttccaatcaaccttcctcccatagcgcgtaaccaagaacactcaggccgggtcgttcatcacaagatctctacaatttcaggattatggtaagcccctcgttaggtcagcatgaaatgtgtgcagcggatgaagtctccgtcaaagtaataatagtagtagaagtagtagtctcagaagccagaactcatcaactagctctgtcactgccgccactgccaccacaaccacaacaatccctaaaagtaaacccagaattcgaaaccaatttcacacgcacccaagcccaaaaccccagttaagagcatcagcaccaacacacaaccaaggcagaaaatccacgtcagcatggggaattttccgtttgggtgtggtcgctgctccccattgcgcgtctcgttcagctccgaggccgggttggttagccaccgtgtctcaatctcaacaacattatgggtagcaattcgttaggtccgaatcctggatcgcaattcaagcgatttccgagcagtataatagtagtagaagtggtagtc

SEQ ID NO: 17509 - DNA, 192 bp, Glycine max
  Clone ID: PAT_MRT3847_115815C.1
cggacgcgtgcgacaacgcgagcgcaaaatatgcagaacacaagagattgtgccgcgcagctaatgatgcaagtgctctaggctatcacagtctatatcatagactgtacaagaggcaagacatcagaatctgagacaggctaaaatacctaaagggccacggatcccagaaacgagcttaacataacctgg

SEQ ID NO: 17510 - DNA, 781 bp, Glycine max
  Clone ID: PAT_MRT3847_115816C.1
tgagagtgaaacattctacggctgcggaagacgacagaagggggagaacaattggacggcatcgaaagccacgtggcacgcgccaattcatacgtgcggggtggggtccagcagctgcacgtggcaaggaagcaccaaaagaacacccgaaagtggacatgcatagccatcatattgctcattattatcatcttgatcatagtcctccctatagttctaagaaattgattgatcacatattctaattggttcaaggtggtggctgccaagaaattggactagttcaaacttcaaagattattagtcaggtcaattcatgctgcctagaccattgcattagaaaaatatataccttggcttttgtaatcagttttgttttcttctttttggtcgcatcatgtgttgattagtttacattttccacgtacccatttgtacatgtttgaagattgagacattttggtttggtttggtttctagaagcctatgtatggacacggtgcttgcatgtaccgtttagaattattactttactaccgggaagagaactcattgaagcggttttattctagctagctagggagagaaacgctaagccagggtgatgttcatggtggtacattcttttgcaaatatgtatttaattttaagcagttctatatgggtgaactactataggcattgcaggagttacttcaattgctttgcgtgtttatgccattgcatgtacaaaagaattgcacctttttcactagcatattgataacattgctttcacatt

SEQ ID NO: 17511 - DNA, 258 bp, Glycine max
  Clone ID: PAT_MRT3847_115817C.1
tcactatttatgccaacgtagactatgtgaagatcgtccgtgacacatgccgagaagttggatacatttttgttgatggtggtcttgatgctgtcatatgcacggtgttgttgaacattgaacaaaaaagtcttgatattgtccagcgtgtgcacggatacttaaccaagcgcccaatggagggtggtgctaccgtcctgtgtaatatgtttggttatagcactgatgaaacatgttaacacatacctgtgagtcatg

SEQ ID NO: 17512 - DNA, 607 bp, Glycine max
  Clone ID: PAT_MRT3847_115818C.1
ccacgcgtccggcaggccaccataaacattgaaaaggactgtttgttttgatctctgcagtgttcttgtttatatgaatgggataaataaagaaacttaactgtggatattgcatggaggtttcaggattccatgatttgactcaaaggtttatgaaatttatggaaactgtatgcactgcaatgtattaggttattggcattttggagtgttcagggccaagcactggctggctttgatgttattccagtgttctgggagaccttttattttagtgtctagaagttgaattgggtttcttgtaatcatgtttgcatctttgatgagtgtaaaaggtttctgttgtgtgtatctgaaagaaatggtgaaatgaactaataaaggaagcaaagcccactccttttttgtcttatttatggggattgggaatgtgctactaggtttgtccaacaggatgagactgggcctgtgtgggttgaatacccaaagccttgcgaagtttatatcaccaagaaagaagagattctgggaggtagttatgcatttacatagggagttaagtgagtaggttatatgtattgatgggcccaaagtttaggggaaaggg

SEQ ID NO: 17513 - DNA, 287 bp, Glycine max
  Clone ID: PAT_MRT3847_115819C.1
ctatgggaagctgggcgcctgcgggaccggtccgattccggacgcccacgcgtaccattatgctgtcgtacaacgctcttgtttgtgagagaatgactactcgcttattctgggtgcgaattcatttgcccaaaccgggctaatattacagggattcgccattgtcggacaatgaggcctccttcgagagtcctgctgaagagcgatctcaagagaggatggagcagctgctcttcttcatcgtgaagcaccaggtctgaggtgctatcagcgctcacagggcgacg

SEQ ID NO: 17514 - DNA, 405 bp, Glycine max
  Clone ID: PAT_MRT3847_11581C.1
gggctatatatcatgaacatttgagtcttcattgcgcgcgggcgacctcttccattaacgggtggtgcctctcttccatctccccagccaaaacctctctcaagaaggccacattacgcccttctgtctttgcaaccgttagcactccttcgtctccttctccttcttcttcttcttccttcccttctctcattcaagacaggcctgtctctgctgcccctgcccccatcatcaccccaactgtgacagaggatatggccacagaatacgatcaagctattgcagaacttcataaattgtcgagggagaagagcgaactcaaagccacagctgctgagaaagtggaacagattacagcttctctgggcacatcatcatgtgatggcatgcaatcatcagaagcct

SEQ ID NO: 17515 - DNA, 118 bp, Glycine max
  unsure (1)..(118): unsure at all n locations
  Clone ID: PAT_MRT3847_115820C.1
tgtgnnntcaagtngctcttngtctttgnttctncnctttcaccctcaaanttantcactctcttnatctncaccttttcagtntaaagcntcagatcacaacagatcccacccattc

SEQ ID NO: 17516 - DNA, 2140 bp, Glycine max
  unsure (1)..(2140): unsure at all n locations
  Clone ID: PAT_MRT3847_115821C.1
ttctcgcaccgctgcgcaagtaagggaggttgaaggcggcgttcgatgcacaagtgagagaggttgaaggcggcgtgagaatgttggacatcaacctattcagagaggagaagggccacaaccctgaactcatacgcgaatcccaacgccgtcgtttcgccagcgtcgaaatcgtcgacgaggtcatcaatctcgacaaagaatggcgaaaacgtcaattcgagttggaaaatctccgcaaggaattcaacaagatcaacaaggaagtctccaaactcaagcgtgctggggaggatgcttctaagttcattactgaatcagaggagaccaaaaaatcgatagcggagaaagaggttgaagtgcgggaaactctgaatctcttgaattccaagttggaaactattggaaacctcgtccacgattccgttccaattagcaacgatgaggccaacaatgttgttgttagatcgtggggagagaaaagagtggagcctaagctgaagaatcatgtggatctagttgagcttctcggtattgcagatacaaagaaaggagctgatgtagctggaggtagaggtttctatctcaaaggagatggtgttcgtcttaatcaagctctaataaactttgggcttgattttttggataaaagggagtatactttattgcatactcctttcttcatgagaaaagatataatgtcaaagtgtgctcaactagcccaatttgatgaagaactttataaggtaactggtgaaggagatgacaaatatctgattgcaacagcagagcagccactctgtgcatatcatttagatgattggatccaccctacccagctaccaataagatatgctggatattcatcatgctttcgtaaagaagctggatctcatggtcgagacactctaggaatattccgagttcaccaatttgagaaagtggagcaattttgcctcactagtccaaatgacaatgattcatgggacatgcaaagcgttatgctgtagcactctggtggtttctatagagcctggtgttttgaatgatgctgcagcaaagaagtatgatctagaagcatggtttccagcctctcaagcttacagagagctagtgtcctgttcaaactgtacagactatcaggccagaagattagaaattcgatatggtcagaaaaagagcaatgagcaaatgaagcaatatgttcacttgttgaactctactctaacaagcaatatgttcacttgttaaactctactctaacggctactgagaggaccatttgctgcatactggagaacaaccagaaggaagatggggtagagataccagaagtcctcagaccattcatgggtggaaagactttcctgcctttcaagagccaaccatctaatgaagccaaagggaagaaatcgaaggcctaattgcattttaagtcagtgatatttatgaagagttgttcagagttgtgtaggttatgatggccctgatattatccaccacatactgtttccctttctcccttatatgactaaatagtaaaatgatttgtaggagcacgcacaatttttggtcaaaatacacagcatgacattttctgtaattcattaccctaaaaaatttgtgcttctataattgcattttggtgcttttatccattgcgaaaaaaaaaaaaaaaaaaaaaaagcggccgctctagaggatcggttattttgaatagagcttatttggnnngatataaatattttttttccttcctaggggttacgggaataatttgatcaccatagcagaatcccgtgaaatatgaattgcttgttcaatttgagagcaatacaagtgcaaggaaattctgggatatgggattagaattctgaagtctgtattggtttgtcttgcagggcattgaaacacgttcaatttaatcgagctgctcatatgctaaattcaattacgaatttcattggaaaggggaatgcgttctggaaaataggaactagagtattcaaccaagttttgtagtggctgtgggggtttctattgcaagccaatcttctggctgattccttacagggccccttacagtgttaggttttacgctgtgggttgacttgcanntttctgaatctctattattatc

SEQ ID NO: 17517 - DNA, 1419 bp, Glycine max
  Clone ID: PAT_MRT3847_115822C.1
ctcgagccgcagacacagtccttcagtctgtctgtcgttctatttaattcccctctccaaatttcaacctctgtctcctctccttaacagcatcatcacatgcacccgcgattcctacgatcccttcccatggtctcttctctgcaccctcgccgtaccttctagaaccttccctcagatctcaattccccttccgctttctcctttcatggaaatggcttccactccccgcaccgtcgaagagatcttcaaggactacaccgcccgcagaaccgccatcgttcgcgctctctctcaagatgtggatgaattctacggactctgcgatccagataaggagaacttgtgcctctatggacatccgaatgaaacatgggaggtgactttgccggcagaggaagttcctccagagcttccggagcctgcactcggaatcaattttgctagggatggcatgaaccgcagggactggctttctctggttgctgtgcacagtgattcgtggttgctctctgtggccttctatcttggagctcgtcttaaccgcaacgaaaggaaacgtttatttagcttgatcaatgatcttcctactgtttttgaagttgtgactgacaggaagtccagtaaaggacaagcccactgcagacagtggaagcaagtctaggggcagcaccaagagatcaagtgatgggcaagttaagagcaacccaaagtttgcagatgaaggttatgaagaggatgatgatgagcacaatgaaaccctttgtggtagctgcggcggaaattacaatgctgatgagttttggattggctgtgacatatgtgagaggtggttccatgggaagtgtgtgaagattacccctgcaaaggctgagagcataaagcaatataaatgtccatcatgcagcctgaggcggggcaggccttagactgaacgatggaatgggtacatgtgaggtgagtgttgtttcatggctgacaagatactgtaattttgttacatctcttacagaagttaatgtaatgggcatagtatcgatgctcaagggcaaatttatcagggattaagtttgtttttccagatgaaccattggtgcatgccacagggtatagaatagaacatgacaaattttaattttatgattagtttatatttagtagaatatttgcttgaactttaaatattgtaatttttttatttttaacattgtttaagaaaacaaaccttttcaacagattattctaattgaactttcattaaaaaaaaaaaaaaaaaagggcggacagacaactaaagaaataaaaaaacgggggggccgattcttggggggttcttgaacccggaaataatttccgtaccgggacttgaaggagaccctgttttccttatggggatagcttttaaacttggggaaattg

SEQ ID NO: 17518 - DNA, 1306 bp, Glycine max
  unsure (1)..(1306): unsure at all n locations
  Clone ID: PAT_MRT3847_115823C.1
cccacgcgtccgagaagacgacagaagggtacggctgcgagacgacagaaggggattgtagtttgatcaaattcccatggtctctctctctccaattaattcgatttagcttttccccaaatcccaaaccctttctttcgcttagatcccaatccaattgggttatggacatggcttccagtccccgcaccgttgaagagatcttcaaggattacggcgccagaagaactgccgttattcgcgctctcactcacgacgttgatgaattttacggcctctgtgatccagataaggataacctgtgcctctatggacatccaaatgaggcctgggaagtgactttgccagcagaggaagttcctccagagcttccggagcctgcactcggaatcaattttgctagggatggcatgaaccgcagggactggctttctctggttgctgtgcacagtgattcgtggttgctctctgtggccttctatcttggagctcgtcttaaccgcaacgaaaggaaacgtttatttagcttgatcaatgatcttcctactgtttttgaagttgtgactgagaggaagccagtaaaggacaagcccactgcagatagtggaagcaagtctaggggcagcaccaagagatcaagtgatgggcaagttaaaagcaacccaaagtttgcagatgatggttatgaagaggaggatgatgagcacagtgaaaccctttgtgggagctgtggcggaaattacaatgcagatgaattttggattggctgcgatatatgtgagaggtggttccatgggaaatgtgtgaagatcactcctgcaaaagctgagagcataaagcaatacaaatgtccatcatgcagcttgaggcgaggcaggccctaagccgaaggcaaaatgtgaagtgaataatgctgtttcatggccgacaaagatactgtaatattgttgtatcttttatagaagttcttgtaaacggtatagtatctatgtctgatcataatctttcagattaagttaatttcttctaccaagattaatcatcagtgtatgttatataattttatagaatagaattctatacattttatttttgtctattaatctatattttgcttgaatttacccggtgtatgtatggttattttaccttgtgtctgaattctgagatacaaggtagctggtaaaatactgaggtgagaactaccaccttttccggattgttcaaaaaaaaaaaaaaaaaaaaattataaaaaaaaaaaaatannnnnnnnnnnnnnnnnnnnnnnnnnnnnnnnnnnnnnnnn

SEQ ID NO: 17519 - DNA, 304 bp, Glycine max
  unsure (1)..(304): unsure at all n locations
  Clone ID: PAT_MRT3847_115824C.1
ggaaagcngaacgccngccggaccggaccggaaaccccgggacgacccacgcgcccgccgtccacgtggggaagaacacaaccacagagaagggaggcggccaacacagagagcagaggcgggccagccagagcaggggagggaaacaggggaaaggagaagaggaagggacacaacaacagccagagaccacggccccaagaccaaacaagcaggcgaccgggcacaggaccaaccacgcaggcccgcagaaccaaccacccagacacgccgcaccgacacgcacaaccaagacgcccacaac

SEQ ID NO: 17520 - DNA, 570 bp, Glycine max
  Clone ID: PAT_MRT3847_115825C.1
tacagaagttaatgtaatgggcatagtatcgatgctcaagggcaaatttatcagggattaagtttgtttttccagatgaaccattggtgcatgccacagggtatagaatagaacatgacaaattttaattttatgattagtttatatttagtagaatatttgcttgaactttaaatattgtaatttttttatttttaacattgtttaagaaaacaaaccttttcaacaaaaaaaaaaaaaaaaaaaaaaaaaaaaaaaaaaaaaaaaaaagggaggaaaaaaaaataaaaaaaaaaaaaaaggggggggtcaattcttggggggttcctgcccccggaaataatttccgtacggggacttgaaggggacccagttttccttatggggattgtttttaaatgtgggaaaatgttgggcaataattgttccctgggcaaaatggttttcagttaaaaattgaaaaaaatatggggcctgaagacttaagtgaaaaaccttgggtgccttaaggggagtgttacctcacataattggaaatgtgttaattgcctttttttaagggggaaaact

SEQ ID NO: 17521 - DNA, 275 bp, Glycine max
  unsure (1)..(275): unsure at all n locations
  Clone ID: PAT_MRT3847_115826C.1
gttccaagcanctgtncgcactacanaatatgcccganagattccanntctgccttggtagaggagtaccattccccagatggcaatggcaggatttctnctttagtganatctacataganctgnactacatttttnccagtgnatggggncacagaatttatacgatctacnccagacncttnattgnctcattattctgtngagtgtcatgctttcatcactgtggcntgacatacttccanctngctgcngaggatnatgatggtggtggc

SEQ ID NO: 17522 - DNA, 365 bp, Glycine max
  Clone ID: PAT_MRT3847_115827C.1
caagaagtaccatatacctatattggccatgacagctgatgtgattcacgcaacatgggatgagtgcgtgaaatgtgggatggacggatatgtctcaaagccttttgaggaagagaatctgtatcaagcagttgcaaagtttttcaaccccaagcctacctcaatacaacaaaatgccagaactggaaaagcaacttaatgttaattgcaaagtttttcactctctcactactgccatttttcctagttggctgctaaatggtaatttcaatgtgcttttttcaatcagttggttttcaagatatctgaggatatgcatgcaatgcaacttgatacacacaccacgcatatgcagtgatcatttt

SEQ ID NO: 17523 - DNA, 346 bp, Glycine max
  Clone ID: PAT_MRT3847_115828C.1
gtccttgttggaaaagatttctgggaatatccaccagcacgattcctggttttcgtgggattccgacacgacaaagaccagcgccactgatttcttgaagtgtaatggttgcaggctttggggcggaaaaaaccccagttatcatgttcttggcggtggagaaccgtctggggtttttctatggagaaacaggaggatatccgcatccacactctgggttgacaccgctatatggggttttttagaattgcttgagtgccagctgctgacttgtgtttgccacttccgtgaccttgctgtgggggggtatgggtggtggggcagtgttccttctttatgcgctaaa

SEQ ID NO: 17524 - DNA, 161 bp, Glycine max
  unsure (1)..(161): unsure at all n locations
  Clone ID: PAT_MRT3847_115829C.1
attngaaagagaatcagaattggagagcattgtgtgtggtgttgattggtggtggtanggaggagggaagcgatnatantgtnctcaaggnccattgcgtgttaaccttgtctntcttgatatccctagcaatcctgttcttggtggncccacgcatcctc

SEQ ID NO: 17525 - DNA, 559 bp, Glycine max
  unsure (1)..(559): unsure at all n locations
  Clone ID: PAT_MRT3847_11582C.1
aaattcttagcttcagagagagaggcgaagagagagaagcaatcgtggtttcttctatgagcttcacttcaattcccgccacttctctgcaagcataggatatggctgaggtggtgaaatcagaggattgttgtcaggagaataagcaatctactgctgcttcttgctcctctgtatctgaaggcagtggcagtgcaannctcatgtctccggcgatatgtagccccgcatccacatcaccctcacatcggaggaccactggccctataaggcgtgctaagggtggttggacagcgcangaggatgaaacattaaggaatgctgttgcagtttttaagggaaagagttggaagaaaatagctgagtttttccctgatagatcagaagttcagtgtctgcacagatggcaaaaagttcttaatccagaacttgttaaaggaccttggacacaggaggaggatgataaaattgttgaactggtgtcaaaatatgggcctacaaaatggtctttgatagccaagtctttacccggtcgaataggcaaacaatgtcgagagcg

SEQ ID NO: 17526 - DNA, 252 bp, Glycine max
  Clone ID: PAT_MRT3847_115830C.1
ttattagtataaaactagtgaggctcactacgaagaaaatggtcatgcatatttgtcatgatggaatcaacccatactctatggcatggactggtatggccaatagattactgagttagggctacgatattttgtgttgtgtttatgactagtttgattggctcgattactaatcaagctatgagcaagttggtacttataaaaatcattttttgaggcggtgattaaaaattgatgcgtgaaaggacacac

SEQ ID NO: 17527 - DNA, 358 bp, Glycine max
  unsure (1)..(358): unsure at all n locations
  Clone ID: PAT_MRT3847_115831C.1
catggctacgcgccaaccagcaaaccgaggatagcccaaacccaaacacgaccacgncggcgatgggggcacaagaaagacaacactgtgagaaaaggcatcgcaccggagaatgcgagaagaaatatgagccaaccatcggcggggaggagcacccaccggatgcccacacaaacagtggaaagaaccgaagcgacagcagggatactgcaggacaggagaaatgaggcggcctcagagacggatactataaccatggacaatgagcaattagcaagaaagacgagacagcccggctaacatacaaaaaaggacccacctggcacccggaactatgcagggactgcgagaacatccc

SEQ ID NO: 17528 - DNA, 495 bp, Glycine max
  Clone ID: PAT_MRT3847_115832C.1
ggaaaatcagactctcccccacggcacttcccgaagtgttaagagaatgcctctttctatagggggaagagctggtgcaaataatgctattctcatgactatgccacatgctgctcttttaatgtggatatattgtgttggatatctcgtctttgaagttcctaacatgacttctccctacattaaatgtacagactctatcttcatatacatttggaaattcggctgatgataccatcaattttgaggcttttccccacaagctgctgcaatgttgtagagattcaagagatagttgaattgtatttttcacagaatgaatctcttacagcttggtcaactcatgtgcttgctgcaacaactctgttggctgatgggtgtccatattcgcatgcaatggtgcatgatagttcagcgcctacaataccatgggattttgtcattggtgtcaagttgacaaccataaaccatatgtgtgcttataggctcaatcct

SEQ ID NO: 17529 - DNA, 2125 bp, Glycine max
  Clone ID: PAT_MRT3847_115833C.1
tttagaagattctaggattcactttcaggggcaacggagatcaaaactttggctggctcttggcagaaagtcttgttttctcgcatctttcgggaagcccatggcggatgttttataagccaaggaagcgtatgggatgtgtgaagatttttctctcttctctgttattcccaattgtgtttacctgttcgcaggggttcttagttggggtttcagcccttttgctcaccagaaaaaaaataagaaactactgggtgtggcttttggtgtgtttgaagttgcgctgaaatagagacaatcggtgggggttgatagtgttgcgttgagaagggtagtggtcaaatttcgccctccaggggagcaaaacagtgaggagttggctatggcatgggtaaaagttcgtagcaagctcagcagaataatggatcctagacttgaaggccaatattctgaaatggggacaaaaaaagcagcagcattggcttaccaatgcctcagccacagaccatggagcagaccctcaatgagcacagtggtcaagacccttgagccactccaagattttgatgacattccaattggaacatttgtttacacagctccaccggataataatgaaatgcatagtgcaaaggatcaatgtgagacacctaagaggagggaaaataataataacaatggtcaccttcataggaatggccacaggcatcatccacttaaatcccccaagacccctagaccacaatcacaatcacaatcacgttcaaatgatcacaaacaccgaaatggaagaggaagtggatcaaattctcctccatcacatgggaaaattaggcaaggagttcttgcctattagggcacataaatgataaatcatgttttgtacatatacatagagatattttccctcaaaattggttagttttgtgtagtgtaccaactagctagctagtagacccccccccccccccattgccaagaaaagacaaagacaagaagacagtgagcgtgcaagtatatatatatatggtccacacatggaaaacatgcttaagttaatttaatttttgttttatagtaatttgaattccagcattgaggaagagttaggaaagttcaattgttttaaattgtgtatatgttaaggttttcttctggatgaatcaaaagactggttcaataaatggactaataccagctacgagttgttgaacaaatttaaaaaccctttaaaaccattactagctgaaatacctgattaattaagtatagtccctcgtgccgaggaaactctccaagcatggaacgggtgacgaaaggtgcgaagagactaatgaggatgtacaatgtgagggtgtgtggatattgccctgaaattcatgttggtgcccagggtctcaaagctaaaaactgtgaagcccataaacaccaacaacgcaatgggcagcatggttggcagtctgcagttctggatgataggatccctccaagattgcagttctgaatgatttgatcccaccaagatttgtgtggcatgttcctgatgtaaatgcaccgctagaacgagagcttaggaatttttatggccaggcgcctgcagtagtagaaatgtgcattcaggctggtgctggtttaccagaacaatataaatcgaccatgcggctggacgtggggatcccatcaactttgaaagaagctgacatggtagtttgagattaatttctcttatagacaaatcccaacttttgaatatagtgtaaattgtgtcaaactggatgcaatgataatttactgatttatttagggactggaatgaacactttggatagttctttatgggggtatttatgccatctagacaaacgctgtcgttttctatcctatacatacaggcaaaaaatatataaaattgttagtgtcagattgatggtgtaaaaaaaaagtaaccagaaagattattacatataacgcttttttattgttatactttatggaagctatatttcttcaattaaggaagagttaggaaagttcaattgttttaaattgtgtatatgttgaggttttcttctggatgaatcaaaagactggttcaataaatggacacccaccaactacgagttgt

SEQ ID NO: 17530 - DNA, 453 bp, Glycine max
  Clone ID: PAT_MRT3847_115834C.1
agagatctagctctactcactaacgccaagggagaaacaccccttcacatcgctgcagtatggacactccaatatcacaaacttattggttgaacatgtcaaagcttttccagcagcaaacaagtttatgagggctagaaatgatgagaaggacactgcattacatgaggctgtgcgcaatcatcacattgaagtagtgaagaccttgttagaaatggatcctgattactcctatgagactccactttatctgccttcagaaagacaatatcagcaagtggtggctcagatatcaaacaaagtgaaagcaccggcatatgttggccccaataatcagtagcattcatggtatcaaacactatagcaatgtttctggcagcttctatacatattgatcgcactagcaacaatgattgtcgcattcgctacagccacgaatgccgtattggatct

SEQ ID NO: 17531 - DNA, 456 bp, Glycine max
  Clone ID: PAT_MRT3847_115835C.1
acggaagacgacagaaggggagttcgaaaggtgaggaggaagtttaggatttgtggtggtagcaattaatttacgtttatgaatggttgggaactttagttcttttgatttgaggtatttttgtttgatgatgctctgtgagtgtgattggttgctcatgcgataacactttcccttctgcttcagtggattgctggaaattgttcttactgatttacatcgactgactgacttgtttctttttactgttattggaatgagaaatttgtggactatttcatgttctgatttcaaattctagtttaatttggttggttgagattgtggaagtctatttttggttgcttttgcagggaaatgaaagtgtctttgttggtgaagggtaagtgagagaaacgaaaggggtgtgtgttgggttgaataggtatagataggatcaatgagcaacaacaacgc

SEQ ID NO: 17532 - DNA, 180 bp, Glycine max
  Clone ID: PAT_MRT3847_115836C.1
ggccatatctatttagtcaaaattttaaaatttttctttcttcttataaaaaatggcatttgttctatttacattttgagggacggggaaacaaatccgtttttaaatttaaaatggaccgaaaaaaaaatataaatagggctgttctctattaatgacctcttcgacctaacttttaat

SEQ ID NO: 17533 - DNA, 424 bp, Glycine max
  Clone ID: PAT_MRT3847_115837C.1
tcctaagcatgactccaacatgcagatgatagggaagggacacagatggctcggcttggctactcatctggatggggtcatatccacaaggtctaccgtcgccaggaggcatgcgtattggtctgcgaacatgcggagcaaacctaataaccacaagcactacgcacctatgtataagtctgaggaatcctttgacaggccgcaaccttccacccgtatacaagcgaaaaattatgccatgggcacaacgcaacaacatgtaaaccatggccatctattggttgaaccacccctgaaaactgacgagcattatccagatatgatcgtcctataagaagaatcactaacccccaccgacagccacttgaccggcgcggctcaactccccgtgaccgcccactcaggcgcggcgcctccaacagcc

SEQ ID NO: 17534 - DNA, 413 bp, Glycine max
  Clone ID: PAT_MRT3847_115838C.1
ggtttatctgttgggccacacatggtgctgacaggcttgttaagagccagcagaggctcacgcactatgaattactaaccaggacggatatctgacaataaatgatcggtgacctggccttttgctgtggccagagaaatgataccgctacaagaggctgaggtaccgatctttgtggagaccagtttaggatggcgtaccaccagaaacttagagagtggggcttctcagcgcagtctgtgctgattcactctcacggtcgtctcatctattgacaggaaacactacatccttggtgagggaaaatacctgacgacatagttggacagggaatcgactgatccattctagggttgggagcactgtatgcttatgtcctaacaaggctagagatatcatatgcgaggaactac

SEQ ID NO: 17535 - DNA, 866 bp, Glycine max
  Clone ID: PAT_MRT3847_115839C.1
aaccgtcaaacccttaacctgaaacatagctttaagcttttaacagtcaaaacttactacaacccagatcaattgcagggactaatatggggataacaaaaattttaatcagttataatttttctgttcttgaaaggtaaagtaggacagtggtgtgaaattggtggaaagaaaaaacatcagtgatcttgagtaactaacaatccatccgtgtaaaacgtgattggatttgggtcagtaatttaatgtacgaattacgaggtggcagcgactttaagtgttgaatggtgtgcaacatagaatcgcattggcgcgaacacgatgatgaggtcaaagatagtgttgtttggagactccatcacggagcaatcgatccgagagaatggatggggtgttcctcttgccaatgcctattctcgcagggctgatgtacttgttcgtggttatggtggatacaacactaggtgggctatgttcttactgggccatctcttccctctggactcaactaaaccacctactgctaccacaattttctttggcgctaatgatgcagctttgttaggaagaaccagtgaaaggcaacatgtacctattgaagaattcaaagagaacctcagaaaatttgttcgacacttaaaggattgctcaccaactatggtaattgtgcttattactccacctccacttagtgaggaaggacgcctggcatacgcaaggtatgattcataatctgccttcctttatagacactgtcttactgcactattatgtatttggctatgtatgacacttatcttaccaataccatcaaatagaattgttcctcctgttcgacttgtatgttctttttttgggtaaattcc

SEQ ID NO: 17536 - DNA, 607 bp, Glycine max
  unsure (1)..(607): unsure at all n locations
  Clone ID: PAT_MRT3847_11583C.1
cccgggctcgacccacgccgtcccgggagtgggagaatcttacccctttttcctttcaacgtctttaatggagccacctctatctaagttgtnncaagggctggtgacgataccatgcgtcattcatgtcacaagcattgcatactcactataccaaactctattttagattagtctcatggaagtgctgccttgttctggtgttcaatatgctggggaatctgattgccctcagcagagttcaggaacagcatttgtataccaggaacaacctaattgccccgaaaatggtgaacatgtcaactttgtagctgctcaactgaatgaatcatcacataagatgcaagggcctcagatagaaagacatttgtcaactaattcagattgccaatgcattggaacttcatgttgtgattgtcaagtggatgaccaacataatttgtngggtttcatgattttgaagaaacatgattaatgaaccttgcttgacatctgagaactttatctctgttgtggatacaattgaaattgaatcaccaaacaacagtagggaaggagacttgtcatgttccgacnccaagtgctagagggagatgaatctgtggca

SEQ ID NO: 17537 - DNA, 694 bp, Glycine max
  unsure (1)..(694): unsure at all n locations
  Clone ID: PAT_MRT3847_115840C.1
ccacgcgtccggacacccaattttcttctctctctcctctcatcacttcatatattcgcaatttctcttccaccgtgaaaccctagacccaactgcgagcgcggagccaagccatgtccctcaaccgcctcctctccgtggcccgccgctccgatcggcgggcctccgccctctcctccctccgatccctctctgcctccaccggcgctgtggccccctccgcctcctgccctccgggcgctctgcccccagccgcatcggtggtcggcgtcccgcagatgcgttcataccggtactcgatcggcgagacaactcctcagcttgtgacaaggactgcagcgccttggggtcatccctacgaggcgttccatgagcttgcngagctttttcgcatgggagggaggtgcccagattcaagttgcttgtttatgggagattatgggggttcgtgggtattattgtgtcgaagctggtacgcgtttggggtgcccttagggggcgttgtcggcggcgtgttgctattgtggggggaaatcgggggggtcgccagagtgctgcggcgtgtgggggtcgtggccgagcggctnnnnnnnnnnnnnnnnnnnnnnnnnnnnnnnnnnnnnnnnnnnnnnnnnnnnnnnnnnnnnnnnnnnnnnnnnnnnnnnnnnnnnnnnnnnnnnnnnnnnnnnnnnnn

SEQ ID NO: 17538 - DNA, 541 bp, Glycine max
  Clone ID: PAT_MRT3847_115841C.1
gagcgaatcggctcggtccagtttcaccctctttctaggtctctacactttctttctagttcgtaataatggaggtgtcgtcggagcaatccggcgaaggcgtgacgctggaaaagcttcagagttctctgaagaagaacgttccagaagcttcccgaagagctgcaaaaacggttgcggaacctggcggttcggtttctgcgaagaggagagtcgaaccgcgaaccggttcggtcacggctgcgacgaagagatcgggttcaatcggaggttcttcgagtgtggttactgcgccgagaaggaacagcaccgggggattgtctcagaaagcgtcgatctccgatggaagaagaaaaaccggcaccgaatctgccgccggagctaggagcggcgcttcgtcggtgggcgagcttgtgcggagttcactaccggagctccggctaatttcggtgaattcttcgcgagttgcggtgaagccggctgtggcctcgctggcgggttcggcttcgaggacttccggtgcgagtaaggcagaggtggc

SEQ ID NO: 17539 - DNA, 250 bp, Glycine max
  Clone ID: PAT_MRT3847_115842C.1
ggatactcccaagtaaaaaccccagcaagtggctcgaattttctccctaacattacccttgatactggagctacagaccagcaaggtaaacgaagcgtttactgctactctcagctgtaacaagtctctgccgaagcaaccaaacattagccttcatgcagacgctattgtgtccttctcgcgaattagtcgactcaatatggttgactaaaccgtaaccccacaaccctcgtctttaggtctcgtcctt

SEQ ID NO: 17540 - DNA, 329 bp, Glycine max
  Clone ID: PAT_MRT3847_115843C.1
gaaaccaaaacaaagaacttcaatttgaacttccattcttattcttatttatatacacaccagggcttggaaaacaaactcactttgtctcactttgaacttttttttttttatgtgcatgaactaaaaaaacccttttaatgaaagggaagggggtaaaattgccttaatgacccctaaaacaagggggattctcagcaaacacaaaaatgctccttcaccttaaaagggaatgcatgaaaaaccatcccgctttttctttagttgactgacaacaaaacttactttttttacaaacaaagcttgtgaaccaatgggactttacaact

SEQ ID NO: 17541 - DNA, 216 bp, Glycine max
  Clone ID: PAT_MRT3847_115844C.1
tgggttgcatggtaggtgtggatatgatcaaactcatgttggtcataatccaccaccttccgcagcaggggttcttggccttggaaatggcagagcaagcattttgtctcagcttaattctaaaggcctaattcgtaatgtcgttggccactgcttaagtgggacaggagggggcttcccttctgtcgtcttctcgcagccgtacggacgcgtggg

SEQ ID NO: 17542 - DNA, 328 bp, Glycine max
  Clone ID: PAT_MRT3847_115845C.1
ccccccccgaacccccaaagggaaatgcttttttttttaaaaaaaaaaaaaaaaaaaccagggggtttttattattaacgggcccaaacaaaaaaggggttatttaaatttacccccaaggaaaaaaaaaaaaacccccttttttcccctttagcccccccatggtaaacaaaatttttttaccggtggggccaaattgggggacagaaacaagccttaaaacaattcccttttttacctgaacgaatggggagtgccaaaagacaccctttaattcggagcccaattcccagtttaccgccccggggatggaaaaaataattttttt

SEQ ID NO: 17543 - DNA, 538 bp, Glycine max
  Clone ID: PAT_MRT3847_115846C.1
ttgaaccgcccgcttacctttgccgagaagatcctctactcccacttggacgacccccacggtcaagagattgagcgcggctccagctacctcaagctccgtcccgaccgtgtagcctgccaggatgccactgcccagatggctattcttcagttcatgtcagctggtctgccctccgttgccactcctaccaccgtccactgcgaccatcttatcgaggcccaggttggtggtgagaaggatttggcgcgcgccaacgagatcaacaaggaggtttacaacttcttgtccacctcttgcgcaaagtacaacatcggtttctggaagcccggctctggtatcattcatcagatcgtgcttgagaactacgctttccctggtgctctcctcatcggtactgactcgcacactcccaacgctggtggtctcggtatggccgccattggtgttggtggtgccgacgctgtcgatgtcatggctggtcttccctgggaactgaaggcctctaaggttatgggtgttaagcttactggcaagc

SEQ ID NO: 17544 - DNA, 472 bp, Glycine max
  Clone ID: PAT_MRT3847_115847C.1
aattcggctcgagcaacatttctatgttcctgttgcacaccatgctgctgaagttcattttgttgtgaaggacagtgatgtggtgggttcacagctcattggcgttgtggcaattcctgtggaaaaaatatactcagggcaaaaggtacaagggacctaccctatcctgaacagcaatggtaagccttgtaagccaggtgctgttttgatggtatccattcagtacattccaatgcatacacttatcatgtattaccaaggagttggagctggtcctgactacattggggttcctggcacatattttccattgaggaaaggtggaacagttactctataccaagatgctcatgttccagatggttgcctccctaatgttgtgcttgataatggtgtgtattatgctcatggaaagtgttggcttgacatctttgacgccataaatcgagctaagcgtttgatttacattacg

SEQ ID NO: 17545 - DNA, 2045 bp, Glycine max
  Clone ID: PAT_MRT3847_115848C.1
agaactgtgatgttcaacatgttgcaaactcatcacctccagtttctagcgattctctttctatatacgctgacatgctctgaaaccgcagccacttccatcccacaagagcttcacataggcttctctgtgacgccagagtcttggacgacgccgtttcaagcagttctgagcgatcatagtggcaacttctctctaggcttcctccgcgtgaaccaaaaccagctggcactggcggtcctccacgtggcatcctcggagccattctgggtggccaacccatcccacgcgccatcatggtccgacaacacgcgcctcttcttcaacggcagcctcgtcctgtccgaccccgaaacgctcgttttgtggtcaaccgccacaaacggagaccgcgtggtgctcctcaacagctccaatttacaagttcaccacaatggcattcccctatgggagagttttcacttccccaaaaatactctcgtccaggaccagaatttcacctccaacatgactcttttgtcctgcaacggcatttattccatgaggttaggcaacgatctcatgggcgtatacgaaaaccatgccttgttatattggaaacgcacgccactgggagcaaaagcggaagtaaaggatttccagggaccgatttacgcctgagtcaacccggagggttacctcgggatgtatcagacaagcgacgagaagcccgcggatgttcaaaagttcaacacgttccaactaacgtcgtcgtttttgttgctgcggttggaaccggacgggaatctgaagggttattactgggacggttccaggtggatgcttaactaccaggcgattactgaagcctgcgagctcccccgctcctgcggttcgtacggtttgtgcacgccgggtgggtcaggatgctcctgtttagataaccgaacccggttcgaaccgggtgggtgttttaatgatgcttcttctggagacgcagacttgtgtagtagtgaaggaattggtggaaaaagtagttactgggtgctaagaagaaccggagtggaggcagcgcataaggagctactaaggcacgtaacgacgtcgtctctggcggagtgtgagggattgtgccagaacaactgtagctgttggggggcgctgtatagcaacgaaaccgggttttgttatttgttggagtatacgatccagaccttgctgggtaccggggatggatcaaaagtgggttatttcaaggttaagaaagaggaacgaagaacgaaacgggtttggatacgggttggggttgtggttacggttttggttggggttggggttattattattggggtcgggttttgcgtgacgagatggaaaaagaagagaggggtgaaggaagaggattggggttcgcccggcccgtataagaatctcgaatccgcaagttttagatccattgaaatgagcaatagtaacagtgccaacgaatgacgcaaggggtgacgcatgtgctcttagttgacaattggtggggtccatctaatctaatgtttgttttctgttggtgttgaggtccggtgaaaaggtaccggattgtgttggttttctcaccaaccaggggcgcaactctcgcaagtggcggtttcaaaaacatgacttcactacagtgttatgatcatagcatggtaaagtcaatcagcttcatagactgaacttaaactaaataaacatttgtcggacgtgtcttttttatatttcaatttgacttgaaactgccgccgccgcttcatttgaaagtgaggctccattagttaaaactccttgcttgctcacagtcacagatatgaacgtaatgtaatgctcttccggcctttatcttttatactctacagtaaggccaatttattcattctttgaaatttctgggggagccaaggccattttaatcttcttttccattttttaatttattttgtctaccatgttcgttttatgtcattttatatttatcaagtaaatatgatttaactaagcaagtaaatatgatttatctgacgcttgccctt

SEQ ID NO: 17546 - DNA, 359 bp, Glycine max
  Clone ID: PAT_MRT3847_115849C.1
ctattatatcaaggtatacttttttgtgcaatggtttttacaataaattctctctctctagactctactaaaaattaacaccttaacaagaatcccatctccaccctaaaagggaaaaccaaccctttgttatatcacttggaaaaacaatcaaaccatatggtttctcatatatcaagacaccataagcctaacattgaataagttacccatataattaaacatacaaaatgctcttagatggtcattatcctagagattaataagttatcccactctgcacggtgataccttatctctccttcagaaccaatctgggcaataaatacgttccattttgtccatatactttggaaatt

SEQ ID NO: 17547 - DNA, 270 bp, Glycine max
  Clone ID: PAT_MRT3847_11584C.1
gaataatgaaaattttgttacaagaggatttccaaactcttatcaaaagaagattttccgacatgcataaacgcagttcatagtttcatatatatatatttttataaatatcatatggtgatgaaggtggctaggcctcttcattgcagatacacacgacctctaagcatggcccctatagcttccaatgcagaatggtggccacatctttaacttagggaaccaagatgaggtcattgataatggttggccttgcatcctctttctccg

SEQ ID NO: 17548 - DNA, 517 bp, Glycine max
  Clone ID: PAT_MRT3847_115850C.1
gcctatgcttcacattgtggaaacaacagaacctcaagaaccatttggaggacagctacttgaggttgctggtagttctaaagacttgagaaatctatgcccttcagcagatgctgttttggaggatcaggttccagaagcttacaagatgaatcctcaatgttctgatttgcctcaaatgcaacacatggatacccttaataaaactatgacaccttttgcagttagaaaagaggtgaacagtgtgaccattaaggcaacatataaagaagatatcatcaggtttaaggtctctatggactgtggtattgtggaattgaaagaggagattgccaaaagattgaaactagaggtgggaacatataataacaagtatctggatgatgatcatgagtgagttaggatagcctgtgagacagacctgacggagcgaatctacttatcgagatcattaggcgagagcgtgctcatgatggcgcggataatgatggtgtcactcacgagatctgtgtcgaca

SEQ ID NO: 17549 - DNA, 366 bp, Glycine max
  Clone ID: PAT_MRT3847_115851C.1
aacagccacaataaaggtggatagggcgagagtcaaaattcaacgattaaaatctcttagcccaaagaaatttgaaaaccaaaaccttggattaaactaccaagccctcaagtctattcattccaaagggggttttttttcaggtgggtggtgggcgggaatccttttcctaacttcttcaatggatggtagcttaattcccttacccttgggcaggggatttcctgggtttgggcccttggccatagggaaccccttggccaagccaagtgccaaatcatggtcaggggaattccggaagggaattggcttaaaggttcccttaaggctcttcctggtcttgaacccctcaaccacccccctggt

SEQ ID NO: 17550 - DNA, 640 bp, Glycine max
  Clone ID: PAT_MRT3847_115852C.1
ggctcgaggttcatgatgtgagtgtgagatgtgatgctcattattatttcttttttaccacaaataaagcaaatttccacagtaaacccctctcttttcccttcaatactcacttcttctctttctcgttgcactgatcttagaggggtttgtgttcttggtttcctcccctttctctctctctctgccttgcatttttgtgtgtttttctcaataggggtttcgaaaatgccgatgtttcagccttgtcggaaggacttggttgccgggtacgagggtggtggcgacggccagattctagatctggacaccgccgtgaaagacggcgttttgggcggcgtggagggcggcgtcctgggaggtggggttggtgagaaggtggatctggggaagatgattgaggagcttgagttatgtgaagtgccgagtgtgttcatttgcccaatctcattggaaccaatgcaagaccctgttaccctctgcacaggccaaacctacgagaggtccaacattcttaaatggttcaacttgggacacttcacctgccccaccacgatgcaagagctctgggatgattccgtcactccaacaccaccctttaaactctcatacacattgtggatctcgcagaagtacttgc

SEQ ID NO: 17551 - DNA, 259 bp, Glycine max
  Clone ID: PAT_MRT3847_115853C.1
aacgacaaagggggaattaagccggatttctgataaaaaaagaaaggcctttccaaaccactgggatcccccgaaaccttttcaggggtgtcctttgtaaaaaggggtggccccacccagggacccttaaaggcctgcccgccctggctttttcaccaaaaatgaacaacacgaaacaggtttgttgtgctggggaaggcccaaaaaacgagaaaccctgacctcttccccccccaaaaagcgccgccccccgggccgc

SEQ ID NO: 17552 - DNA, 557 bp, Glycine max
  unsure (1)..(557): unsure at all n locations
  Clone ID: PAT_MRT3847_115854C.1
ggctcgagaagcctcccagtggaaagtttcctatcatcaaaatctgtgttcttatattcattattatcttgtatgcagagagtttcaagttcctttcttccggttccattttcaatttcaaaccatgtcctacaaatagtaccaagcctaaatccaacgataacaagatacaagaggtggttcctaatgattcactatggtttcatgatggattcgtttatgaccctgaggagtgcgattttacaaatggaaaatgggtgtttaacagttcaataaagcctttgtattcagacacaacttgtccatacataagtagaccttattcttgtgtcaacaatgggagggtagattctgactaccgttattgggaatggcagccagaagattgcaccttgcccaagtttaatccaaagctagctcttaaaaagcttcaaggaaagaggctgctattcgtaggggattcactgcaaaaaagccaatgggaatctttngtgtgtatgggtgaatggatcataccttgaaagcagaaatctatganacgagggactcattcagtc

SEQ ID NO: 17553 - DNA, 232 bp, Glycine max
  Clone ID: PAT_MRT3847_115855C.1
attcaagattatactgccctggctgctgcaaaatgtatatcccatgaacaaaaagggactttcaagtcaaattacaattgttaaagaaacaccacctgacaccagggctctcttgcaagcgaatgggccttcaccaggaaaagacttccgcccacaagaaaatggtcccgggggtggatccaccaacagggcaggggaacccggtcaaccaaacgtttccgccaataaatag

SEQ ID NO: 17554 - DNA, 173 bp, Glycine max
  Clone ID: PAT_MRT3847_115856C.1
ggtttttatttttgctgcgattttgaagtcaaaactgcatgagtacaggttcgtcgtgtcttggttggttaatttatgggttttatctaccttttgttctgattcccttactttgaatagaaccctttacctacattttctttttgctttccaaaacgtctatgattatatat

SEQ ID NO: 17555 - DNA, 277 bp, Glycine max
  unsure (1)..(277): unsure at all n locations
  Clone ID: PAT_MRT3847_115857C.1
cnnatctacaagggtaactcacagcttnctgatggtgcctcagagagcctccatgtttcgaactacagctactgatcaatcgaagttggngttgtttgnaganactagtgcgagtaggantcggtatnatgggtacnacaaccgnatttcttgttgataagtantatngtggntngactcttcccngaatnatcgnttggnattnacnggatgtttnccagtgnncctnnatggccanttagtcatccagggtgttggtgaactggcaaccnggaag

SEQ ID NO: 17556 - DNA, 766 bp, Glycine max
  Clone ID: PAT_MRT3847_115858C.1
tgttgtggcttgaataaccccaattggcaagctgaagactaatgcaattgttagagaaagtaaaattccccaccatggcagttggagttgcttgccaaagccttcacaagcaaccaaagccataacaaccataagaatcaaaatggtgacaaaccaccattcaggaacttattcatagtttttcttcatgattcttgtatggacatgagggcgagtcctggtgcagcggtaaagttgtgccttggtgacttgttggtcatgggttcaaatccggaaacagcctctttgcatatgcaagggtaaggctgcgtacaacatccctctggacaatggggtacgaagtttttttttttttttttatgtaggtcttatagttgtgtggtaaaaatttcctttgagcttgagtgttacgttttagtcacagcccctgaaacactccatttcatttattctgcttgaaccctatggtttacatctctctttttcctttctcttttctttttagatataattgtagtgttggaagctcattatggcatgctttggaagttaatgggtaaaccaaatgtgtctaaggaagatgtttttatgcagttttgtcactcgtggatcatttgccattacagaaagggttcactttgttgaccagtgttttcttttgagatttttcaggttctttttgacttattccgtcatgatgtttcgtctgtgggaaagcatacagcaccacccttggagtcacacccagcatttacagaatatcaag

SEQ ID NO: 17557 - DNA, 356 bp, Glycine max
  Clone ID: PAT_MRT3847_115859C.1
acggctgcgagaagacgacagaagggtgcttacaaatttgtagttacgtttactttaaatattttagataagatgtagatatgtgatgctgaaccaaacaccagctaaaatattacttttctaccacaaagtataaagatccatttaaacttgttaaataattgtatcattagagtataggacactgaaaatgactcgagaacaaaaaagaaaaatgcaccattagacactccatccttaaagattccactatatatatataccccttcaggaagccaagctacctctcaaagctacaaactttgaagttcacacacacttgttaacccctggaaatgggaacacaacctcacaat

SEQ ID NO: 17558 - DNA, 2376 bp, Glycine max
  Clone ID: PAT_MRT3847_11585C.1
cccacgcgtccgcccacgcgtccggatttttcgaaaccttagcttcagagagagagagagagacaaagagagagaagcaatcgtggtctctcttctatgagcttcacttcgattcccgccacttctctgcaagcataggattttgggttcttgtgtgaaggatatggctgaggtggtgaaatcagaggagtgttgtcaggagaataagcaatctactgctgcttcttgctcctctgtatccgaaggcagtggcagtgcaattcacaagtctccggggagatgtagccctgcatccacatcgccctcacatcggaggaccaccggccctataaggcgtgctaagggcggttggactgcacaagaagatgagacattaaggaatgctgttgcagtttttaagggaaagagttggaagaaaatagctgagttttttcctgatagatcagaagttcagtgtctgcacagatggcaaaaagttcttaatccagaacttgttaaaggaccttggacacaggaggaggatgataaaattgttgaactggtgtcaaaatatgggcctacaaaatggtctttgatagccaagtctttacctggtcgaataggcaaacaatgtcgagagcggtggcacaatcatcttaatcctgacataaagaaggatgcctggactttggaagaggaattggccctgatgaatgctcatcgtatacatgggaacaaatgggctgaaatagctaaggtccttcatggaaggactgataatgcaataaagaatcactggaatagttctttgaagaaaaagttggatttttatttagctacaggaagacttccaccaattcctaagaatagtccacaagttcctgtcaaagatacaattagacgttctgctagtaaatcaatgcttggttgttcaaataaagaattaaatgcagctgttgaaacatcatctgaaactacagccattagtaagctagatgacagtggcaggaatcagtttgagtcctcaggcacagttagagaagttggtgattcttcaagtgttcctgcaaatgactctgccgattctgactgcgtagaatgcaagcctggatcatccaatatcaaccccagctgtagcaactcagaacacgtgtcaagagctaattttggaacaacttttgggccaatatctgagaattctggactcaatggaaactcaacttttgagcattgtacaaacaatggtgacaggagcagtaccaggttaatcggaacatcttcacaagaaaatccaacctgtggttctttgtgttatgagccaccacagttagatggttcagttcccatagattctctttatttaaattatacttgccagcagaatgagtactgtccgagtccaacgatgtcacctactggtttcttcactccacctcgtgcgaagggtagtgaattatgcactgagacacctgaatcgatcttgagaaaggctgctaatacttttccaaatactccttccatattgaggaggagaagaactggggcccaaacactcaccagtcccactaaagttttgaaagtagataataatccacatacttctaataaaacagagagaaccaatgatgattctggttctgggcatttctccgggagtccagcaagccatggctatgggattggcattcccaacaataaggcattcaatgcatctcccccatacaggttaagatccaagcgaacagcaattgtcaagtcagtggagaaacaactggagtatgcatttgacaaagagaagaatgacgacaagaggagtaatgtgatgactgaagatcgtctgcatgaaacaaaattggttgtgacatagtgcataaattggattatggctggacttgcttttgaaggtagctgattgtttctctaaattgtttgacaatgtttaccaattttatgaagaaaattcagtgcacgggtcacaatgacttggcacttctccacacttgatagttggctgtcatttccatcacacttcaacaaaattcagcaacagtagataaattccatttacttgtggatacatatagctagttgtatctatcagatttgtacagttgtcttaggaaaaataaattttctaatgttttatcaatgtttttagattccttcaatcctttctctaaataatttatggcctgacctacttaataagtgtgtaaccttacattgttgcacccgctagtttgatgtacactatacattgaaattactgtttgacaatcacagaaaggtgttcatcatgaaattatcatcaaaatcaaagataaattaatgcaaaaaaaaaaaaaaaaaaaaaaaaaaaaaaaaaaaaaaaaaaaaaaaaaaaaaaaaaaaaaaaaa

SEQ ID NO: 17559 - DNA, 229 bp, Glycine max
  unsure (1)..(229): unsure at all n locations
  Clone ID: PAT_MRT3847_115860C.1
gaagctgnnnnnaatattcagtcgcttgccaaaaaaaaacatcaggtcagaagacaaaattacacaacaaaagatcaaatgtattcatctcctgtgatctctatcctaagcatgattccaatctaacaaatcatagatcgaatcaacaaaacaacaacaattagagttacaacaagacccctccaacatcaactcatgatttctttcatacacaatgagagtaaaaatc

SEQ ID NO: 17560 - DNA, 416 bp, Glycine max
  Clone ID: PAT_MRT3847_115861C.1
ctggtacctgtcacgatagtttggatttaggaccaaatcctttatgattttctgtaaattagcatctgaatgaacttcctttctccaatacaccaaccccttgacattcacagtggtgatagctgaaaagttcattttccttgagagtgcatctgctgctctgttttcagtcttagtttatattgaatctcaaaatgatatccaattaactttgaggcccatttaaattgtagttcaatcaccagtttctgttctgtcaagaacttcaaacttatctggtctgttatagaatcacaaaatgccttcctacccagtaatgcctccattctgcatggcataaaccaaagccataaactccatttcataaactgaattattttgcaccctttctgaaagtccttgagcaagactgaaaa

SEQ ID NO: 17561 - DNA, 527 bp, Glycine max
  Clone ID: PAT_MRT3847_115862C.1
gaaggtttcccgtcatcactgtatgacgtcctccttctttgggggggggggggggcatactaaacaacaggtgaaagcggaggaaggctagtaaacgttgcagacaatagacgcatcgatatgccagaaatatgttaaaaattaatgatactaagaaatatgacagcccagctgctaaggatggccctaaactataaacctaacggggtattgatcgtgcacagagataccaccggcagttggcttagtgcaaattccgactatctggtgttacacatgtcggtacaaaagtagtacgtggtgtaagacgcagcgggcctagtattattatacgctcagaggttttgcgtacgtgaatgcttatgcgtcgagaaaggttgcagtagcgccattgtgtaaatataattgcgtgcgtgtacggtaggacgtagcgtattaagtttacttgtaataaccatcattgggcaacgacgcacgtagggtctaacgtagggtgcgatggtgggtgcaaaattgtgagagttggg

SEQ ID NO: 17562 - DNA, 539 bp, Glycine max
  unsure (1)..(539): unsure at all n locations
  Clone ID: PAT_MRT3847_115863C.1
tcgcatgncaccgcccgtacgtaagnctcggnnaattcggacttcnagaacgagctcgcgaggaagacaacagcaaggaggtatttctacaatggagggcacaatgcgagttctcggagggtagacataggggtaggaaggggccatgatagtcagcctgggacaaccgctaaagatcgccaaggtccctatataggttaccgcgggcgtgttatagatgttaaaggcacaacagttagtgttgagttggaataccaaactgaaggttgtacacagcttgaccgcaaccatatatcctgacaactgtggactgtaatacccatatcgacgatacatcgtcgctatggaatgggaagtgaaacaccaatgcatccttcatcgaactcccttacatccatatatgactccaatgatagatcctggaacaacacctattcatgatggaatgagaacacctatgcgtgacccagcatggaatccttatactccaatgagtactacaagggataactgtgaatatggaaatacatgctcttggg

SEQ ID NO: 17563 - DNA, 479 bp, Glycine max
  Clone ID: PAT_MRT3847_115864C.1
ggaacgttgaaactgtgccacttgacccctatattacgggggtaaatactataacacagaataatactgcaccaccacctttcacgcaatggactatagaagctgatctttatatataaaacagaccaggaaaaaaatgaccagaggaggccttctctttacttgctccatgagcctgacgctcttacttgttctcaagccataccctctcctgatgctccttttatgcaaacaggctatagaagccacaaccctcccctatagaattatgcccaacacaatggaactcttgaaaggaaaaaaggctggtacatacccagcatttttcctattttaagctgaatactacggcccacatattgaatatgcctgggttgacaaaacatgcaacgtgtgctataaacgacactaacggagaggcaacgcacttgaacaaaatcaggagatatgttcacgctgcatgacaagaaaaggccaac

SEQ ID NO: 17564 - DNA, 500 bp, Glycine max
  Clone ID: PAT_MRT3847_115865C.1
cccacgcgtccgcccacgcgtccgcatttgcactgggcaagtgtacttgtcaggttatatcagataagatcagattactatttttagtttaaaaaaaaaaaaaaaaaaaaaaaaaaaaaaaaaaaaaaaaaaaaaaaaaaaaaaaaaaaaaaaaaaaaaaaaaaaaaaaaaattaaaaaaaaaaaaaaaaaaaaaaaaaaaaaaaaaaaaaaaaggggggggcgtttttaagagacaaaatttacggccccattcatgcaaacccataatttttaatatgggtgccaaaaattaaatttcccgggcggggtttaaaaaaaaaaggagcgggaaaaaccttggggttccccaatttaaaaaacttggaaaaaaaaccctttttgccgggtggggtaaaaaaaaaaaggcccccaccgtgtgcccttccaaaaaattgcccaaattgaaaggccaaggggaccccccctttaaggggagaataaaccgggggggtggggggg

SEQ ID NO: 17565 - DNA, 399 bp, Glycine max
  unsure (1)..(399): unsure at all n locations
  Clone ID: PAT_MRT3847_115866C.1
tttccactcccctaaccnacgcggctccgagngggctctcataatccattttatancccagagcgcccgggggggatatctnaggggttacttnggctccgggggctccaacttcactcatggggccaatttcccaacgggcggggctactgtgagacctcaaaacacaaccatatctcagagggggacaggcccatttccctanacgtgcangtcgggcaggtctctgagttcaaaaccagatccaaactcggtcgccaacaagggggggggttttaagggattgtggccaaagggggggatttttctcaggctttatatacctttnatattggggggggggagctcactggtnggtacaaactcaacttcaccacanaacaaggcaaggcgtatata

SEQ ID NO: 17566 - DNA, 259 bp, Glycine max
  Clone ID: PAT_MRT3847_115867C.1
gaccgccaatttctccagtattagtagctggggctaagattccgaaaagcttgagtgtgctaaaggccacattattagtggggaaacatgtccggggggacacagtgttcgagcacggcaagatgactaatctcttcaatcaaagcaccaattctcacatcatagaattatcggagcgagttgaagacaccgactgtccacccggtctgacccataacatggtccaattgagacagatgcaccaaaaatgagtttagaa

SEQ ID NO: 17567 - DNA, 346 bp, Glycine max
  Clone ID: PAT_MRT3847_115868C.1
gcaccttaaaacgttgttcatttgcaaacgttactgcgttgtaagaatttctcaacttcttcctacttctttgggtacgatttcttgagggagagaaaatcactctctgtgctgggcacagacttcgtgaatcattttcttttccactcttagtttatttgctgaacactctcctatttgatataagacttcgagtcagatgtaaacttcttctggttctttctcagttctctgttcaatttcaaggtcaagctggtgaaactttggattagggctcccactcttctatctgggttaggacttacgcgggtagacattttctaattcatctcccttcttataactc

SEQ ID NO: 17568 - DNA, 157 bp, Glycine max
  Clone ID: PAT_MRT3847_115869C.1
gttttgttctattggccaattcgaccactctcgggtgagaaagcctccagcctgggcttcaaaaaaccctgcggttacgtcgtttattcttcgaacctaagtcttaatttttcaatttttaattttcacctatctcatttctaatttccaatttttt

SEQ ID NO: 17569 - DNA, 1804 bp, Glycine max
  Clone ID: PAT_MRT3847_11586C.1
ggaaagagctgagtatgcgggcctgcatcttaaggcgtcaagagttgaaatcaggtgaactcagcgcatgtggtggtattagggggcttccatgttttcccatatgatggagcttactaaactggttctattgaggagtgggtcaaaactggcttgcatgcaaaggcaaaggtgaagacgcagcatggggatgccccttttgatgagttgtgctcacactgtgagaaggaatctgtgaatgtttcccttggaaacctgctaacttacccatttgttagagatggcttggtgaacaaaaccatagtcactgaaaggaggatttaaagactttgttaaaggatcgtatgagctctggggctatcagtttggccatgcatcactcattcttccgatatgaacatcggccattagcaatgacctcatcatggttccctaagttaaagatgtggcccctatagcttccaatggagaatggtggccacatctttaacctaacaaagaagaaaaatgcagtggtgaaagaccataaaaatattacacgttccttgaacaaaacggattgaacttcaatttggaatagagggtgatatgtggagaaatctccatatccacttttattattaggaaattcagcacatgcatgcattataacaagagcaattaattacagagtacattttagataggagaatacttagggaaccaagatgaggtcattgataatggttgatgttcatacggagaaagaggatgcaaggccaaactgaaggccccagagctcaaaagatcctttaacaaagtcatagtatcctcctttcagtgacaatgttttgttcaccaagccatctctaacaaatgggtaagttagcaggtttccaagggaaacattcacagattccttctcacagtgtgagcacaactcagcaaaaggggcatccccatgctgtgtcttcacctttgcctttgcaggcaagccaattttgacccactcctcaataaaatcagtagagtaggttccatcatatgggaaagacagaagccccttaataccaccacaagcactgtgtccaatgaccacaatctccgacaccttaagatgcaaaacagcatactcaactgcagccccagttccagcgtattttgactggtcatatggtgggacaatgttggcaacatttctgaccacaaaggcctctcctggttggaaatctagcacatgagatgggcacaccccttgagtctgagcaagcaaacaccatgaacttggggctctggcctttggcaagttcaccatacaaagctggattcttgtcgtatttctccttcttgaagtgaatgaaaccagctttgatcctgtctgaggcttctgatgatgggatgccatcagatgatgatgtccctagagaagctgttatctgctccactttttcagcagctgtcgctttgagttcactcttctccctcaacaatttctgaagttcttcaatagctttctcgtattcctttgccatatcctctctcacagttggggtgatgatgggggcaggggcagcaaaaacaggcctgtcttgaatgagagaggggaaggaagatgaagaggaaggagaagaaggagtgttaagggttgcgaagacggaagggcgtaatgtggccttcctgagagaggttttggctggggagatggaagagaggcaccactcgtttatggaagaggttgacattgtgcaatgaagactcaaatgtttatgctatatagccctatgtagcaatggggtgtgtccccttctgtcgtcttctcgccgta

SEQ ID NO: 17570 - DNA, 358 bp, Glycine max
  Clone ID: PAT_MRT3847_115870C.1
cgacgcacgcgtccgcccaggcctccggacttcccaagatgtatcttcaatgtttcagtgcgggcaaaaaacctgatctttgtgatcaacaatgggggatacaccatccatgtttaaactcatgatgatccgtacaatatgatttataactgcaattacactgcgttgattgatgcaatccacactggtgtagggaaatgctagactgccaagaagttcttttaagaggatctcattgaatcaattgccacatccacaggacccaatatagactccttatgcttcattgaggttattgttcataatgatgacacccagtaagaatttcttgaatggatctcaaggttttctgcttcca

SEQ ID NO: 17571 - DNA, 104 bp, Glycine max
  Clone ID: PAT_MRT3847_115871C.1
gcaaagggaatactgactatgctgattctgacaacataaatgcacttggggtcgcgcatgccctgaagttgacggatgctcttgcttatctcagctgtggtggg

SEQ ID NO: 17572 - DNA, 1736 bp, Glycine max
  Clone ID: PAT_MRT3847_115872C.1
ggctgcgagaagacgacagaaggggggggaggagaagtttctctttcgaggaatggggtggtggagaaggtggcaaatgacaattcaagtgaataatggttcagaatgaaacctgagtgagtatgggagaacaacaacaacaaccacaacctcatcgtccctaatcctcaagattcactgtggatgatgaatttgaggactggggaaacaatggattctggatcttatccggagcgtccaggggagccggattgttcatattacatgagaacaggcctttgtagatttggtgcaacgtgtcgatttaatcatcctcctaacaggaagctggctattgccactgcaaggatgataggcgagttcccagaaagaatagggcaaccagaatgccagtactatctgaagacaggaacatgcaaatttggagccacatgcaaatttcatcatcctaaagatcaggctggaattgctggaagagttgccttaaatattttaggctatcctctccgccctaatgagcctgaatgcacttattatttgagaaccggacaatgcaaatttgggaacacttgcaaattccaccatcctcaaccaagcaatatgatgctctcattacgaagttctcctgtttaccctaccgtccattctccaactacgcttggtcagcagtcatatgctggaggaacatacattcctagtcctcgatggcaaggtccttcaagttatgcgcccttaattctacctcagggagtggtttcagtgcctgggtggagtgcatacagtggtcaaatggggtcaatctctacttcagacagtccacagcaagcaatgagaaacggtcaaacatatggaacttctcgtcaaggtgagcttgcaggatcacaaggggcatattctcaattccgttctggcaccgttcctgtagggttttatacattgcagagggagaacatatttcctgagagacctggtcagcccgaatgccaattctacatgaagacaggagattgtaagtttggcgcagtctgtcggttccaccacccacaagagaggctagttcctgctcctaactgtgtcttgagtcccataggccttcctttacgtcctggagaacctttgtgtgtcttctattctcgttatggcatatgcaaatttggcccaagttgcaagtttgaccacccaatggaaattttctctcataatatctctgcatctccttcagctgatgccccaagcaggcatctgttaggatcttcatctggaactgctgcgttaaatttatcttccgaaggacttgttgagtcaagctcagcaaagcccagacggctttcattatcagagacaagacagattccttctggtgatgatgacatcgatgatgatggatgatgatgtctcttgaaaatgggtcatttggcttttacaatttttttctgaggggggaaatgattaatctgtaaattgattttcccattgctggagatgtacagaggtcatgtcaggttgattctgtcattctgaaattaaatgcagttgacagattcaattattctggatttcatgttacctggctgatttgataaatttaagcaaatgttgtcacgtttggtcaatcccaacgtgaacaatccttctgtccttaagccacaactctttctaattaacttttcacattatgtaaaaagtgtttttctgaaaatctataatgatcagtatttggctctaaaaaaaaaaaa

SEQ ID NO: 17573 - DNA, 394 bp, Glycine max
  Clone ID: PAT_MRT3847_115873C.1
aaaccaaacccccctttttttttttttaaccctcaaaatcataatatataaccatccccccaatcaggaggggggggaattaagcccctaattttgaaatttttcacccgcccaaaacagaatttcccaaagccggagaagagccaaacccgcaaaaaaaaactaaaaacccaaatccccccatggttttatcccccattttataaaaaaaaactaaaccttaaaaaacccccttttattaatttttacccttctaaaaaataaaggggcgggggggcaaaacaacttggtccagaatccaagggttatccatggtgccccactcaacaccaatgttgttgttaacaggcagtttattttccaaacctaaaaacctttcattttgtttcagggg

SEQ ID NO: 17574 - DNA, 136 bp, Glycine max
  unsure (1)..(136): unsure at all n locations
  Clone ID: PAT_MRT3847_115874C.1
agaatgattcttttacacatcgaggacaggtactttagcatttggtttcccttgttgagtgtgagagcggaatctaagaagaagcgatggctccggcgatcttacaagacggagttgnggttggcataagcgtgcg

SEQ ID NO: 17575 - DNA, 251 bp, Glycine max
  Clone ID: PAT_MRT3847_115875C.1
ggctcgagctcataaacagcttacttcaaacatattgcttattccacccatcaatctttccctattgggtccagggaacctaaaccaacacctcctaatcatcttaccatatacaactacaacatattaacgtctggcaaaactacgaacgaagcatttttcacccatcaggttcttgacccaaccaaagcctttctaccatcagcaaacgcatgtgattctccagtaaattatcagccaactaactctta

SEQ ID NO: 17576 - DNA, 257 bp, Glycine max
  Clone ID: PAT_MRT3847_115876C.1
cgagactgactctgatctccaacgaagcatcgtggagagagaataaggtgctatcacatgccatgtctctgcggagactgatactgatgtgcatggtgagttcccggacacagagttctctgtatcagatgagactgaccggacatacgtgtagatggtatgagtaggggtgtaggtgaaagaggctcttcttggatgtatagtgacactgacgactacgttactcatgacggtagataggggaatcgaatcgagaa

SEQ ID NO: 17577 - DNA, 294 bp, Glycine max
  unsure (1)..(294): unsure at all n locations
  Clone ID: PAT_MRT3847_115877C.1
gaangnanaaanttaaacnangaacccnaaaannnaaaaaaacncccccnncngnccgcaaaaggaanannggannagnnnancaaaaagangngatnngagnngnagnngggntnnnncaananaannganaggtttttgtgagagggatgttnttattatgttatnggtggaaagaanaaanacttnatnnatttatngnggngnagntnnatagagcgattagagtntggagnanntgnngnnngatgnngagggattggagntnngtnaanggtanggggaagnangnnt

SEQ ID NO: 17578 - DNA, 517 bp, Glycine max
  unsure (1)..(517): unsure at all n locations
  Clone ID: PAT_MRT3847_115878C.1
ccgccctttttttttttttttaacatgcatcttaaaagaaatatttttttaattctttaattaatgtctaaagacattaattaacatttcccttataatataagaaatctctagccattgaaactttttagcttataaaaaaataaaagaaaaaattaaaggaaattttcacacataagaactagttgaattgacctactaggctccactccagccttgaacaaatcaatcatcacctcaaaaccattgccattcatgtaaaactatcatcatctatcaaatattaattgccacaagtcaaattccctctacaatctcttgaagcctcatgcagaaactgtcaacataagatgactccaaatctttgttaagcagcaactctctgatcctagcatgattagccctaacccttttgctggtttcattctcaccatccatcacaatgctcacagctttacacacactctccttggtgtacattccatcctcatcacccttctncacttccacaccaacc

SEQ ID NO: 17579 - DNA, 348 bp, Glycine max
  Clone ID: PAT_MRT3847_115879C.1
ggctcgaggttaatttgtgtgaccattacattaaggcttgggtagagccattcatttgcattggggccgggtgaataccactattgtcgcctttcccagaaaccccgataagttcagactgccacctgctaataacttgtttgcaactccattgagcatggcattccgtggggggttattcaaaaacggcggcacttggaacccttgtggtgttatcaaactaagccggttcttgtccattcatttccttggattatattacaacattgcacatccccctttcgaggttgtcggtttgcaaaaaggtctgttgaagacttgtatctcccttacgcctttgtgacacaa

SEQ ID NO: 17580 - DNA, 200 bp, Glycine max
  Clone ID: PAT_MRT3847_11587C.1
tttttaaaaacaattgaactactttataaaaaggggaagggtgcaacaaaaaaatcacacatgtaaaaaagcctgtttaatatacccttccaagtagtaacaagaaaaaaaatgcacatgtattaggtgtgtagaggcaacactctaaccaaacaaatagtatagtgagctacaagttaaattatactctgacaatctct

SEQ ID NO: 17581 - DNA, 2472 bp, Glycine max
  Clone ID: PAT_MRT3847_115880C.1
ctcgagccgaatcggctcgagcggctcgaggtaccctcctacaatttcaatttataatatgaggaacctctctcccctcttaaatattctgattcgggttccacaatacctccctggaaaaaccactgcataataacccattgccttatgtattaattaacatatattgctacataaattgaaaaaaccgtcctcaccaattgcaattccagatctgaggccaaagttagcatctttcggttctccacaattcaaatgctccattgggtatttccaattttttattttctgagattctgagcgaaagagcatgtccggggcaggccaagccatagacatggagcacgtggggttttcgaaagcgaaagccgatcatggccgtggcaagaaaacgggtcctcttactcagcttcttttatcaatcctcttgccagcaacaaaacaaaccatgtattattatgtggcataaaaatccgaagcaaaacctcgaaaaaccgtcacaaatcacaattactggttcagcaacttcaagtttcatccatctgtcgtttctcgatctccagttctccactgttccaactccaactccaaccaaaccagcttctgactagtctctctccgcatatacgacaccgcgtttcgtcagatctgaaattgaaatggatcacgtgctggtggcgctgggggagacgaaggaggagagggaggttcgtattcggagcctgttcaacttcttcgacgccgccaacaacggttacttggactacgctcacattgaggccggtctgtctgcactgcagattccccctgagtataagtatgcaaaggagcttttcaaggtgtgtgatgctgatagggatggaaggatcgattaccgcgactttaggcgttacatggatgacaaggagttggagctttaccgcatatttcaggctattgatgtggagcacaatggctgcattctccctgaagagctttgggatgctcttgtcaaggctgggattgaaattgacgaggaagagcttgctcgctttgtggagcatgttgacaaggataataatggaattatcacttttgaagactggagagattttcttctactttatcctcatgaagcaactattgaaaacatatatcatcattgggagagggtgtgccttgttgacattggagaacaagctgttattcccgaaggcatcagcaagcatgtgcacaggagcagatattttattgcaggggggatagcaggagctgcttctcgtacagcaactgctcctcttgatcgtctaaaggtggtcttacaagttcagactggacgagcttctattatgccggcagtgatgaagatatggaaacaagatggcttattagggtttttccgaggtaatggattgaatgttgtgaaggtagctccagagagtgccatcaagttttatgcttatgaaatgctgaaaaatgtaattggagatgctcaagatggcaagtcagatattggtactgcaggaagactttttgcaggtggtatggctggtgcagttgcacagatggctatctatccaatggatcttgtcaaaactaggctacagacttgtgcttctgatggtggaagggttcctaagcttgtcacacttacaaaggatatatgggtccatgagggacctcgggctttctacagagggcttgttccatctcttcttggtatgattccttatgcagggattgatctcactgcatatgacaccttgaaagatctatccaagagatatattctttatgacagtgatcccggtcctctagtacaactcggatgtgggacagtttcaggtgctcttggagctacttgtgtctatccgctgcaggttattcgtacaagcattaccatgattctcagactgcaggcacaacctgccaatagtactagtgcttacaagggaatgtctgatgtattctggaaaactctcaaggatgaaggctttagaggtttctacaaggggctcattcctaatctcctcaaagttgtgccagctgcaagcattacttatatggtttatgaaagtatgaagaagagtctagatcttgactagagtgtcatagttaaactagctaatttcaaatattataaagtcttgaattgttgatggtgatgaaaaaagaacagagattactagtcctgtaggaactattacaaaatagtcattcttctgaggatatcttaaaacacgattttgtagtcagaaagtttttccccatgcttatctgaactaaaatgttgagaaattaggttgtattctagatataccaaggtaataggtgttatccttttcaatctgtacttttcccactatttcctatagtcaaaagtgaaggcacataattgtgtttctcctctatgttcatgtcactagaaataccatttacttagaaattgacgtatggatttgtgtgaataaaattgatggatggaatgatggc

SEQ ID NO: 17582 - DNA, 856 bp, Glycine max
  Clone ID: PAT_MRT3847_115881C.1
atgtgtattacctctctcccctcttaaatactctgattcggtttcacaatacctccctgaaaaaaccactgcataataacgcattgccttatttatatatattaacatatattgctacataaattgaaaaaccgtcctcaccaattgcaattccagttggtggtttacgacttttgcgagtttttgagattttgacccatcaaaccccacgtaaccgctgtgcagatctgaggccaaatttagcatctttcggtactccaaaattcaaatgctccattggttatttccaattttcgattttttgagattctgagcgagaagacatggagcacgtggggttttcgaaagcggcgatagccgatcatggccgcggcaagaaaacgggtccggtttcgatggatcacgtgcttcttgctctgcgcgagaccaaggatgagagggatcttcgaattcggagtctcttcaatttcttcgatgctgcgaataatgggtacttggactatgctcacattgaggccggtttgtctgcactgcagattccccctgagtataagtatgcaaaggagcttttcgaattgtggagaaccgaaagatgctaatagggacggaaggatcgattaccgcgactttaggcggtacatggatgacaaggagttggagctttaccgcatatttcaggctattgatgtggagcacaatggctgcattctccctgaagagctctgggatgcacttgtcaaggctggtaggtattctggtactactactttgttcattgtgttttgtgcctcgtggcttgtaagttgtaattattgcatgtaaatcattcgatcacatacatattaacatatatggt

SEQ ID NO: 17583 - DNA, 767 bp, Glycine max
  Clone ID: PAT_MRT3847_115882C.1
gcatgcctgcagtgtagacaaaccggcctcaatgtgagcatagtccaagtacccattattcgcagcatcgaagaaattgaagaggctccgaattcgaagatccctctcctccttggtctcgcgcagtgcaagaagcacgtgatccatcgaaaccggacccgttttcttgccacggccatgatcggctttcgctttcgaaaaccccacgtgctccatgtctatggcttggcctgccccggacatgctctttcgctcagaatctcagaaaataaaaaattggaaatacccaatggagcatttgaattgtggagaaccgaaagatgctaactttggcctcagatctgcaaagcggtttcgtggggtttaaagggtcaaaatctcaaaaactcgcaaaagtcgtaaaccaacaactgaaagaagaaaaccagcgattgaattgaagggtgggtcaaaggaaagagaagaaagtgacataagagattaaccagaagctaattggactaagcatagtgtgcagtgtcattatacaaagaagaatgaagaaggtacctggaattgcaattggtgaggacggttttttcaatttatgtagcaatatatgttaattaatacataaggcaatgggttattatgcagtggtttttccagggaggtattgtggaaaccgaatcagaatatttaagaggggagagaggttcctcatattatgaattgtgattgtaggaaggtacttggctgatgaggaaatcaatccatttctgattctg

SEQ ID NO: 17584 - DNA, 999 bp, Glycine max
  Clone ID: PAT_MRT3847_115883C.1
ctcggaattcggctcgaggaatttgtaattatattattacacacatatatatatagttgaggaataaaacaaaggctctcatatcaaagcagacacagctagctattcacaatggccctgcgggttcatttctcaatagtttccatagcggttttggctctatgcacttctgcagattacttttcggctaattttagctatgctggtccaaatggacctgagtactggggaagcttgagtccatcttatgcagcatgctcacatgggaaatctcagagtcctgtggaacttatgaagactgatattgtcatcaacatgcagttgaagaatctaaacagaaactaccttcctaccaatgccacacttgttgacaacatattcaacattggggtgcactttgaaggaaaagtaggggatattaatataaatggaaaaaattactccttaaaacaattgcactggcattctccatcagagcacatggcaaatggtcgtatacatgacgcggagctccatctagtccacctgaccgaagataattacaacatagcagttgtggcagtgctctacaaattgggtgatccagaccctctcatatcccagtttgaagacaagttggttgatttagagaaggagattcgtgcaggcaataaggatgcccaaattgcaattggcacctttgatgtagaagagataaacagaagcagccataggtattatagatatgttggctctcttaccactccaccgtgcaaagagggtgtcacttggaacattctaggcaagttaaggacgctatccaagaaacaactagagctccttaaggcaccattgggcccagagtttaagcacaacgcaaggcctcttcagcaattgaatggacgtaaaattcagatgtactatcaccccaaccacctgcatggttcgcatgcaacaccatccaagtatcataaataaattgcttgatgatgatcatactggttttgcatcagaaaatat

SEQ ID NO: 17585 - DNA, 148 bp, Glycine max
  Clone ID: PAT_MRT3847_115884C.1
gtttttcggcttccttggagccgcagctgccctcatcttattctgtatgggagctgtctatggcacatctaatagtggtgttggcgtggcataaatgggtgttatgagaccaaagctggttattgaagtgctattgtccctgttgcta

SEQ ID NO: 17586 - DNA, 346 bp, Glycine max
  Clone ID: PAT_MRT3847_115885C.1
aattcggctcgagctcgggtgcgagaagatcacgcggggggaggccacagaggacggacctgttccgcactcacttgaggcctctctaacccgggtatacatgatcttgcacacccatggatcgctctctggacagtcgatacccttgatgcccgcagacccaccaagggtgaagagcccaacgcacatccactccatgtaccacaacgcattagagggcatgaacatgacacaggtctgaatcctagggccatcatcgagcgagggtgcacaagccgctgcaccatgaaccacatgaacgcagggcggtgttcctacccagggtccagagctggactcacagcac

SEQ ID NO: 17587 - DNA, 531 bp, Glycine max
  Clone ID: PAT_MRT3847_115886C.1
ctgttggaatctcggcaccagcttctgaggtggatcaccaccactgtataatgtcttcctgtaggataagagagagatggaacaaagtaaacaaaaattagatgtccattccataagttaataatggctgttcgtgtaaatcactataagattaaataattctgataatcatataagattgaatgtgttgaacacaccacttgctatgtaaagtttataagacaggaccattgacagttggtggggctgagaaaaagcaaaagctaacgttactgttgtgatccactcatatccaaacttaataatgttggataacaagttccaccttatagttagaaacaaataaaaggatgtataaaaaaaattgaatattaagatttttttgtaataaataagtcactgaaagttcaccagtatcatattcttagacacgaccagatcataaattttaaataaatagttattgactttgacaatcaggacttgatcagtccccacacaaaattacatataagagaaatagacttcgac

SEQ ID NO: 17588 - DNA, 512 bp, Glycine max
  Clone ID: PAT_MRT3847_115887C.1
ttttcctacaaccttgttccttctccttatgtgaaacatgaattgaagaaaggtgaaagtaatatgaacaaaccaacaaaatcagaagaagctctcaagctaccacacgaggataacaatactttttcagattctaaaacgagtggcactgcagagctagaagactgaagtggaaaggagtcagagaaagcagagaaacatcccctacagactaaacctgcagaagaagaagaaaaagaaaggacagtggatgggctcttaatgcattacactaggaaacaatctgctcatccttgttttcaacatgacaagggaccataaatggtgaggaggacagcgagacatgtgcatactagtctgccagattatgatgatttgtaggctcgtcttgcagctctcaagaagacaacccagccagcctagactaaccagcatcacatgtttgatttcctgatttattgttaatccaacctctcaccggtcactgacaaatagttcttacattctgatat

SEQ ID NO: 17589 - DNA, 425 bp, Glycine max
  Clone ID: PAT_MRT3847_115888C.1
ccatcaaaattaaaaacggtctagtttcataagtataaatgcgggtatgcaactataataaagggaagatattttaatataatcatcaaacaattcgtggttaatatttccaaaaaaaagggttttttatcaattacataaatagtatggaggacttatataaaaattatttttaatagaccatatactaaaaattatctaaaaatccatattaagaattaaccgctagttaaaataaggttcatatagtaaaaattaaactcttgttaaagctcctcaccttaccaggggaaaaacaatcccgaagggagaatccttttaggccagctgaaatcagcctcttaaaccaaacgagaggagacacatgggtctatccccaaaaaaaacgccttccactacaaggaaaggtttagctattgttcaaa

SEQ ID NO: 17590 - DNA, 553 bp, Glycine max
  Clone ID: PAT_MRT3847_115889C.1
aatccttcctttttgtcgtaggcatatcatgtgcaatcattattattctttgtaagcaaaaaacacaagtgtttttttttttttttatcctaatcttaatttctaatgccgcaaatgaagagtttgctgccctgtagcatcaccaactccactttgatttttcctctgcccaattaaatgcaactaaactgtttttggtatctatttgttacttactccgttctcttttaaataaaagaaaaataattaatttcacacttactacgaaaattaattaattttattagcttgtgtcatttttaattaaaaaaatatttttttattgaaatttaatattaaacataaattttttattaaatgaagagtattttgaccataatttcattaaataaaacaaaattatcaaaatttgcttataaaaggaaaaaaaaattataaaagagaaggaataacattagggtatgtaataataactaacaactcaataaactaaatttattattgaagttttcttaatcattatgattaagaacaatgaatagctaaacctaaa

SEQ ID NO: 17591 - DNA, 1636 bp, Glycine max
  Clone ID: PAT_MRT3847_11588C.1
aaattatagttgagtcaattaattaaaggcattggtccaaaataataattttcgtacaaggttttaaaaaacagtggtggtgaccgtgatttaggctgcagcatcaagtttttttaactgtctgctataatttttgagattgcatcgaccacatttatctgcgatttgccatgatttcaacaaacgtgactaactgcaatgcgactgtatttaaaactttgaatcttcatacaatttagcattgcttatataattaactaagattaatttgtcatctctctcggtgttgcgggctatataaagatcaaggttgaataatgaaaattttgttacaagaggatttccaaactcttatcaaaagaagattttccgacatgcataaacgcagttcatagtttcatatatatatatttttataaatatcatatggtgatgaaggtggctaggcctcttcattgcagatacacacgacctctaagcatggcccctatagcttccaatgcagaatggtggccacatctttaacattttagataggagaatacttagggaaccaagatgaggtcattgataatggttgatgttcatacggagaaagaggatgcaaggccaaactgaaggccccagagctcaaaagatcccttaacaaagtcatagtatcctccttttagtgacaatgtcttgttcaccaagccatctctaacaaatgggtatgttagaaggtttccaagggaaacattcacagcttccttctcacagtgtgagcacaactcagcaaaaggtgcatccccatgttgtgtcttcacctttgcctttgcaggcaagccaattttgacccactcctcaataaaatcagtagagtaggttccatcatatgggaaagacagaagccccttaataccaccacaagcactgtgtccaatgaccacaatctcagacaccttaagatgcaaaacagcatactcaactgctgccccagttccagcgtattttgactggtcatatggtgggacaatgttagcaacatttctgaccacaaaggcctctcctggttggaaatctagcacatgagatgggcacacccttgagtctgagcaagcaaacaccataaacttggggctctggcctttggcaagttcaccatacaaagctggattcttgtcatatttctccttcttgaagtgaatgaaaccagctttgatcctgtctgaggcttctgatgatgggatgccatcagatgatgatgttcccagagaagctgttatctgctccactttttcagcagctgtcgctttgagttcactcttctccctcaacaatttctggagttcttcaatagcttgctcgtattcctttgccatatcctctctcacagttggggtgatgatgggggcaggggcagcaaagacaggcctgtcttgaatgagagaagggaaggaagaagaagaagaagaagaaggagaagaaggagtgctaacggttgcgaagacagaagggcctaatgtggccttcttgagagaggttttggctggggagatggaagagaggcaccacccgttaatggaagaggtcgacattgtgcaatgaagactcaaatgtttatgctatatagccctatgtagcaatggggtgtgtc

SEQ ID NO: 17592 - DNA, 431 bp, Glycine max
  Clone ID: PAT_MRT3847_115890C.1
ggtgcactctaaatttctttgccataaatcatataaatatttattgaagcgggacactggcaataatgcacacagttagacacactggggccaacactggctggatgcttaatctgacactttgatcatgacagatgtgaaagggccagtttggtgtatatcagaatgacaactagaactggctctgaccaaggagcaataggaatgccacatttctgtaccacattgttttaatgaagaacgaattccaacctggaggcagatatctctttgaaccattcgggactacactcgaccttgtgacggctctactttgaagccctcttttactgccagaatttcacacagacatcagatttgtgcacagtacgtgaaaacacatacttgaagcggggaatggacagcattggctcaacacttgacacacagct

SEQ ID NO: 17593 - DNA, 127 bp, Glycine max
  Clone ID: PAT_MRT3847_115891C.1
aggatgcgtcacatgatggtctagcacttacggcacgagtcactgcgatctgggccaaggaagcgtgctgctggtcacaggcgaaaagtgaacgcattaccgaatgatgacccattcacggcacaca

SEQ ID NO: 17594 - DNA, 676 bp, Glycine max
  unsure (1)..(676): unsure at all n locations
  Clone ID: PAT_MRT3847_115892C.1
aatattaatcggcactattattgataggcagatatgttcatgtttgagcttcatatcaatgttgatactattctgtaacatttattaaagatacaaacatgacattttataaatattgatgccctcacttgggaacatccttaatagtaaccttagcatttgttaaaagaagggcctcaacaatgcaaccatgaagagagcccaaattcttagtgggaatttgctatcttaaggtacccttctacttgatttctatctccagctggaattcctctccaataagaagcgacaattttgaaacttgtacattgacaaactgagaggagctatcaaattgagacttcacaattgccttcttcattgaacttgttccattcacaatactcaactcattccctgctagcttaggtatcctcaagaaagtcaccttgtctaagatccacctttggtccagagcaaaccttccattagtgaccttagatgttacagaaacgctattgttgtgtaacgcgccataaaagcttaccagtgtccactgatctttcgcccctgccatatcaagtgcctncccatcatccaagtacaattgtccataactacttctgctgctactgataaccaccacaaggtgaaatgcagttttccgcgcagcatcagttgtcattgcttctccttg

SEQ ID NO: 17595 - DNA, 192 bp, Glycine max
  unsure (1)..(192): unsure at all n locations
  Clone ID: PAT_MRT3847_115893C.1
agaatagtncagngatgncnanagaagagattnatcatcgaggtcgnngaaggcgaaggnggngagcgaaggaaggcnttcgagaggacntnntntatcgtagcntcttcgcnaaggatggatnccnctggtactatgnaaggtntncaatagttgctnggacgtttatcgattgtgtgttgagaattatcc

SEQ ID NO: 17596 - DNA, 386 bp, Glycine max
  Clone ID: PAT_MRT3847_115894C.1
ggaacgcattcgatcgctacaaatatgtattatttaaaaaaataagacatgtttatggatatttgccttggacgtaacaaaaatagaatatttttccatacacgcacaaatagttgaaggcaactatcctaagaaaaaatgtattatgggaggaacaaaaaaaccagacttgaacgatccagcatcaatagctaaattggctaaggtaatgggtcatactatttattgtaaaactgcattgccacaactatctgatatatattaaacaagctaccattgtaggatctattgccttgaactgaagcttaactggactagaaccatacatgattggagaacccattgatacatctgctactccactggaaagattaccctgatggtct

SEQ ID NO: 17597 - DNA, 714 bp, Glycine max
  Clone ID: PAT_MRT3847_115895C.1
caatcattctgggctcgaggcagaaaacattttgatgaatctttttgaactaaatgatgaaaccattactattgctgctaattttggctggtataaaccacttgttgatcgcatgattcaaggaccagattcaagaatatcaatgacaaaagccatagttaatttggagttgaaggatccaaacttaaaactccttggcaaggaaggagctatacctcctttgctagaaatgctgtcaggcaatattgaatcaaaagacttgtcgttatcagccctggttaaattagcaggatctcatgccaataagggaattattgctgcatctggaggagtccctcttattatagatttaatgttctctcctcagtcacggacactaattatcattaaatgttctgaaatcattgagaagctttcttctgatggtgatggaattgatttctttgttgatggagaagggaaacaacttgagttggattccatcatcgccaatttgctagctttgcagcagacttccaactcaggtcacaacatccgtaagcctgcactgagtgcacttcttggaatttgcaagtttgagactggtttggttaagaaagcaattcttgcagccaatggtgtatctctaattctcccactccttgatgattctgactcagaaatcagggagacttccataattctgctctttcttttctctcaacatgagccgga

SEQ ID NO: 17598 - DNA, 185 bp, Glycine max
  Clone ID: PAT_MRT3847_115896C.1
aagcacacatcacatttaattatgattgttaaaatgactgggttccagccacgatctacattgattcaactcccgactcggaaatcaaaacattggataaaagagaaactggctatttatggtacaataaaatgtacggtgactgcagggactgcggcctgacaagtacacatgaggcatggcaa

SEQ ID NO: 17599 - DNA, 530 bp, Glycine max
  Clone ID: PAT_MRT3847_115897C.1
gtccgccacgagctcgcctccaacggccccctttcttcccaggtcccatcccccctcctctctctttctttctctctctagagattcaaaatctcacctttttattagtgttttgttggtttgattgtctttgaatttagcaaattgattagctatggtaagcattgtgaaacacaaatctaatggtagattgtataatggtggttaattttgagcacgtgatttatgcacttatctaagtaaatcttggcaatttatttactaggttataaggaaagcctgcctgtatgtcttctgaattagtcaaagtgaagtcttggctattgattgcttctcttttttatttttccattttatgatatttcaatttcaatgcatcatatggtgtaccttaattttgtatctgtttatcggaagctggtaagtgtgaaatgaagataccattaccatggtttgaacttttaagaagtagcatagtttttaactaaaagcaaattataagatgatagtatatttatctcttttgtttg

SEQ ID NO: 17600 - DNA, 374 bp, Glycine max
  Clone ID: PAT_MRT3847_115898C.1
aattcccagctgcgacgcactcatactcaaaacttgctattgtattgcatcttatcttattgtatcgtattatatctcatgtcatgcgaattaaattcgtcgagtcgatctaaatctcacccgccctaactcgttctctttcttactttcaccctttgttcttatctttcctcactcaccctttatatttcattcctatcttatccaaactctttcctccacctccattctcttctcaatatcaatatttcctctcacttgctcccattcctatatctcttttctcctctccaattacccttattattattctttcttacttttctatctcctcacatttcaatattacctccaccttatcatctcgttcttct

SEQ ID NO: 17601 - DNA, 274 bp, Glycine max
  Clone ID: PAT_MRT3847_115899C.1
ttcccgctggacccactcgtcccttcttctctgttgattcggatctattatcttcagtttctcctcgttgttgttcagtttcctgttttcaattgggattctttcgttaatttaataagatgtttgggagggcacctaataataccgataatacgaggtactactaaatcctcggcgtctccaaaaacgcttctcatgatgatctgaacaaggcttacaataaagcctccattaagaatcacccctacaagggcggttatccctataattttaa

SEQ ID NO: 17602 - DNA, 213 bp, Glycine max
  Clone ID: PAT_MRT3847_11589C.1
caaatggggcatttcataatgaatattaccacttagtaagcattatactgaacataaacagtgacgatattcaacaagattattgtcttttgaactgtagccttttaaagccttaactactttgaatcacactatgaagtccggctctgcttttaaccatgacctactttgtaccatatttgtcattaaatggtcgctgtccatacgcgctaa

SEQ ID NO: 17603 - DNA, 530 bp, Glycine max
  Clone ID: PAT_MRT3847_1158C.1
gttgcgctatggctctgctgttttgtgacttttaagctcttattgcccaggagacaaaacccttgaaggataaattgcttgattgtttctaaaactctgtagatttgaatgataaattgattgattgtttagtagtgtagagttgttttagaaaaaaaaaattaagtctttaaaaagtggcagggtagcaaatactcttaggctttttctatgtgatgtcattggcactggccatttctgcatctgattaatggcagatccataattgaagacctgaagttgggtatttgattggcctctggatgtgatttccttgaaggcctgaacttatacacgctctcaagtcttaaatgtgtagtcacaaaaccctcctatgttgacctttagtttagagaggagggttgcaataagctacctcatgcctgagttgttttagcaatagatagtgtggattcaggaagtgcctcctgctccttgtaaacttgctttattggattggatattcttcctgtttccggttttttaatgat

SEQ ID NO: 17604 - DNA, 834 bp, Glycine max
  Clone ID: PAT_MRT3847_115900C.1
ccacgcgtccgcaagaatttgacccttctcctcctcctcccgccccttttctttcaaacctcctcatataaactagtactatatgcttcttcttcttcttctccttcatgcacaaactgctattttcaccctttatatatctatctactcctgaagattagattaccttgagggctttgtgctctctgtgtaatattcttcaatatcatggggtctatgaatttgttaggtttttctctctctcctcacgaagaacacccttctagtcaagatcactctcaaacgacaccttctcgttttagcttcaaccctgatggatcaatctcaagcactgatgtagcaggaggctgctttgatctcacttctgactcaactcctcatttacttaaccttccttcttatggcatatacgaagcatttcacagaaacaatagtattaacaccactcaagattggaaggagaactacaacagccaaaatttgctattgggaacttcgtgcaataaacaaaacatgaaccaaaaccaacagcaacagccaaagcttgaaaacttcctcggtggacactcatttggcgaacatgagcaaacctacggtggtaactcagcctctacagattacatgtttcctgctcagccagtatcggctggtggtggtggtagtggtggtggcagtaacaataacaacaacagtaactccatagggttatccatgataaagacatggttgaggaaccaaccaccgaactcagaaaacatcaacaaccaacaatgaaagtggtgggcaatattcagaagcagggtgcagtgacacttatcactttccatgagtact

SEQ ID NO: 17605 - DNA, 2058 bp, Glycine max
  Clone ID: PAT_MRT3847_115901C.1
attttgttcgtttttgcgagcgtacggctcgagcggctcgagcggctcgggcgcgcgtggattttatgtttgtttttgcgagcgtaaggttgaggagaagagatggtgggagcacggccacgggacatagatgacttgcccaagaacgccgccaactacacagcgcttacgccgttgtggtttctagagagagctgctacggtccaccccaccagaaactccctcatccacggatctcgtcgctacacgtggcagcagacttaccaccgttgccgtcgattcgcctccgctctttctaatcattccatcggtcttggaaacactgtagctgttattgcacccaacattccagctctttatgaagctcactttgggattccaatgtcaggggctgtgttgaaccctgttaatattaggctaaatgcatccacggtagcttttcttcttggtcattgcacagctgcagcagtaatagttgatcaagagtttttttctttggcagaagaagctttgaaaatatggtctgagaaggccaaaaccttcagccctccacttttaatagtcatcagtgatgaaaattgcgaccctaaggcacttaaatatgctctgggcaaaggagccattgaatatgaggattttcttcaaagtggtgatcctgagtatgcatggaaacccccagaggatgagtggcagagcatttcattgggttacacatccggtaccactgctagtccgaagggtgtcggttttacatcaccgtggagcctatctcatgtctctgagtggagctcttatttggggaatgactgaaggtgctgtgtatctttggacactttccatgtttcattgcaatggttggtgctacacttggacacttccagctctgtgtggtactaacatatgccttcgccaggtaacagcgaaggcagtgtatggagccattgccaagtataaagtgactcatttttgtgcagcaccagtggttcttaacacactaattaatgccccagctgaggacaccattcttcctctaccccatgttgtgcatgtgaatacagctggggctgcacctcctccttctgttctttccggcatgtctgaacgtggatttcgtgtcacacacacttatggtctctcagaaacctatggcccctctgtctactgtgcctggaaaccagaatgggaatcacttccccctgaaaaccaagcccggctcaatgcaagacaaggtgttaggtacattggcttggaaggcctggctgttgtgaacacaaaaaccatggaacctgttcctgctgatggtaaaactgttggtgagattgtgatgcggggtaattctgtgatgaaaggctacttaaagaaccctaaggctaacgaggagacctttgcaaatggatggtttcattctggggatcttgctgtgaagcacccagatggatatatagaaattaaagacagatcaaaggacatcataatctctggtgctgaaaatatcagcagtgtagagatagagaatactctttactcacatccttcaatactggaggcagcagtggttgcaagggcagatgaaaaatggggcgagtctccctgcgcttttgtgacattaaagccaggagtggataaaagcaatgagcagcgtataattgaggatatactaaagttcagcagggccaagatgcctgcttattgggttccaaaatcagttgtgtttggagccttacctaagacagctactgggaagatacagaagcatatactgagggccaaggcaaaagagatgggacctgtaaagttgagcaagttataaacatattgaaatgatcatgacgaaaaacgaactagttataaacatattgagtactttataaacatattgagatagcctatttgtgattgggattctgcatacttatctataataatatagccgaaccttttatatgtggttcaaaagtagttgttggataagaccaacgtgtcacttatctattttgaagtcaataaatccatcctggcttccattatataattaaaaaaaaaaaaaaaactccataa

SEQ ID NO: 17606 - DNA, 483 bp, Glycine max
  Clone ID: PAT_MRT3847_115902C.1
gagtaggacagtgtctgtcgattttcaggcctgaaaagacatatcgtgtttggaatcaatccatgagtagccccaccggctggggcctacaatcttctgctctgattggcattctaaggcaaaaagacatctggatattctgaaggcttcatgagtgacaggaaacccaagcctaagaaacaattaagtggttctcatctctaattacactgtgaaaccattcactccaaacatgtaagcacacactcacttattaagtcacatactttcctaggtgctggggatcgagaacgaatcgatgtaagattcctcctttagggcagagaccgaccactgacaaatacacagatagacaaggaatttcccatggtaaaaagggatatcagtaattagaggaccgtgagactcagagatgtgtgagcgtgtgtgtgtgtgtgtgtgagtgtgcgcgcgcgcacatgcacatgtgtgtaggtagatgga

SEQ ID NO: 17607 - DNA, 286 bp, Glycine max
  unsure (1)..(286): unsure at all n locations
  Clone ID: PAT_MRT3847_115903C.1
cnannctgnnagcncgcgccagagcttgtgancgctggcgctnaggattccgagaantacgcatgtcanncnatgtacacggagnttcnccacnttgccatggctgangcaaacgccagttgttgcnnatccgttttgaaacggnnagcgtngccgtnccggccannggaagccgcnttcngaaagggatnactccgccgtcgaggcagaaaaaggaagaagaggatgtttgcttcanatacttcgacggtggaanccttgttctctgtgatcgncgtggatnncc

SEQ ID NO: 17608 - DNA, 340 bp, Glycine max
  Clone ID: PAT_MRT3847_115904C.1
aagtcaaggccagaacaggtcttgatgaaaatataaaacaaggcggggtcgttcccttaacatatatgacaagataaaaaggaaaaggcgagattacacttcacaacaagagacgttaggaagtaaataaatactgtactgaaattcattacgaatttaaatcgcaaagcccaacttctgggatggggtgtggatctcagcccaaccagaacctcccttctttgaaatgaaggccaaggggataacaatcctttgaggggaggccttggctgcgtctgggaagaaaaacccaatcgcttcgcaccgggctggggtaactttccttgggggggggggaggg

SEQ ID NO: 17609 - DNA, 207 bp, Glycine max
  Clone ID: PAT_MRT3847_115905C.1
agctcggaattcggctcgagacaccatatagccaacgtaacagaacccgttaatttgtgtattgaactaaaaattgacaggaaccctgctgatgttataaaaacactaggacactttcaacaatcacactatcctatagatgccacatttatccctgctcgaaacgtaaatcataggacccattcttatgtgaatcgcaatgaaaaa

SEQ ID NO: 17610 - DNA, 120 bp, Glycine max
  Clone ID: PAT_MRT3847_115906C.1
ggcacgcgtccggttcgtttatgttttctactcttgatcgtctcatctatcacgggctacaatcaatgaaagccatgagagcattttgttgatagaatgattaggtctatatattggatt

SEQ ID NO: 17611 - DNA, 399 bp, Glycine max
  Clone ID: PAT_MRT3847_115907C.1
agatgacaacacaacggagggcgaaatataactgggcctaaataatggtcccacataacgtcaaatgggcaagtctggatgtgaagatcctcgcaggcctgaaaaagaggactagtatgttgcttctcaaagcaagaggctagatcttccactgaggactttctgtgctcatgagcgagatagattgcaatgcagctagcaaatcatttcaacagaaagcccgcttctgggagatgagtgaaaggcactgttctatccgaggccactgatatatgcatgtgtagatcaggatcaaggatcattgcactctgagtcactccacaagactcgggtcaaggcaagacatcattcaaggtcaactagacccttctctttaaccaaagatagcaagagatcatc

SEQ ID NO: 17612 - DNA, 563 bp, Glycine max
  Clone ID: PAT_MRT3847_115908C.1
ggcggaaagtactctgcgatggaaacactgagccacgagcctcttctctatgataactctgctggagagactccgccaagtccaagcacaccattgcagaattcacgggagaagaaacaactatctgttaaggaagaagaagaggaagaaaaggaggcaaaagcagatactttattggatctaaatgcccctggtggtgattctgctattgggtgcagtccagtgctgaatctgatcacgtgtttggacacagatttgtcaagcaccacatcagaaaaccaacatggctcagagccacgagtgttctcttgcaactattgtcagagaaagttctacagttcacaagctcttgggggacaccaaaacgcccacaagagagaaaggtcaattgcaaagagaggtcatcaaagatcaggatcacgtttgatggcctcagctacaacagctttgggaattccctttctccataatcaccttcaccaccactatgccactatggcttctctgcctctccatggtgcttctagtaataataaaccacttggaattcaggctcactccat

SEQ ID NO: 17613 - DNA, 1748 bp, Glycine max
  Clone ID: PAT_MRT3847_115909C.1
aaatcaaggtagaaaagaaaaagcttctcatagcagactgaagattcttttttttttttttaaagaaaaaccttaacatttttctcttcatctcttctcatttatttctcataaatagacagaaaacagttgttgcacaagagacctcctagatcttccacttgacaaagtgcaagaaaaacattcattgacacaacttcattggccgcctccaccactgcacaagccaaccaagtcgatcagtgttgcgtataacaaatcaagagacaagtgacctaggaatttcctatattcagatgcaccatccgtgatgctcatatgaagcttttgctcctcagcaaaactgtcctccatgaccaaccaccaagatatacactcttcactatcttctggatcaacacttgcaacaaggccaagtgtttcaccctgcttcagctccaaagataggcataagaagtctcgatttacttttatcccaaccatcatagcttcctgatagagccaattaataatttggctagcaacctgctgcagaataatcacaggaagatcagctaagttgcagttatatttgtttattgaatgggtttcctcaatctttcccttgaacaaacctgcaacatttggagaaccttcagctttaacgttgatgcaatcatcatttaccaccaccttagtccaaaactgacgcttgacagcatttttctcataataatctgatgttttggtttggctaccacgaagaatagattggggaacctccatgtagagtgtccatgacgaagcccgagaatgccatgtgggattagaaattagctgtatatacgggaccttgcataccacgttttccagctctgcaagaactttagttgaaaatatcctgtgagctaaagatttaaaaaaatgaccaagaagactggatccatcctttgcctgtacgccagacaaacgatttccagaggaaattgccttatcgccaccttttccaaatatatgttcatgaaaaatctgttgaatataaatctcatagcagatggaattagaaaactgccctttcttagaggtgttctgtttggcttcacgcttcattccatcagatgattccagaggtaaaattgcattttctacattatcagtgagttcatcttcaactgtagaatgatcttgactattggacacaagtgttaagtacacagaggttccttgacctaagcttaattgtaaatagttttcccgtattccagtcacactgacacctgcaactgtgttaaatgcttctcgattcaccagatcaaacacctgttcattgaaaattgcttcatgtacttcacgaaggagtgaattcgttttcttaacacactcttcatcacttaaggactcttcacccatttctcccaaattatgctcacctgaaaagtgggatttattttcattggattttctccaggtatcatctgattgtgcaccaacgaaaccaaattggagagaatggcataaatccggagacacatttattgccagatttccagctgcatcatgattaactcgaacagtggacatagacaatgagcgaataatagctgcttggtcatatgagttatcaaagagatcaaaggtgaagccttcattccctggaacaatagctgcctgacgttgccgtttaaccttccaattttgctgcaacctgataagggcacctcgagccgattcggcccgagcaacttgttgttcaaaagcccggacgcggg

SEQ ID NO: 17614 - DNA, 261 bp, Glycine max
  unsure (1)..(261): unsure at all n locations
  Clone ID: PAT_MRT3847_11590C.1
gcaccactaatgttgtgcnggaagaacagggggctaatcttaatctgtgaaggaatcttctgttgtcacctctaaatagcaangactttgttgaaagtgacaataacttcttgtnccttccagattagagaagctnnttgtctcttcttgccacaactgcccggtgcacatggctactggttctttnttattgctttggtgtaggtanggggttgatttggtttacaggcagcnncctcttataagagggcnggtgtatca

SEQ ID NO: 17615 - DNA, 312 bp, Glycine max
  Clone ID: PAT_MRT3847_115910C.1
ctgtccttttttttttcacattgacatctttcttcattttgagaggacacactgtttataaaaattttttcctctgaatgcctgcttggcccccaaatggacctgaccgataagtctgccttctcatgggggaccggaaataaggttccctcgcctatcttgtgtttgtgacccccagatgggcttgctccaaatgcattgtgcttccaaaactgtttaggatggatcttcccaacctcaatttccagccctaatgggggtgggcacgtggcaggctataatctttcaaaacggacgttagctgggcatttt

SEQ ID NO: 17616 - DNA, 380 bp, Glycine max
  Clone ID: PAT_MRT3847_115911C.1
ctcggccgcaaacgcaaagggcgattccaccactcgagtttcgtaacgggtgctccaatctttgcagccggcaagatcatcgtaaaaaatggcgtcattgtcgccgtcgagccgcacagtggccactttaaaccgcgactggggaatctcctggctctttgcttcatgctggcaaaacatggtgttgacattgacaacatcgcctttgttaagccaaagaagtggacctgtgcctggccttttccatcacaaccggacctcgagcttgaacattttgtcagcgccttagacacggactacggcgactcagaagagtcgtagtcagtagaataaggccagcattatcatgtaccttggtgcgtttgtatttatcacgattt

SEQ ID NO: 17617 - DNA, 196 bp, Glycine max
  Clone ID: PAT_MRT3847_115912C.1
gattaatcatcttcttcacatcccataatatgatgggttctgcaccagcacagcagcagatgtcatactatgatcacgttcagacgcgccatcaggagaagggaagcctctattcttgtttgtctagactctgttgctgcttttgctgctatcatggttgcacctgccgcctgggatgcacctgtcgttgctgtcc

SEQ ID NO: 17618 - DNA, 3390 bp, Glycine max
  Clone ID: PAT_MRT3847_115913C.1
gctagcagtaaaatttaattcacaaaacatggaatcggataatgaatacttttatcgcacaaatatgcattaatatgattatgattatacagcggcacttctgtgatcccatgttgacaagaaatttacgaagttaatgagagtactatacatgccaagaattttaaatgttgaattttctaaactccaatttacatggttttctgctttacaacatatgccattcaaaacaccctcaatttaacccatcaaccccattttcaacactccatgcttcaatacctttataagcatctttatcaactctctgaacccttcttcaagaacatcgacccctgcaaataacttatcactaaaactagtaataaacttggtatctatactatgcctaagtaagtaccaactgacggccaccatctttttgcaacccatgattaagccactttttaaaaattcttgtaatatattctcaagctttttttgatatttcatcaatattgaaattttttcttactcaatgatttgtgccataaagctatggagacgaacaatttaaacttaaataccatgttttctaagctccttccgaagtgttttcagtcagcccattttttgtgtgctttgaacttttgttggcatgtgtagaacatcctcctatgcattaagcaatactagagtgtgttgattatgcatccctttttagcaggaatcatgacccttgcagcatgctttgttcccagaaaaggaccaaccaagttaacacctatcattctctcaaaatcagacttgctgttgtcaactatgacttgttttcgatctcatctatgatgccagcattattaaacatgatatcgagtttgccatacttggaaaccgctgtgatcacacagttttcaacgtcgttttcgtttgtgacatcgcaatggacataggaagcggattctaactctttggcaacagagagacccaagtcgtcttagaatatcagctatgactacatgtgctccatgcttagagaagagtcttgcagtggctgcacctagaccactcgcaccaccagtggtaatcgccaccttcccctcaagccttctaaatggagctgaaaccgaagaaacactagccatgattgagtttttcaagatatatgtagacaaggaaataaagatatgttttagagtgctaaatgaattccatcgtatttgaatattcttggagttgcttgaactaggcccaacacaccaagattaacttggatatgtagtttctgtttcagttctggaaattggtggtgtcagagtgaccattgtgaaaaatgaagagggtggaaattctgtggctactgttgttttacgaggaagtactgatagtatactagatgatcttgaaagagcagtggatgatggagtgaacacttacaaggccatgtgcagggatagccgctttgtacctggagctgcagcaactgaaattgagttagctaaaagggtgaaagacttctccttcaaggagacagggttggatcagtatgctatagcaaaatttgctgaaagttttgaaatgattcctagaactttggctgagaatgctgggttgaatgcaatggagatcatatcttctctgtatgcagaacatgcatctggaaatgccaaagttggcattgatttggaagaaggcgtatgtaaggatgtctcaaccttgagcatttgggatctccatgtgactaagttatttgctcttaaatatgctgcagatgctgcatgcactgtactacgtgtggaccagattattatggcaaaaccagctggtggtccaaggagagagcaacctgctggtggcatggatgaagactaaaattaatggtttgctttggccatgtttgtatctcaacatgatggcttgaatttgccttgggcatgttttctttatttagactttagtattggtggcgatcttacaaattttgaattttgttttgccatgaaatacaaagagatgtggtctgtaaatctacattttattcatagcccttgtgagtgatgttaatttgccgagcatatccgttgtttatgataattttttaggattgtatttatctcacgaattttatattattcaatattgaaatatttcttacttaaaggtgtgacaacaatataaggtgaccaacaatttaccctattccccttttgtccacgctccagctctttgtctttcgaattagtgcgtgctttgaacttgtgtaggcatgtgtagcacctccacctatgcatccagcaacactagctgtgttgattatgcatccctttttagcaggaatcatgacccttgcagcatgctttgttcccagaaaaggaccaaccaagttaacacttatcactctctcaaaatcagacttgttgttgtcaagaatgcttgttttgatctcatcagatacacctgcattgttaaacatgatatctaatttgccatacttggaaaccgttgtgttcacgcagttttcaacgtcctcttcctttgtcacatcgcaatggacataggaagcagattctaactctttggcaacagagagacccaagttgtcttgaatatcagctatgactacatatgctccatgcttaaagaagagtcttgcagtggctgtacctagaccactcgcacccccagtgataatcgccaccttcccatcaagccatataaatggagctaaaaccgaagatacactagccatggttgagtttttcaagatatgtagacaaggaaataaaaatatgttttagagtgtttaattaagttatgatcgacttagaagcattgctgggaggatacagactgtggttggtgatttggccactcaaggggagaggctgcagtctttgctcagctggagagatccaagagccactgccctctttgtgattttctgtctggttgctgcaattgtactgtatgtcaccccattccaaattgtggcccttttcactggaatttatgtgttgagacacccgaggttccgccacaagcttccttcagtgcctctgaatttcttccggaggctgcctgcaagaactgattgcatgctctgagtcatggatagtgcacaaactactgagggagcagcttgctttgctttcattgttcagcaccagattttgtggatttgcatttcattatgtcataggattttctgttttgaacttcatggttaaatttgtaattttgtaggctgagttgaaattaacttatgtttaatcgatttcatgtttaattagatgtagtaaagtttctcaatgggagtttgaactttaccccctcaaatggctattgattttgagcttaagtgattactgatttctgttcaaaaaaaaaaaaaaaaaaaaaaaacaaaaccac

SEQ ID NO: 17619 - DNA, 237 bp, Glycine max
  Clone ID: PAT_MRT3847_115914C.1
gcgacggctacgttagagtgtgcaaaggcacgtaaggatgcgttctaggcgatagttatgaaactctaatgggtactttcagcgaacagccagtctataagacatgcgcctagctctggaaggagcttgcatacactgtgtagacagggtgactaccatgactttgaatgcgacatgctcagcaaggacttcatagtacgaggatggtgatcccaatcgatacaggcagggttggag

SEQ ID NO: 17620 - DNA, 428 bp, Glycine max
  Clone ID: PAT_MRT3847_115915C.1
gaaaaaaacatttgaacacacagactctacctatgaattatgcaatgcacacaactactcaattgttttcaaaatctcgattgtatatattttaactcagtgcgcctcaagtgattaactcgccgggttcccacagtggatcccatcacaactcatcgcgcattaactcgtcgtccttaaagggtcttacagttgtgtgattacataattcatggctcacaactcaaaacatacaacatctcaagagtcatgtaattcacaatccattacgtatcaattgattatcacttacacatcatctcaatcacattttcataataaaataatttattgcatctcatgcaccctacacatatgactcaatagtaacatttacttgacatcacaaaatataaattaaatcgaaatgtattaattcaacaacataa

SEQ ID NO: 17621 - DNA, 390 bp, Glycine max
  unsure (1)..(390): unsure at all n locations
  Clone ID: PAT_MRT3847_115916C.1
cacgtactcggtctctgaattcctcgtggtcgactccacgtcgttccgtcccacgtcgtctcgtatttaaattctataannttggtgcctantgttatactcnnaatcttaagttctcgtaaattggtcaatgtgtaaaattatctggtgaaaactaagttgccataagccatgaaggtttggttgaagtnnctttttttattagtnntttttttacttctacttcnntagagctcattctaagtttcnntcttcgagggtcctaagctttgcttctaaatgtccttttcaattgcttttaattgtttgaatannatccttgaannaaattgtcttgttataaactttccattggtttaagctttcattttcattttttttttaggtctt

SEQ ID NO: 17622 - DNA, 261 bp, Glycine max
  Clone ID: PAT_MRT3847_115917C.1
gttataacctggggggcgctatcattgaaagggcccccagatctgctaatgagtgagggttgtgggatcctgccagcgcaggagataggactgtgtaatcgaatccatgccccggtcctgacgcatggagcgcggaatgtctgaatcgtgcccgattttactggagaaaggggggccacactgtaaggacaggcattccacagcgacctgttgcaggcacaaacggtgggggaatggagtaaagagccttatttaggggga

SEQ ID NO: 17623 - DNA, 257 bp, Glycine max
  unsure (1)..(257): unsure at all n locations
  Clone ID: PAT_MRT3847_115918C.1
ttgtccagcatcaaggttcctcntcaattcttggtatctggggaggcaaaggacaaggataatctttncaatgtgagcttgtctttgccannatgggaatcaanccccatcatgntgagtgctggagagttggaaagtnganatgcaggaganccagcaaaactgatcaggcgagtaccgtgaagccgcagacttgntcacnatggganagatgtgtgcncncnttcatcaacnatcttgatncaggagnggtccnc

SEQ ID NO: 17624 - DNA, 333 bp, Glycine max
  unsure (1)..(333): unsure at all n locations
  Clone ID: PAT_MRT3847_115919C.1
acgctctcaaaaaaaaaaaaaaaaaaaagcccgcgatgcgctcttcactcggaaaagcgaaaaccacaagcacgaacgaaagagaagagcgacccacaagcgagagaagacggggccgacgcccacgaagccgcccaacagggcgcccgcgaagaaggaaacgaggaccccganggccggccccgacgccgcaggaaagacaaccacccngcacaagcccaagcacggagaaaacgccaccaccaaccccaccaccggaccaaacgcagagaccggggagcacaagaacaccagccccaccgggggggacgccggcggccaggacaagaaccg

SEQ ID NO: 17625 - DNA, 1210 bp, Glycine max
  Clone ID: PAT_MRT3847_11591C.1
ggcacaatgtcaacctcttccataaacgggtggtgcctctcttccatctccccagccaaaacctctctcaggaaggccacattacgcccttccgtcttcgcaacccttaacactccttcttcttcttcctcttcatcttccttacgctatctcattcaagacaggcctgtttttgctgcccctgcccccatcatcaccccaactgtgagagaggatatggcacaggaatacgagaaagctattgaagaacttcagaaattgttgagggagaagagtgaactcaaagcgacagctgctgaaaaagtggagcaaataacagcttctctagggacatcatcatctgatggcatcccatcatcagaagcctcagacaggatcaaagctggtgtcattcacttcaagaaggagaaatacgaccagaatccagctttgtctggtgcacttgccaaaggccagagccccaagttcatggtgtttgcttgctcagactcaagggtgtccccatctcatgtgctagatttccaaccatgagaggcctttgtggtcagaaatgttgccaacattgtcccaccatatgaccagtcaaaatacgctggaactggggctgcagttgagtatgctgttttgcatcttaaggtgtcggagattgtggtcattggacacagtgcttgtggtggtattaaggggcttctgtctttcccatatgatggaacctactctactgattttattgaggagtgggtcaaaattggcttgcctgcaaaggcaaaggtgaagacacagcatggggatgccccttttgctgagttgtgctcacactgtgagaaggaatctgtgaatgtttcccttggaaacctgctaacttacccatttgttagagatggcttggtgaacaaaacattgtcactgaaaggaggatactatgactttgttaaaggatcttttgagctctggggccttcagtttggccttgcatcctctttctccgttaaagatgtggccaccattctccattggaagctataggggccatgcttagaggtcgtgtgtatctgcaatgaagaggcctagccaccttcatcaccatatgatatttataaagatatatatgaaactatgaactgcgtttatgcatgtcggaaaatcttcttttaataagagttggaaatcctcttgttaaaaaaaaaaaaaaaaaactgagactagttcc

SEQ ID NO: 17626 - DNA, 403 bp, Glycine max
  Clone ID: PAT_MRT3847_115920C.1
accagttatacatgaatcatgactgacttatgccagagaaaatttttaccgattattccttgttacaaggatgatcatgtctcccctagccaactactatacaaactccttccagccgttgcgattcaaaaaaactggtccatatgtttggtccgagaaagacaactaaatcggaggactggggcccctcatcgcatctctggaacctattttgtcccaaatctgtagggcggactgagtcaacattaatgggaggaaccgggatgtgacgctgtgcacccactttgatgaggggggttgcttgagctctggacaagagtgcttttgctggtgcctctctgatgctaccattcgctgcaggaaaatgcagagcaactgtgccactacatggctgatctgatgc

SEQ ID NO: 17627 - DNA, 570 bp, Glycine max
  unsure (1)..(570): unsure at all n locations
  Clone ID: PAT_MRT3847_115921C.1
tttttcggctgcgagaagacgcagaagggggaatgattgattatttttatgccaaactttataggattccaattccctccctttgagggatagaaagaacgcaacattcaaaatttagtagtactaattttgatctttctcttagcatctaattctacttgctcttgttcttcttctttcattcaagctttgtgagtgattcttagaaatcgatctctagctacaatgaacgattgggctcctcctctcatagctgcggctttgttttggctcttgagcccgggaatgatctttcagttgccggggaagaatgcaccctttcagtttatgaacatgaagaccactgttgcatccatgtttgtgcacactgttatttatggtctgtttctgatgttgttcttcgttgttcttagtatccatctttatatttaagcagcagcaaagggtatttaaagaaaacttatgtgttgctttatcttttaaagtagatcatgtaacaaccttctcttgttgatcaatatgtatgtgctcttttgaattttctacttgatcagtcttctactnnnnnnn

SEQ ID NO: 17628 - DNA, 277 bp, Glycine max
  Clone ID: PAT_MRT3847_115922C.1
aacacttatactatcaaatgttttagatttcaaacctatccaactctctaaggctaacgctacttctaataaactaaaggctataactcaatctatacattactctacacacacactctctttcacacaatactaccttaattctaacctcatatatcctcatctttcaaacaccttctctcacaaagaattcacttccccacctacaacaactcaaacaccttcctctaactacacaattctaaatccaactccaaatcttgtcttacatatcata

SEQ ID NO: 17629 - DNA, 284 bp, Glycine max
  unsure (1)..(284): unsure at all n locations
  Clone ID: PAT_MRT3847_115923C.1
ccccaccncttggggggcagagaaggctttatattacacaccccaccaaacccaacaaaattttgctcttcgtgggcaccatatttacaatgcacaaaatgttaatggagatcacaagcctatcaatataaatttaaaccttctcaaacagtaaaaaataatgcccattaatctaacattgttaaattaagcaacacctgctaaattacttgattcaatttcatgaatgaacaacccccaaggttggcgaccttatatgcctttctatataacgccttgagctt

SEQ ID NO: 17630 - DNA, 428 bp, Glycine max
  Clone ID: PAT_MRT3847_115924C.1
tcttttttttttttttttttttttttttttttttttttttttttttttttggggaacgaaaaagggctttttttaaattgaattgaggggggggaacacccaaatttaaaaatttccaattcttccttaatattggccccccccaaaaagaaattattccaaaaaaaactttttttttgcttttggttttacacaaacccttcccaaaatttcaaaaattcaccacccttttttttttaaactttttaaatccaaaaacagatcccatataaaattcaatggctttttttattaaagctccctaaaactccaaaggaccaaaagccgggttctccattaatgttctcttcaaacatgattttacttttcaattacaaggggcacaaacccaaccaatttgcgggtctttagaacataaaacattttaa

SEQ ID NO: 17631 - DNA, 448 bp, Glycine max
  Clone ID: PAT_MRT3847_115925C.1
gggggaaaaaaaaaaaatttttttggggagggaaccccggggccttaaggggtttgcccccaccaacaatttgcctaggggggcaattcaccaaacccccttttttacccttctccccccttggaccccttttctttacaaatcgggaattttttggcaccccgccccccattcctaaattcaggggaggggtctaattcccttggcccatttttttccccaaacttacgaacttggacttgcccaacggggggcccctaaccccaccggccttttaaaaaacccccttttttaaaagccccgggcccaaaaataccccagtagtccttggcataaccccccttggtaagggtatccaaaacccacccttttttcccccctcttgaagaagccttttgtccaaccctgaaaacaaaactagacaccaagtttcctgcagcctttccca

SEQ ID NO: 17632 - DNA, 427 bp, Glycine max
  Clone ID: PAT_MRT3847_115926C.1
gtgccttcccatttgtgcattactaagacatggagccaggctgactgtcgtggtccataccgcatgactaatcgcattcatggccatgaacagcccaaggcttccaataacttgaatgggcaagtgtgtgagatttgtggagatagcgtgagactcacggtggatggagacttgcctgtggcttgcaatgagcgggggtatccagtgtgcatgccttgctatgagtatgaaaggagagaaggaagccacctttgcccacagggcgaaaccagatacaagcgtctcaaagggagccccctactggagggagatgatgacgaagacgatggggatgatattgtgcatgaatccaatattgctgagcagaagaacaagcatggccagtttgctgaagccatgcttcatgggaggatgagctatggaacag

SEQ ID NO: 17633 - DNA, 205 bp, Glycine max
  Clone ID: PAT_MRT3847_115927C.1
caattgcgaccgattggttccccaccttcaaacctcctggaccaaggtgtttttggctatgtccattaatggatttctcccaattgggaaaattgtctcagtcatgcatttcaattctgaaattacacatggggatcgtgagttccatccatattttgatgtcattacccgtgtgcatcacagacaccttgtttcccaagttgga

SEQ ID NO: 17634 - DNA, 1093 bp, Glycine max
  Clone ID: PAT_MRT3847_115928C.1
gcgcctcggcgcccagcggctacacgatcttggcttttctatctctatctttcgtcagcccctttcactgtccaacggcatttagtatcgtgtaacataacaaaaaagtagtggcttgtgttgtgtgactgagggccaaaggcaaaacatggaggtggatcagatgcagagagagtgcttggactacaccaaatccttattcttggagggcttcttggatggtcaatttcttcaacttcagcagctacaggatgagaacaacccggactttgtagttgaagtggtctctctcttctttgaagattctgagagacttctcaatgaccttacctttgctctaaatcagaaaagtattgacttcaaaaaagttgatgctcatgttcaccagctaaagggtagcagctcaagcataggtgctcagagggtaaagaattgttgcatttctttccgcaacttttgtgaggaacagaacatagacgcgtgcctcagttgtctgcaacaagtaaggcaagagtactgccatgttaagaataagtttgagacactgatcaggcttgagcaacagatcgtggcagctggtgggtcaatcccaatgatggaatttagtttctaaggatgtgaatttgtagagaaggaaacaagagtattttgtgatccacttcatctttggtgaaaattctcttttatgtttatgtctctgatgaatgtatggattttcatgaagagataactcagataagtttccatctagtgtaacccttttcacaaaaacaaaaagcctaatttgtaatcttttgcatgctttaatgaacaccagataccctagttaaattaaaacatacgtcacaagtatgtttagcctagttctctccttaaaaaaaaaaaaataataggggagggaaagaaagggggccgaatattgagtttacccccccccgcgcttcactgcccggcgtgttccagcgttttccactgggcgggccctgtgaaaacaccaaacttacctcgccttgctgcccatttcccctctttccagctttgggtggttgcggcgaggcccagacgggcccgcccttccctcccttttgcccag

SEQ ID NO: 17635 - DNA, 400 bp, Glycine max
  Clone ID: PAT_MRT3847_115929C.1
acggctgcgagaagacgacagaaggggagcattaagtatcgtgtaacataacaaaaaagtagtggcttgtgttgtgtgactgagggccaaaggcaaaacatggaggtggatcaaatgcagagagagtgcttggactacaccaaatccttattcttggaggtaaggtagataaacaacagtatgtgcaataaattcacatttaattctgtggttgttttcatcagttgtgattttgtgggtcttgttgtttttcttacatatggtgagagaagggcttcttggatggtcaatttcttcaacttcagcagctacaggatgagaacaacccggactttgtagttgaagtggtctctctcttctttgaagattctgagagacttctcaatgaccttacctttgc

SEQ ID NO: 17636 - DNA, 1321 bp, Glycine max
  Clone ID: PAT_MRT3847_11592C.1
cacctcttccattaacgggtggtgcctctcttccatctccccagccaaaacctctctcaagaaggccacattaggcccttctgtcttcgcaaccgttagcactccttcttctccttcttcttcttcttcttcttccttcccttctctcattcaagacaggcctgtctttgctgcccctgcccccatcatcaccccaactgtgagagaggatatggcaaaggaatacgagcaagctattgaagaactccagaaattgttgagggagaagagtgaactcaaagccacagctgctgagaaagtggagcagataacagcttctctgggaacatcatcatctgatggcatcccatcatcagaagcctcagacaggatcaaagctggtttcattcacttcaagaaggagaaatatgacaagaatccagctttgtatggtgaacttgccaaaggccagagccccaagtttatggtgtttgcttgctcagactcaagggtgtgcccatctcatgtgctagatttccaaccaggagaggcctttgtggtcagaaatgttgctaacattgtcccaccatatgaccagtcaaaatacgctggaactggggcagcagttgagtatgctgttttgcatcttaaggtgtctgagattgtggtcattggacacagtgcttgtggtggtattaaggggcttctgtctttcccatatgatggaacctactctactgattttattgaggagtgggtcaaaattggcttgcctgcaaaggcaaaggtgaagacacaacatggggatgcaccttttgctgagttgtgctcacactgtgagaaggaagctgtgaatgtttcccttggaaaccttctaacatacccatttgttagagatggcttggtgaacaagacattgtcactaaaaggaggatactatgactttgttaagggatcttttgagctctggggccttcagtttggccttgcatcctctttctccgttaaagatgtggccaccattctgcattggaagctataggggccatgcttagaggtcgtgtgtatctgcaatgaagaggcctagccaccttcatcaccatatgatatttataaaaatatatatatatgaaactatgaactgcgtttatgcatgtcggaaaatcttcttttgataagagtttggaaatcctcttgtaacaaaattttcattattcaaccttgatctttatatagcccgcaaccccgagagagatgacaaattaatcttagttaattatataagcaatgctaaattgtatgaagattcaaagttttaaatacagtcgcattgcagttagtc

SEQ ID NO: 17637 - DNA, 472 bp, Glycine max
  Clone ID: PAT_MRT3847_115930C.1
aacaagttctggtcactaacatcatcagctgtgaactgaaattcatttccatctcccactgagtccacttctatcggaattgctgtcataggatgatctctagagtgtggtggaggaagacgatctgcatctggtacttcatagcaagcctcacacaagtcaaaatcaggacaaacagtacaatgccatctccgcctttgtataggtactgtagagcaaccatcacaacaatattggacagatgaagtaatagtatcgtcctcaatcatgatttggttatttccagtacttgggtcagcagggccaggaactgacaccacactctcaacagcatcatctgtagccaacatggtttgctttggaaaagggacctgaagcaatcttgaagatatggccaaactggggaggaaatgtgtgaaaacgtgaatatcaaattcagagccaaaaaaaaaaagtaagctaaaatacctgc

SEQ ID NO: 17638 - DNA, 287 bp, Glycine max
  Clone ID: PAT_MRT3847_115931C.1
tttcgtttatctcgtgggccgacgctagggttgaaattgctggtaatactcttatgccagctttttctgttccacaggctactgccagatcttgtgaaaatgctgaatcctttgcatgatctggaattcgtgattgctttcgcttgttcgtaagcttaactcaataaaggaaattaggcatgaccctcttgttgagtatgctctgactattagaaaattttcacacctcttttgattatcgtcatgatgaagtgaagggtgtgttattttacaaaaatgagcacgct

SEQ ID NO: 17639 - DNA, 381 bp, Glycine max
  Clone ID: PAT_MRT3847_115932C.1
gcagggccgggcacagccgtacgccaaggcttttgccaaggcttccgtataattggtcctttaataaaaccaaaatcccgtggatgtttggtaaaagggttggaacgaaccaaacggcccgaaggtaaaccggcggaaaggccccgcggaagcagttggcaactaaggcggttggaaggtcggttccggcgaccgggggggtgaaaaagccgcccagattcaggccgggaaccggggcgctgtccaggatccggaagtcccaaaagagcccggggctcctaatccggaagcttccgttccagcgctggttccaggggatcgcgcaggacttaaggaccgacctccggttcaagagctcctccgttttccgcttcaaggagg

SEQ ID NO: 17640 - DNA, 480 bp, Glycine max
  Clone ID: PAT_MRT3847_115933C.1
ctcacgcgtacgacctcgctcgcatacaagggtcctggactcctgaagaggaccaacctgtactgctgactgttcagacttacgggcttatgaactgggccgcattaaccacatacattacggtgcgctctagtgcatccacccgcttgatagtggtgcaaccagatctcttcggattgtaaccgccgtgcctttcacaggatgaggaataccacgcgatcactgattgctaacgccacagttcgagaacaattggtccaccatcattgctcttacttattgtccgtatcgacactgcctctatagccattgaggttccaccctgatcatgcatggcttggaacctttgtccgtgcctaagcctctgttgagatgcttcactcgtacactttagtattctaccatcctttttgagcgattcgggtttacccattattcttgcaagaagcgtgagcgtgacggagctggctctaacccctt

SEQ ID NO: 17641 - DNA, 322 bp, Glycine max
  Clone ID: PAT_MRT3847_115934C.1
ggggtactaaacactcaccgtcctcctttatccttaggattggctctcctgtgaagaagcgtttacagagagtcggaggcagaacgtaacagatagagagaggagctcatatactggactatccgtagagacatggagggtgcaaactggaagataacagatgaacgaaacaacgccattctcttattctgggacagctttaactaaacaacaaagcccacctgaaactttgcatcatacgaaggaggcagaagaagaataagaatccctagcagacgaagaagaagacgtatgtcagcataaaaatattacctgttgttct

SEQ ID NO: 17642 - DNA, 837 bp, Glycine max
  unsure (1)..(837): unsure at all n locations
  Clone ID: PAT_MRT3847_115935C.1
ggaaggaggtgtggagtgtttgaacaaaggagtaaaatggtatttttgaaggattttaaagttttataagagccagagagtaattatgatagggccaatagtaaacaccttttgttgtcttaggtaagcgcaaataagtgcagagggtatggaaaatgggccaggaagtggatgtggccttctagggttatgttagtgggtgatggaaggcattttatttaatttatagcttctctataaaataaaatcaaaaccctacttcctcttaaacttcggctcaagccattttctacttctttcgttgtcgccgttcgttcacagcgtagcctctgctctcgaagatggctcctcccagaggtggtggtgggttcaggggtggtaggggtgacagaggtagaggaaggggtggcggtggaggaagaggaggagacaggggtacgccgttcaaagctagaggcggtggccgtggtggccgcggaggaggcaggggtggtggccgtggcggcggcagaggtggaatgaagggaggtagcaaggttgtggttcagccccataggcatgatggcattttcattgccaagggtaaagaagatgctcttgttactaagaatcttgttcctggtgaagctgtttacaacgagaaaaggattaccgttcagaacgaagacagttccaaagatgagtacagagtttggaatcctttccgttcgaagttggccgctgccatccttggtggtgttgacaacatatggattaaacctggtgccanagtcctttacctangagctgcttccggcaccactgtttctcacgtatcagatgttgttggcccaactg

SEQ ID NO: 17643 - DNA, 2414 bp, Glycine max
  Clone ID: PAT_MRT3847_115936C.1
gtatcaaggttgttcggctggctataaaatcctcttaaccagttgttgctgctgcgttgcacttcagtttacagctcccgaaaatggctcctccaagaggtcgtggtggttttggtggtggcggtgggttcaggggtggtggtaggggtgacagaggcagaggaaggggcggtggaggaagaggaggagacaggggcactcccttcaaagctagaggaggtggcagaggtggtggtggccgtggcggaggcaggggtggtggccgtggtggtggcagaggtggaatgaagggaggtagcaaggttgtggttcagccccatagacatgatggtattttcattgccaagggtaaagaagacgctcttgttactaagaatcttggttcctggtgaagctgtttacaatgagaaaaggattactgttcagaacgaagatggttccaaagatgaagtacagagtttggaatccttttcgatccaagttggctgctgccatccttggtggagttgacaacatatggattaaacctggagccagagtcctttacctaggagctgcttctggaaccactgtttctcatgtatcagacgttgttggccctactggagttgtctatgcagtagagttttcccatagaagtggacgtgacgtggtgaatatggcaaagaagcgaacgtaatgttatacccattattgaagatgcttagacatccagctaagtataggatgttggttggaatggttgatgtcatattttctgatgttgctcagcctgatcaggcaaggattttggggctgaatgcttcatattatctgaaagcaggaggtcaattttgttatttcaatcaaggctaactgcatagactccacagtccctgccgaggcagtgtttgaaaagcgaaagtgaacattgttgaaggcagatcaattcaaaccattcgagcaagtcacccttgaaccatttgaaagggaccatgcctgtgtggttggtggatacagaatgcccaagaagaaaaaagatgctgctgagtagattgctttccggtaaccagtagtcttgttgtcatttcagtaaattctgttaattttattttcaaagctccgttatcaaacaaactttgaaccttttctatagtagtaatttactcatgttttccttccatttcacatatactccgcccaaccatttttcctgaaccaaacgagattggttcatggatacagattgcccattaaaaaaaaagatgctgttgagtagattgctttccagtagccagtaggcgtgtaccaatgttatttcatgagatttgtgttaattttgttttgaaaccttggttataaaacagttctgttttgaattttgatagtttgatgtcagaatgccccaaaagaaaaaatatgcttctgagtagattactttcctgtagccaatagtgctatttatgttcttcatcattttataatgaatggcgtgggtggttttaatttgtattaatcttgaaaaattaaagaatgttgtggcttatggtctcctttagcggcggtgatgaagatttaagggctgagataccctcactcaggtgtttgcaacacccatgcgaagcacgaaagagaaagaaaaagaagatgacaaaaagcacaagaagaagaagaagaagaagaagccaaagagcgagaggtttgagaagctggaggctctaagcagacgcctgaggctttgccttctaaagggatcaacccatcgaaggcacaagtccacttagacacttgtatcatatcatctaattctaatgttatgtttttattttacaacactattgaaagttagttcttcaaattcaactttctttttagatttttccagatgaattaattagtttctcgttggcttcacctatgcgaagcacgaatgaaaaagaaaaagatgatgacaaaaagcatgaggagaagaagaagaagaagaaggggaagaagccaaagagtgagaggtttgagaagctggaggctctaagcaggcgcctgaggctttgccttctaaagggatcaacccatggaaggcacaagtcaacttagacacacctcttccttctttgtatcatatcacccatccatcgtctaattctaatgttttattttacaacactgtttctaggtagttcttcacattcaactttctttttaggttttgcctaacattggctttgatttccctgctctcattattatttcatacttatgaaggtgactcatcacattgatgtaccagatcacttcaaatctaatacaatttctgtatccattatatcgagtagattgctttcgagtagccagtaggcgtgtaccaatgttatttcatgagatttgcgttagttttgttatcaaatatctaaatgaatggaatacctttaacaata

SEQ ID NO: 17644 - DNA, 1526 bp, Glycine max
  Clone ID: PAT_MRT3847_115937C.1
ccacgcgtccgcacctcttcgtctggcgttgtagccgttcacagcctagcctctgctctagaagatggctcctcccagaggtggtgggttcaggggtggtaggggtgacagaggtagaggaaggggcggtggtggaggaagaggaggagacaggggcacgccgttcaaagctagaggcggtggccgtggaggaggcagaggcggcggtggccgtggaggaggcaggggcggcggccgaggtggaatgaagggaggtagcaaggttgtggtgcagcctcatagacatgatggtattttcattgccaagggtaaagaagacgctcttgttaccaagaatcttgttcctggtgaagctgtttacaatgagaaaaggattaccgttcagaacgaagacggttccaaagatgagtacagagtttggaatcctttccgctcgaagttggctgctgccatccttggtggagttgacaacatttggattaaacctggagccagagtcctttacctaggagctgcttctgggaccactgtttctcatgtgtcggatgtggttgggcctactggagttgtctatgcagtagagttttcccatagaagcggacgtgacttggtcaatatggcaaagaagcgaactaaatggttatacccattattgaagatgctagacatccagctaagtacaggatgttggttggaatggttgatgtcatattttctgatgttgctcagcctgatcaggcaaggattttggggctgaatgcttcatattatctaaaagcagggggtcattttgttatttcaatcaaggctaactgcatagactccacagtcccggctgaggcagtgtttgaaagcgaagtgaacaagttaaaggctgatcaattcaaaccattcgagcaagtcacccttgaaccatttgagagggaccatgcgtgcgttgttggcggatacagaatgcccaagaagaaaaaagatgctgctgagtagattgctttccaggcgtgtaacaatgttttcatttcatgagatttgtgttaaattttgttttgaaactttagttatcaaacgtagttctgttttgatagtttgatcgtttgaatgccctagaggaaaaaagatacttctgagtatattactttccaatagcctgtaggtgtttaccaatatcatttcatgagttctatttatgttcatcatcactatataatgattgatggcattggcttgaatttgtattaattttgaaaaaataaattgcaccttttgtatttgaaaaattaatttgatagaattgctcctcaatagatacatgaatttaaagatcacatcttcaaaactaatacaaattctgtatccattgctgtcgagtagattgctttcgagtagccagtaggcgtgtaccaatgttatttcatgagatttgcgttagttttgttataaaatatctaaatgaatggaatacctttaacaatccccctttttttttagggcggccgcggtctttactgctcgtcgtcacgggaatt

SEQ ID NO: 17645 - DNA, 976 bp, Glycine max
  Clone ID: PAT_MRT3847_115938C.1
gttggctgaatagaaaatcgactttgtttgcaagctaaattctcaaaggcaccaatttacattgcacagagtctcccaaattctcccacaaaagataaaatgtctctaatcccaaacttcttcggtggccggagaaactctgtgttcgatcctttcttcactggacgtgtgggatcccttctaaggcttttcctttctcccgaaatacgcctttgcttctgctttccttcccttgaattttctcggggaaaattttcagctatttggtgagcacccgttgttggacgggaaggacgaaccccagaggcgggacgtgttcaaggcagatattccaggactgaagaaggaggaagtgaaggtgcagattgaagacgataaggttcttcagataagcggagagaggaacgttgagaaggaagataagaacgacaccgtggcatcgagtggagcgtagcagtggcaagttcatgagaaggttcagattgccggagaacgctaaagtggagcaagtgaaggcttctatggaaagtggggttcttactgtcactgtccccaaggaagaggttaagaagcctgatgttaaggccatagaaatctctggttaagcaaaagcaaattgatgtttggtcttttatgttttaaattttgtgtttttctttgttctaatgtgagtgatatgcgtgggaaaaatgtagtgggagttgtgattgtataaagaaataagtcgttgtcgtgcgttggtgagatattatgtgtgaattttaatgtagcgcatgaaactttgcaatggagaagctaaatgttttttttctgcttactgagaacaaatattaagctaatgaatgtatcatgacaatttcaagtgtacctattctttataaaataaaaaaaaataaaggtcgcagaacaagaggctaggatctgggagaataatgttgatcacagtaggtacaagataaacagggatggagtctgg

SEQ ID NO: 17646 - DNA, 457 bp, Glycine max
  Clone ID: PAT_MRT3847_115939C.1
tctacactgctatataaatacctagtggaagccgtagctaccatgttttccaccactatatttactgctttatggtgccaaatcaggaccagtacacaacttgccagaaaatcattcatggcagtgaaggaaagcaacacaagccaaaatattcagcagcagcagcagcaacaacaagaagcttgtgatccttgcaagtcttttggccaaaagtgcagccacattgtcaagaagcagcgtgcaaaattctacattcttcgccgctgcatcgccatgctcttgtgttggcatgagcgtggtgacacataataaggcctgccacacagtatcatccttttctctgtcattgtaacataaagagggtactactactatgtcacactgcaaaattgtcactttttctctaataggattattgcattgtgtgtaatcacgtgcagctactaacatgtgaaag

SEQ ID NO: 17647 - DNA, 296 bp, Glycine max
  Clone ID: PAT_MRT3847_11593C.1
acttaaacttttcgttacaattttttggtgggggacttagcattacaaaatatataactttatacgtttctttcttacactttatgacccccccaaaaaaaactcattcaacaaaaacaacaagcagttgcacatgtaacactcatacaaaacattttttttattatgattccaaacaaaaaacccttcttgcgagcacaaaaaaaaaaaacccaatttttttcattttttaaaaaggggcaaaaaacccccaacaaaaaaacagaatgggcttatgataagaaaaccaccttatt

SEQ ID NO: 17648 - DNA, 245 bp, Glycine max
  Clone ID: PAT_MRT3847_115940C.1
cgtacggctcctcggaattcagcttcaacgttggcagaggcggcaacagaagtacgacctgcaacttactcgatgggtcgcgtgaggacaattacggagaagttatctatctgcttggttgcttactggtactatttatgcatggcactcgattttaggccatcaatgagcttctctgtaaagtggccatccatccttccaataggctgcggaataagatcgcgggtttctccacgcatctcatg

SEQ ID NO: 17649 - DNA, 468 bp, Glycine max
  Clone ID: PAT_MRT3847_115941C.1
gagattctaccagagtaactgtttttttctttcatcatttctattaaaattttgtagtacataacgtaaatagccacaaacttaacggttcggactaatcatgtggctgctgcgatgcggattgtgactgttgcggcgtgaaattattatatgttttcactagatgtaaaatgaattatacaattattctaatcatttgcatatcttttatttataacataacataatttttcattcattttaagatttggtatctcctaacatcccatatagccaaacacattcgaccatcgtctcttagaaattcaaaatagaagattgaaatctaaaatttaatttaattttgacaataaaaaagtataataggacggtgttaaaggctatgttgctgcaccaacgcagttccgttgtggctatttgtggtatttcatgtgattgaaaatcacaccacaattacgggccgatgcg

SEQ ID NO: 17650 - DNA, 209 bp, Glycine max
  Clone ID: PAT_MRT3847_115942C.1
gcggtcgagctctcctactgttacgttctctgttctctttccggcgacgtatctagcctgccaacaaagaatttataaccccacgtacctaggcaccactgctaggaatggcaagagagatatttcttgcccttctgatcacaacctttgtggttgcagcctctgctggtaacttcaaccaagactttgagataacatggggtgatggt

SEQ ID NO: 17651 - DNA, 164 bp, Glycine max
  Clone ID: PAT_MRT3847_115943C.1
tcgtgcgaaccaacaattgcggagatggtcttctgactgcgacaccaaaagcgtgtgtgtgggttatggattataaacagttgcttttctaacggttgatgtaaaaccagggcttatgggactcatgtttagttaggtgccccatctgcacaaaacccaaatgg

SEQ ID NO: 17652 - DNA, 284 bp, Glycine max
  unsure (1)..(284): unsure at all n locations
  Clone ID: PAT_MRT3847_115944C.1
gcctaaagcgcaactaatgttagtgaaccccactttcgcggtaggaaggctttttgtgtgcagacaagtccttcttttgaatttatgangccacaaaaatgagtcccgcaatgtgcatgtggcctttaacaatgaaagcagagtgactgggatagtgacaagtatctgtaatcccaggattgcaagggttganatgggagggtcacaggctcanagtggagactaaaagcatgggaatgctttaacaaggaaagggaagatgagaatccatctgtagcagccca

SEQ ID NO: 17653 - DNA, 517 bp, Glycine max
  Clone ID: PAT_MRT3847_115945C.1
ttttcttttgataaacagagacgcccgtataacctgaattgcacgcacacaaaatcgccgaggctgtcaaatgatggagaaagttgcccatgcctcgaatttcgagaaaaagtactatatactcccctttacgagcggatcactgctaacagccttctatcctttgctaaatatgtcatgtctaaacgtgcatccctttctgaatctctgctagagggccagggcgccagttttcagtgaattcccagtctataacaactcgacctgaagccaaagtttttctacaagctggacgcggctactgcttacatggagccgaacctgtccggataccctccaaggaatttggcgattccaccctcctcatctggacctggaagcgaaactactcgcgccaccttactgtgaacaaagttgcagccccactagctccttataacggctgcaacccaagaggcttatcaggtgtccctggatctatctggtggaccttgataacccctatctgctgcctgcc

SEQ ID NO: 17654 - DNA, 330 bp, Glycine max
  Clone ID: PAT_MRT3847_115946C.1
ccaaaacaaaaaaatacttgttgatagaaaatgaacatcataacatcatccatacaattccttggttggggaaagttaaacaaggaattagcctcaaaacaaatgaccaatggatttcactttttacaagggtttctagtttttggaaccctgaaaatgatttgcaatatcttggggactggtatgaatacaataagcctgatttttcaaaaaatgtggaagccccatcttttaaggggagcttttactgtccactggttccttgagctttttccccaatgcaaatgccaaaggaggggggccagcattaccaatctgccggggcttggg

SEQ ID NO: 17655 - DNA, 474 bp, Glycine max
  Clone ID: PAT_MRT3847_115947C.1
gcggtaccatcttcttcattcactgccaattccactttctctcagtgcatgcatgtaatagtcttcagttcttggagtccgcaaagctagttatagtaacctcttcaaagttcaaaacttcccttttttgtcctagcttgcacatgttgtcactgttgaaagtacaagtctttttctctcatttgcagtttcatttgccccgcatttctttgctttaaactactcttctcattgcttttgtccaaagttcccttctttgtctcgttttctgattcaaagtttgaattgtgaaatttttttctagttcaaggacgggcctgtgttattaattaagtttacatgaatttcagtttctaggattttttgttttgcacaaatgaccagtgacaacacttgaagcaaggaaagatttcgattgagtacatttttatgaacagaacctatgattgtggttagctttagtaggtgtcaatg

SEQ ID NO: 17656 - DNA, 243 bp, Glycine max
  Clone ID: PAT_MRT3847_115948C.1
aataccatcaatcctccttatgcaaatgggcctgcatatataatttctagtgatattgttactttcatcctatctcaacataaggatactaaaatggaagatgtgagcatgggaatgtgggttgagcgctataacaatactaatgacaacagtaaagtactacaaaatcaatttgcaagaaatagaatagaattttgtaccaatgtttccaaaaagagaggggataaaaaggaaatgagatga

SEQ ID NO: 17657 - DNA, 504 bp, Glycine max
  Clone ID: PAT_MRT3847_115949C.1
aaaacttaaatgtgacacattgtgtctgaaaaaaaaacctgccaatatccactgggggggaatattaatgagtgactaggcaaaagatttgggtgccatgaaacaagaccgggggtgaaaaacttgggaaaaggctgggggctagcaggattattaccaagaacacttgggattttgtaatattgctgcaaacctggaggggatgctttgggcaatgggtgttgtttgttggccttgggctggtgagggcaactggggtgcgggatcggtgaggggggccggaccgggtgaggggacaaggggggggggctggcggttggattggagaggggagattggggagttggggggggggggggtgggggggggggcatggggggtggggtggaggccaggggggggcggggtggggggggggcgggggcgggggggggagggggggggggccaggggggggggggggggcgcggcgtcgccgggggggggaggaggggggggggtggg

SEQ ID NO: 17658 - DNA, 1228 bp, Glycine max
  Clone ID: PAT_MRT3847_11594C.1
tattcaacctgtaagatccgcgagctaaaactcccacactccacagcttttcttgttttcctttcctcagatcagatcttcacgccgttatgcttagaacattagctagggtgttcaagcgagccacccttgccaatgacttgcttcaaaaacgcagcagattctatgcaaccacggttggtggaagaagtgacaggttagaaggaaaagtggcactcataactggatcagcaagtggactcggcaaggccacggcccatgagtttgtccagcatggagcccaagtaatcattgctgacaatgacaccaaactaggcccacaagttgcaaaagagttgggcccatcagcccactacacagagtgcgacgtcactgtggaggcccaagtggcggatgccgtgaacgttgccgtggcccactatggcaagctggacatcatgtacaacaatgcgggcatcccaggcccatcaattccaccaagcatagtagacctagaccttgatgagtttgatagagtcatgaggatcaacataaggggaatgattgctggtataaagcatgcggcccgggtcatgattccagtgggatcagggtccattctatgcacatctagcataagtggggttttgggtgggcttgggcctcatccttacacaatatcaaagtttacaataccaggggtagtgaaatctttggctagtgagctatgcaaagttgggattaggatcaattgcatatcaccagctccaattcctacacctatggttttggcacaaattggaaagttttatcctggtttaacccaagaacagatagtgggcattgtgaatgggtttggtgagctcaaaggtgctaagtgtgaggacattgatgtggcaaaggctgcattgtacttagcatcagatgaagcaaagtttatttcaggccaaaatctcattgtggatggagggttcaccagctttaaaaatcttacattcccttctccagatcaaactgcttaacctcaactgtttattgagtataatttctatgcattattgtcggtgtaaatcaaccaacgaggaatcatgttaggtatatgacaattataattggatgagtttaaaatttctttatattgtcagtatatagactattttctcttgttgatttatgtaatgtattatggttggtttaagagtatgttgaagtattttttttctttaacaaaatactgttcgatactatc

SEQ ID NO: 17659 - DNA, 555 bp, Glycine max
  Clone ID: PAT_MRT3847_115950C.1
gggaactgggaagtctataggaagaaagaatggtacaaggaaaaaataataggcttgtaaagtgtgaagaaaccaatgttaaaacagtggtatctttttgtggaatggtcaaggaagaaaggtttcaaatactattgtgtttttgaagcaaaaaaaaagcagcctcattcaaggaggggtggcggtcacctatcacaatagtgatgttatagcatgtgaaaaggcactcttttggctgctattgaaaactgctctgctgtagcacgctattgactacttagtaattttatctcttttctcccattttgttcacttgtactgaatactataattgaaatgcatgtctttcacactttgtcgttgtggctctatgtgctgccattttctttaaactgactcatagcatgcctgactgaagtatcccctgcatatgttaattcgttatcatagtgtttactaatgaggtacatagtaactcttatttaattcatagactctatttttaaaataatatactatcacaatatatttcatatctttttccatgtgtcaagg

SEQ ID NO: 17660 - DNA, 322 bp, Glycine max
  unsure (1)..(322): unsure at all n locations
  Clone ID: PAT_MRT3847_115951C.1
gtngcatgcacgcgtacgtaagctcggaattnggctcgagatcacagtgncatacgtgataatntancnnccnnnantntcnggnntccaatnanaatagtnantagataagggcatgagaatantatnatgctaatgccaaaanatggtggnagtagcggtaatgtccatgttgnggataggnaaaacatgtntttccgtcttgncgagngaagntttatgaggtgcttcagtgtaatanatganangcttgcnaagaacattgatantgctggatttcatggnggtagcncttcctgtatctgtactaaaaacagggtga

SEQ ID NO: 17661 - DNA, 1027 bp, Glycine max
  unsure (1)..(1027): unsure at all n locations
  Clone ID: PAT_MRT3847_115952C.1
cccacgcgtccggcaaaatcaaaaaaaacaaaaaccgtaacgaactcttccttccgccttccgagttccgagttgggcgactcagcaccgatggacgagtcgggttcagcctcctctccaacgcggccggtgacaatcgagggcggcgagtgcgacgcggcgttgtcgaagtcgcgggtgctgacgcgggaggaggtgctccggcggcggctccggcgagtgaggcagctggggcggtgctaccgggcccactactgggccctgatggaggagctgaggtcaaagtacagagactactgctggacctatggcaaaagccccttcaaggaggatcacgatgacaacaacaacaacaacgaccaaaacggcgtcgtttctggtggtgacgatatcgtccggtgtcgttttagcggttgcaagaccaaggccatggctttgacgaattactgtcatgcgcatatattgggcgattcaaaacagaagctttaccagggatgcaaagccgttgccaaaaatttgccaacaggaccttctttttgtaataagccagtattgaggtccatggttcctcctgcatgcccctctcattttcaatttggtgaaaggtgtttagctcgtgcattgagaagggcagggttagggactgctatcgccactactcgtaagcctaatgtgaagctacatgtaatagcttctgaatttgtccgccaaattcaaaataaacgaaagcttgcattgaagaaaactgctcccaaagttgagactgaacaagaaacaaaacttatctgctgattttagaatataatattgaattcctaaagattttgcagtatatagaatgaatattttcataatctgaaaaataggattatgatttaattgaagcattatttgatgccaaggaaaaaatacctcctacacatgcatgtttgttataattattttgtcactatcgcttttttagtcatattcaatgagcagcatcccaatatattcannnnnnnaanaaaaaaaaaaaaaaaaaaaa

SEQ ID NO: 17662 - DNA, 402 bp, Glycine max
  Clone ID: PAT_MRT3847_115953C.1
caaattgtgattttccctgaatcttatacaatctttggaaataaagtgacttggatgtaatcacatgtaaacattagaatgaagataaaatattgttctctccaactaaaaagctctactgttactattgtctgaatttatacatgagtgatgtaacatataaacattaaagatgaaaacaaaaatgttctcttcaaaccaaagtgctctaatccttgccagtattgtcagaagttattcgagaatgatgtgttaaatcttagcttgcttactgaaaatgggaacaccaaggatgacctgaagttacctacagatgagagtctgcttactcaggtttgtacaaaccaactgtttttgtgtgtcgcaattgcagcctggaagtttatgatcttggatacattg

SEQ ID NO: 17663 - DNA, 420 bp, Glycine max
  unsure (1)..(420): unsure at all n locations
  Clone ID: PAT_MRT3847_115954C.1
tccaaggaaggtttcccgtcatcactgtatgacgtcctccttctttgggggggggggggggggggggaagaaacaaaagaatgagaggaaagctaaataatcatgataaaaccaggaaaacgtgtgaggagcggacggtgtggcggagtggtaagtggcagggataaactaaacacgcaacagaataacacaatgataaaacaggaaaagtgttgcacttcaaggttactggatcgatctgcatagcgtcatcgtagaatgtggtgagacgcgtattgaaaggtaaggtatgccttcgtcggggataatcgtcgcatgcccaaaatttgcgctcggatttaatggaagtgttgcgtantatagtttttgggtcttactgctcgaagagtcaacacgtttctattcagtctttggtttaat

SEQ ID NO: 17664 - DNA, 418 bp, Glycine max
  Clone ID: PAT_MRT3847_115955C.1
gggctggcgaggaaggacgacagaagggatgaacttcaatagttcaactaccatttgatgaatgtgtccatgatcatatcataacttatatcacgcaggctttagagattattatcttttttttggttctcattggattccacaccaatgaggtaacacgtgatgaaacataatcatccattgtttggcacttgtcagatcacctcttgtaggctgcagattagaataattgacaagattccagtagcaatcaattgtctagcatcaatcttccaatcaacaataccagcaaatattacccggcatcatccatctccaataaaaattactgtgaccagtagctgtgcagattactacttcatgagtatcaatttaccaaagatcaacactaacctatgcaagagcaggagatcgagac

SEQ ID NO: 17665 - DNA, 149 bp, Glycine max
  Clone ID: PAT_MRT3847_115956C.1
taggatctttatggatattgtttctctagttcttgaggaaatggctgagcaaaatttaccattacttggttcacgagagaggctacatgattcaaacagttgatctcttttgaccgagaaaaagtctttattgaaacaatggtaatagc

SEQ ID NO: 17666 - DNA, 757 bp, Glycine max
  Clone ID: PAT_MRT3847_115957C.1
cacgcgtccgctaagggtgataatgatatagagaaggaaaaggttgttgtaaacgaaaatcatgacaagagtgtggaagatacagatgtcaacaaatccactcgttatggagaagaagctaaagctggagaaaacgttgaggtacctattgaagaggaaaaatccaatgctgctgatggagaactacctgcattaaaagataaagctgatgacaaagtaactgagggctctgaagtttttctgagaaaggatgaagaaaagattgagcaaccacaggaagagacaaaagaatatagtggatttggggagccagagaaattggaaacatgcactactgcagacaaaacggttgaagtggaaggagtgaataaagaggatcacgtcaaaagtactcatgaatttgaagttggggaaatagaaggaacaaaagtgaacggtgaagaacatcacaagcttgatgagataaacaaggccgaagcagagttgactgtgaatggcactcacgagagctgaactggtgaggtcaaaagcctggagcagggaatagattaataagctctccgcttccctcctctcattctgacccctttagatctgtttgaaatgactgtagtttttgttaatgttatttctctgattgtttattgaaataacaatatacaattatagagcatagccgtatcatgtaccacccttgggtgtattggacagacgtgtagcttctagttgcttttgtaacattatgttgtaagatgtg

SEQ ID NO: 17667 - DNA, 347 bp, Glycine max
  Clone ID: PAT_MRT3847_115958C.1
acgagggtgaaccgatgttgcttagggcgggtgaccatcttatgattgaagataagcaccgaaagtaagagaagtgaggcgttcggaacctattctagtagaggaaccaacccccagaaaacctgaccaaaagatagctacgttcccgtcactaaccttacttcggagtatgtggcggatccgctgagaaaagacgggaaggcaaacagaaagtaccacttttattatcttaagttaagatgaatctattgaagagtcaaggtttccaatgagcacggatgaggcgaagcatcgatccctaacaagcgaggtaagcgcccggatacaaaggaatcttagtctatgtc

SEQ ID NO: 17668 - DNA, 421 bp, Glycine max
  Clone ID: PAT_MRT3847_115959C.1
ggaagactcaatcagtggagctagagtgctactctcagtggaagtcatctcgcgccagtatcaagaccactacagtatgcgattccttcaccaagtttagatgccttaatttctggtacgtcatcgtgtcagaaatacgccttgtcagaaagctgaagcaaggcatcaagagacggtacatgatgttgcaatggattactatggcaagaggatggccacgggttcatcagagcacacactttagataacaggcgtgagtaatacggcctctcagtattttacaacattgacaggtcatcaatgaccatgacggcaagtggcagctggctcaccctaatgttggttctctacttgcatcacgacactatgatggacgtgccaatgctcgacatgagggcaaacaaggactatggactccagc

SEQ ID NO: 17669 - DNA, 247 bp, Glycine max
  Clone ID: PAT_MRT3847_11595C.1
ctccaccgttttctccctcctcgccatggatgggagcggcgtagccctaattgcgctcctccttcggtccgagggtcttgaacactaccgttgcgaccgcaatacctacatgggcatgtacctcatcaacatggccaagatgctcaagtgcgccggctattacgactttatatccataatggcctacgactggagcgacaccgtctgtttttagttagaaagccctacacaagtaaagatttctgaa

SEQ ID NO: 17670 - DNA, 153 bp, Glycine max
  Clone ID: PAT_MRT3847_115960C.1
gaaactacagaagggtgatagagggacaggtcatcgcgtccaccgccttttagtagaagcggcaactccagaatgcaaaagactccaaaaaactgattgtggtggattttactgcttcctggtgtggtccatgccgtgttatggccttttttt

SEQ ID NO: 17671 - DNA, 678 bp, Glycine max
  Clone ID: PAT_MRT3847_115961C.1
acggctgcgagaagacaacagaaggggactgcacaggtgagggaccaaaccaactacctcctcagcccccagtcctcttctctcctatttcccatattttatttgccaatcacacactaacccctaagagagagagacacagatactctctgaacactaataaagagagagagagagaggctggtacttcccaaaagaaaagctcaacctccctcgtagtagctttcatttgaagaaactacataactctctctacacctttttttaccttattgttctctctctctcttcttcccttttatttacattgcttattcttcttcttgttgctcactaactaacaccaacttcacaagaaaagacttaaccatggattttgacctcgaaaaccctcttggaaacttccacgaccttccttgtgacgctgtcccttccctcttcctcatcgaatccgaccacatccctccacccaactactgtcagagtttcaaggccagcgacttcgacatctctgtaagaagagacgttgtctctttgatctcgcaggtaattcagcaacaccaaccacaattcacttttttctgagaaagacaattttgttgtctcaaaatcttgtcttttttgtctttcgtggcttgcttgtttcgtttctcttcagttgtcctgcaccttcgatcc

SEQ ID NO: 17672 - DNA, 295 bp, Glycine max
  unsure (1)..(295): unsure at all n locations
  Clone ID: PAT_MRT3847_115962C.1
tttaattttctattttattctattacactcaaccagagagnngaagcagcaganaacagtgagaagaagagcttggtgttaccgttgctgttgcgtgacgtgccccttatcttgttggcaccaaaggccgaaactttgaagataacaagagagcaatggctatttgtgtttctgggtcgcacacacttttcgtgaaccgttccaatttgaagactgtggcggttctgagcagagagaagaagatgcgtgtgcaatacgatctgaagcaagggcagagtcgtatttccacgagctc

SEQ ID NO: 17673 - DNA, 446 bp, Glycine max
  Clone ID: PAT_MRT3847_115963C.1
cccacgcgtccggtggttcacacttcacacggagaacggagtcggaggatccgttttcgcgggccggcaaccccaccgagtaacaaacgaagaatctctaccctcttcgctttcacttctcgccaagtttagttaagcaaccagacaatgaagcacactgacaatggagctttcaactcggaacacaaagttcttcttcaccaatccattgcccgttacttgaaacacagtggcttctacaaaaccctaaaaaagtttcgctctgaagcgcaattcgagaaaaatgatttgaagggatccccagttgatctggaagaaatgtgcctcaagtattttgaaatatgtggcaaagatgccaagtcaaatcttaatgatcagaatgagcaaggtgtcaacagcaaaaacaaagaagagggtaaatccaaggaaaagaaaaaaagaatagc

SEQ ID NO: 17674 - DNA, 848 bp, Glycine max
  Clone ID: PAT_MRT3847_115964C.1
cccacgcgtccggttgataaaaccctaattgaacccttcttctaaagttgtgtggcaggtgcagcgcggtggttcacacttcacacggagaacggagtcggaggatccgttttcgcatgcctgcaaccccaccgagtaacaaaggaagaatctctaccctcttcgctttcacttctcgccaagtttagttaagcaaccagacaatgaagcacactgacaatggagctttcaactcggaacacaaagttcttcttcaccaatccattgcccgttacttgaaacacagtggcttctccaaaaccctaaaaaagtttcgctctgaagcgcaattcgagaaaaatgatttgaagggatccccagttgatctggaagaaatgtgcctcaagtattttgaaatatgaacgatgaacaccaatcgtgttgttgctgtcgatgcagtttctctccggagtccatcttgtcggaaaccgacgacgcaacagccgcgacattggcaaagatgccaagtcaaatcttaatgatcagaatgagcaagttgcaggtgtcaacagcaaaaacaaagaagagggtaaatccaaggaaaagaagaaaaagaaaagcaagttagtttctgaatctcttgccactaatgtggaagatgatcaattagagtcagtagctactgctaaagaaaataaagaaaaggatgatgtttctacagatgccaaagttattaatggttctgagacagagaaaaaatccaagtctaaaatgaaaaagaaggacaatcgaagtgatgaaggtgatgcaatagagcagattggagatcccaatgaaactgtttcaaaggaagagaatattgaagccaa

SEQ ID NO: 17675 - DNA, 323 bp, Glycine max
  Clone ID: PAT_MRT3847_115965C.1
atctaatacacgccttgcacacctacgtaatctcctacatatctactatagcttaccgtttgctccccaatgaaacaatcatgatctttgttttcttatcagctagcaaatatctctagcgaatacctagcttttacaactgatacacctgcttcctcaattccacttgagcccactaacatcatcactgctccacatcttgctctgacaaaatccttttcctattgtcttcattcacaaagtctttatttaatcttcttatgtttatccataatcattcttcacaacttttttattctaacaaaatatttttcacccaatct

SEQ ID NO: 17676 - DNA, 556 bp, Glycine max
  unsure (1)..(556): unsure at all n locations
  Clone ID: PAT_MRT3847_115966C.1
ggatgcggacccgcggaccggccggattccggtcgccccgctcgaccttatttttattggntcatcctcacccaagtggctattgatggtctgaaaacagaagagccctccctaaaagtggtaaaacggttggcatcacgctcagagaaatgacttcgttcagacttcaccaattgataggctgatatgagatccttggacaggaatcagctgaaaactagcttccaaggattttttttacagctcagctactttcactggcttctcatttatcaggagcataacctatgagagctatcttgacagcccaagtacaattctggttgctatagaataagagacccctccagctagcagatggacaggtctaagactcggctacagctatttagagcactttgaatcagagagcagaactatgggcctgataatagttttatgaactgaaggagatgagcaacttataagacacattgggataaaatttgaatattgaccagtttcacctggttaacaggatgatggagaaaggccaataggggacacaaggaggacc

SEQ ID NO: 17677 - DNA, 320 bp, Glycine max
  unsure (1)..(320): unsure at all n locations
  Clone ID: PAT_MRT3847_115967C.1
agccagagttgagcttatccacaaagaaacatcagaggttccgtcgcatgagcatctttcgtaattttcttcactgctatttaccattgccacactctcattctcgatggcggcgaagatttcattggcaattggctctgagaactctcttcactgttttgggactggtgatgcttgctgtctttctttacactgccttcaccgatggtctaggagtcaaactctctggtagaactaaccacagcggggggggcttacactttacatttgtccatananaacctntgaattctttcctgaatcatgacccctcttccgtg

SEQ ID NO: 17678 - DNA, 163 bp, Glycine max
  Clone ID: PAT_MRT3847_115968C.1
gctagagatagttagcgacagatagacactgcttgatgcccttgactgcacttttccgtatatccttgagatgcatggtgtctcattcgtcgacgccttctcatttaaggccgctgcacagctctcctcagcgggagtccttgttctacttagtaccccgaag

SEQ ID NO: 17679 - DNA, 1035 bp, Glycine max
  unsure (1)..(1035): unsure at all n locations
  Clone ID: PAT_MRT3847_115969C.1
acgagggttttaagagagagagagaataattaaaaggcccttgccttcacctttggtgtccaagatattgctagagagaagaactagttgttcaattagcttcatccatctttctacctccttaattctctttcccttcttcttcttccacccttcttgtgtttgagtacagaagcttgagatcagacatgtcgagctgcagcatcgatgttgcgcctgagcaactctgctacatcccctgcaacttttgcaatattgttcttgcggtgagtgttccatgcagtagcctgtttgacattgtgaccgttcgatgtgggcactgcaccaatctatggtccgtgaacatggccgccgcgtttcagtcactgtcatggcaagatgttcagggacctgggcagtgcaatccagagtacaggattgacactggctccacgtcgaaatgcaacaataggattgcaatgcgtgcacccaccactcatgtaactgaggaaagggttgtgaacaggcctcccgagaagaggcagcgcgtaccttctgcttataaccaggttataaaggaggagattcagaagatcactgctatcagtcctggtgtcgctttcagtacagctgcaaagacctgggcacattttccccatattcatttcgggctgatgttggagagcaacaaccaagttaagatggagaatgtttctgagaagcatttaatgtcaagggctgcgctattgaataaatgaatgctatcttcatcatatcacaggacttgggtttcatttgaatctgtcaagtaaacaatgtcctgacctaaaaggagttttaaggacaatcatctctttttcttcgttagtgtacttgtcactacttactacttgttcaatggatgcttttcacttaatttgaagcaagaatgctagttttcccttgtcatctttcaataagttctatcttctagctgattcagatgaaagatgaaatatgtatgctactgttttaagctcgatggcgagaacnnntatcatcatatttttnngnnat

SEQ ID NO: 17680 - DNA, 266 bp, Glycine max
  Clone ID: PAT_MRT3847_11596C.1
atattgattattttcattttttaaaaaatattttccaaatttctattctattacatttttcatcccatcatctttaacattacactatttgataatgccaactacattaacaactcatcaaacaagaacaaaatactatggtcacaaaacaaaaaactttcaccaacctaaaacccatatacttaaaagcaccttgttctccaccacattaatgcaaaccttactttatcaaaacaaccaccctattttataaaaaaacaccccat

SEQ ID NO: 17681 - DNA, 486 bp, Glycine max
  Clone ID: PAT_MRT3847_115970C.1
acctgtccatgtttcatgtaccaggtgagccaagagtcagctacccctattggttggattgatattattgttcctggaaatcaaataccaagatggttcaacaatcgatgtgttggtaattcaataagcctagacccgtctcccattatgcttgacaataactggattggcattgcttgcagcgtggtatttgtggtatttgatgatccaactagtttggataatgattggaaatcctctataagcattggttttgagacaaaatcttattcatcccggggttcaccgctctatattccaatacttcttgataggaatcttgtaacggctaaattgcatcacttgtggttactctatttgactaggggagaatttttttcctattttaaaatagaaaaaatgcttgatctttatggcatcaaaatgcatgccatggtcgacaactctcaaggtttgcacttggaggtgttgcagtgtggatatcag

SEQ ID NO: 17682 - DNA, 287 bp, Glycine max
  Clone ID: PAT_MRT3847_115971C.1
tccggggtcgacccacgcgtccgcggaagcctgggctggtgttgggagttaacatatactcatgttgcagtggtggcccctgttgggaatgggccaataacaactattgaaaaatcagttctcgcatgactctcctcttgctgatcaatccatacactatcggagtgtcgagaagaggactatggcatatgagtctcttatcaaagtcagagaggccagggtacatgcatcggaagcttgtgctctctctgttgctgcagtgaatcagagcctagaggtatctaatc

SEQ ID NO: 17683 - DNA, 249 bp, Glycine max
  unsure (1)..(249): unsure at all n locations
  Clone ID: PAT_MRT3847_115972C.1
agntgggaggagcaagcttgatttgacccaagctnttgagtaccaaagtaggaggctaatgggtctacaanttnttgacatcaagaagcatcaccagcgtggcantttncgccggaagnccaattccttnncncacccattntnntaacatgttnaaccaaaatnttgttccttnttttnanatnanttnagaggncccaaaggagagtggttcaagttntgctncagctagtattgcatnagtttntg

SEQ ID NO: 17684 - DNA, 491 bp, Glycine max
  Clone ID: PAT_MRT3847_115973C.1
tacggctgcgagaagacgacagaagagtacggtgtttatcttaattgtagtggaatttaatctctttgaaagaagctatccataagtagtttgctggctttcttgaccaatgactataatttggttttgctgtatttagttgcaattgaatttacaaatattgcttagtgtgctctgagtgcatgttttacctggagagatcaatttgggtaaatgatactatatttttcaaaagctttctcatgatgttgacaaaaaagcaattattttttttaaaaaagcttaattgaaatatgctctataaccatttgttgtattgacatcattgcactcaattggttattcatgtagatattgggatagatttgtattgagatgatctagcccaaccccaccatatatttttactagtcaaattccataattgtcaattttctcaaggatttctctgtagaatgtgtgcactgtctgattaataaaattctggttgg

SEQ ID NO: 17685 - DNA, 453 bp, Glycine max
  Clone ID: PAT_MRT3847_115974C.1
cttagacattgtgttgctggagagcataaacttcttactgatggaaagttgtgtgagggtaagcatattcctgtatctaatatttgtgctggagaaaattatgtgggttaaatacccctaatggaccacgaggaaattgtggcttctagtgcaagtgattttagaactgcaatggtgagttaaaatggcaagccttaagctactgcaatgcatgagtgagctatagaaattatcattgattgttttgcaagtcctgactgcaacatatttggtgcaatgctctgggttgatacttatgataccaatcctgaaaatgcatgtccgagttttttctgtgcgcctttcagaagtggaaggcccatacgggtggatacatttccgaataccattgtgcaaattgatccagacgtgagttcaaggggtgagcttttgagtgccactaccaatggtgat

SEQ ID NO: 17686 - DNA, 371 bp, Glycine max
  Clone ID: PAT_MRT3847_115975C.1
tatttttaacaacccattaacaatcaatcggtaacatataatatctatccattaatcaaccttactttcaaacatcactacaattttataaacatatattaaacaccattctttaaaaacataattttacacttctcaataaaatctatttcaaaacttaaatcaaattctaactcctattacaacacaaccaaaatctaatacttccaatcattatcaacacttctttaaaaattcataactcaaacccatcacttaacatataatcaaataacaattatcaaaattgtcctcaaacaacacaacaataatccaaccaccacttacttaataatacttttaaaacttatattatacactgaattcaaaaa

SEQ ID NO: 17687 - DNA, 353 bp, Glycine max
  Clone ID: PAT_MRT3847_115976C.1
tcctatcaagactgtgttcccagaacttattgaggattacatcctcaaaatacttctgggttaaatacggggatggaggaaactgcctttctcccagggcactccccgatatgttaatcagaatgactcttcctataaggggaggagccggtgcactgaatgctattgtcatgaataggccaaatgctggcctttaaatggggagaccctctcgtagcataccttttctttgacattattaagaccacttccctctactgaaatgatcagtctccttcattgtagcatcgagaaattccacttacgaccccataaatgctgaggcttgtccccacaagctggaaccacttgga

SEQ ID NO: 17688 - DNA, 345 bp, Glycine max
  Clone ID: PAT_MRT3847_115977C.1
gcctttgttttttatttttttgtttttttttttttttttttttgttttttgttatgggggttttttttgtgtttacacattgacacaacttatctgatgttgctaaaataggttcctcacaaccatggagcacacaggcccaaaaatctttgaaaaaacttgaaatggtaaaggagtctataacaaattcatcactactgttatgggacccaaaaaggggataagaatggactaaaggaggccgaacgcgaatcccctaaaaaaattgccgccggtgcccaatcttgaggaacgacggaggccaccgggacaaggggtttagccctgaaaacaaaaaagatgaaa

SEQ ID NO: 17689 - DNA, 198 bp, Glycine max
  Clone ID: PAT_MRT3847_115978C.1
aaagaagaaagtaaagggttggccgcatttgaaggagagaagggaagggaaataaatgggaaaattggcaatgatgttgttggaagaaagagtgataagaaggccaagcctgactcaacaacaagggcaacaattaaggaagtggttgcttcagcttctcaagctatgactagtctagcaaagaagttcaatgatgaa

SEQ ID NO: 17690 - DNA, 332 bp, Glycine max
  Clone ID: PAT_MRT3847_115979C.1
ggaacttgatagtatcgatgaggaatcaatgtttcttacgctaattgaaggtgttcttgcagcaaatatcattgacgggggatctctttcatgtattgatctctatcatacaggaactattatctgaacttatagaatgaactcgcattacaatgctgaagaccttaacagaataaattatcttgctcagtttatagagaaaccgcataagctctgttttaaaacagcttcactttttgtatactacccacaagcatacacttggctagatacccacacactggccacctaagatctaacgattttaaccctaaactagattcaacattttt

SEQ ID NO: 17691 - DNA, 439 bp, Glycine max
  unsure (1)..(439): unsure at all n locations
  Clone ID: PAT_MRT3847_11597C.1
gtgttctttgatgaactctatgcatgttttgtagggattggattttgtaattgcagaagcaggaaaaaatggggtacgactgatactaagtctagtaaataactggaatgattatggtggaaagagtcagtatgttcaatgggcaagagaacgtggtcaatatgtaaacaacgacgatgacttcttctcacaccccattgttaaggaatactacaaaaatcacgtcaaggtaaaaattaattatatgagttgagaatatttaattataactattagattaaaattaattatttacattacgtatttaattataaaatttacatgttttttccttaaagattacatgagatctgtaattaaatacgtaatatcaattgttaattaatataataattgtgattgaatgtttntatttacataataaccaaaaactctgaac

SEQ ID NO: 17692 - DNA, 249 bp, Glycine max
  Clone ID: PAT_MRT3847_115980C.1
caggctgatgcttctgaccagcctccatcgcaatcccctgggcatttggacaggggcagaaagcctgtcagaataaacgttgcaagtattgtttcagtgtcagcatgtgccgatttaactttaccaagtggtgctggcctctgtatagacactattcatggtcctacgttcttggttgcccatagttgggaggctcttgacggctggctagatgccatacgccttgtctacactatttttgcgagaggg

SEQ ID NO: 17693 - DNA, 595 bp, Glycine max
  Clone ID: PAT_MRT3847_115981C.1
ccacgcgtccgtttgaattcaatcgacccgccgctctttctctctctaaattcgcaatgagcaaaagagctaataagaggaaagcgaagcaagacgaacagcccaaacaacgcaagaagcgatccacaacaattaaacctgccgagcacgaagagtacttcgaggatcagcgcaacttggaagacttatggagggaaacattccctgtcggaacagagtgggatcaattggattctgtgtatcaatacaagtggaatttctctaacctggaaaatgcgtttgaagagggtggtgtacttcatgggaaaagggtttatctctttggttgcaccgagcctcaactggtctggttcaaagatgaaagcaaagttgtctgcatacctgttgttgtagctgttgtatcacctttcccaccgtctgataaaattgggattaactcagttcagagagagttcgaagagataattcccatgaaacaaatgaaaatggactggattccatatatcccccttgaggaccgagaaagccgagttgatagattaaagtctcaaatatttatcttaaggtgcacccaaagaaaggctgcattgaaaca

SEQ ID NO: 17694 - DNA, 397 bp, Glycine max
  Clone ID: PAT_MRT3847_115983C.1
aggatgttcaatatctgccactaggataaaaagataaaatgtagttcttttctttttacccagatagatgtcttgtgggatggagcagtggaaacctgcagtgcatcattttttcattgattatttttgtgttgggaattaatttgacactgtttcaaactctaatttttgctgcacttggtcaatttttgtgtaaaatgtcaaaagaggaagtaataattttaggttgcaaggatgtaggataaactggattgtctcttcctaccaaatttttatggttttatcacttattggattttttccttttttgccctgtgactaactgtctgtttttaatgtgttgcccagaatgtaaggggttcaaaaagcaattaacaatttcatgatttgggtggtg

SEQ ID NO: 17695 - DNA, 166 bp, Glycine max
  Clone ID: PAT_MRT3847_115984C.1
tctactctcgaagaagaccgtgaagaagagggcgaatatgttcaagaggcctcatagtgacaggcctatttctgtcgagacaaactggcgcttaccaaagggtttcgaatcccgtgttaggagactgctcaagtgatgcactttgaagccaagcattgattatggt

SEQ ID NO: 17696 - DNA, 391 bp, Glycine max
  Clone ID: PAT_MRT3847_115985C.1
ggttaaaaaaaaaacaattttcattgctcccctgatttatgaataagcgtattttatttcccggggaagggaaaaacaaaatacctgctccaggcccccaaaaacagtattgggttgtattatctgcactggggcgaatcgggggaatggataaaagaaaaaaaatctaaaaatttggatgggtaaaagaattttttggccggacgcccgggattcaactgaagaggcccagggggggccaagggtctttttttccatagaataaactttttccgggggtgcccattaagaataaacgcccttggggcccccccaacggtaagaggggccaagaaaggggttatggtttccttctttggatcgctctccgatttattatcataatacgaat

SEQ ID NO: 17697 - DNA, 568 bp, Glycine max
  unsure (1)..(568): unsure at all n locations
  Clone ID: PAT_MRT3847_115986C.1
actattcgtcctcacagctgcaggagacaatcgagcggaagaccagaatgagaaaatccaagcatgacagtcaacatgaacagtgcgaaccgagcagacaccccacaagaccgggttcgactggatgcaagagaaagagcagtgaaggtcatccccaggcgncgcaagcaaggggaaccagagctgatccagaggacatcccacaactggggctggacaagtgctcaaaaaggttatgtgagaacaatgaatagtcggcgattgaaaagcctccgatacaaacccgaaaaaacaccaaacggcatacacccggagtcccctggtaggatagaggaccgagaaatacctgtaataggtaaccagtggtgccaagctgtggagagaatatacgaaaaggaagttggtgaggccatgcatctatttaccatgagtgtgcttcagatatgggaacaagagaagctagaaaagcacaagcaggtgaagaagaacaaggatcttgagagaaaagagagaaatatggatagagatgaccagaagctgcagaagcaaattcaagcattagagcgaa

SEQ ID NO: 17698 - DNA, 483 bp, Glycine max
  Clone ID: PAT_MRT3847_115987C.1
gctgaaagcaatttttgcgtgccgccttaaactattgatgcaacatgtaccaatcaaggaaagtatggttagtctacaacgctaaaaacgcacctatgaacctgattttcaataaagctagacaaaaataatggacctatcttccataagatatggtacatacccatcctaccctattataaatcctagtaatgaaaagaaaaccacctgctttccccataagcttcccaaacacctattggaacaaacggattatagacccattatttggtattcttcacaggaaactgatcattgttgaaaggaaaactatgtatctcatacttccttggactctggacaaacccagagtgaacattgtgcaactacaacctaaacagcatggggacacttgaaccggaccttgatgccatctgtgaaaccctgtcctcttgtagatcctacctttaaccttacggttctccaactagaaccacacctatc

SEQ ID NO: 17699 - DNA, 393 bp, Glycine max
  Clone ID: PAT_MRT3847_115988C.1
ggaccatattcgattgctaggaatggaattaacatcccacttgaagggatgggctttaatgtaaaaaccattaattccacttttaccagcttccttttcttcacaagcttgcaagtttaaaattatttaagaaccttgaaactagaactaaaaacttttaatatttcaccatggcaaaaatttacctactttatgaccgattaatctggcggccccattaatagcccccaatgattgaaatttattattcaaggattcaatgcttaaaaagggtttggtgaatgaaccagtcccaccttttcaaggccaagttcttaattccctaatttattccacctggttccaaaatctaacttaacttgttttgaagaagccctaatcttccgtttggta

SEQ ID NO: 17700 - DNA, 732 bp, Glycine max
  Clone ID: PAT_MRT3847_115989C.1
atggaaactcttcatccatcatctccctcctcacacttgaaactgaaaacaaatatccatgtagaagtcgcagattctaacagaggagcgtgcgttgatgaaaatgatgactccctgcaaggttctctatggcccgagccacactcctccatcacggttatacccaccacgacgaccactgaaaccatagagagccttgacctgccttttgcaagcatcaacaacatccatagtgaagatgccactgattctcttgatgtcgggtttcgtgatgccctgcatgttgtcgagcaacactatcatgtgtcccttggctcctccctttcccaaacccttgcctcacttccacaaccaccatatccactagcgtcacccttaccaccatatccaccgccaccacgattgtatccattgaagccacaacctccaccaccaccacggctgacgcaagtctgcgcttcattgacagtggtgttcgattgtcaaggtcttagccgtgtagttcgtcattcacaactctcactccctcttgttgcttcttcttcttctgaccatgtagcaacaacatcatctcttcaatttggtgagttccattcgtggcctgcacccattggagcagaagttagagttgctagtgattccaagaaccatagccaagcaaagaaaaggcacagggacatgatcaatgctttgcgacactccacccaatcctctcacctttcacgacgttga

SEQ ID NO: 17701 - DNA, 493 bp, Glycine max
  Clone ID: PAT_MRT3847_11598C.1
cctgaaccgattctctgaagtaggtttttcttcttcaaatctgttatcttttttctttcagatgttggttttgttttcttcaaatctgggtttttgtatatatgggttttgaagatctgctcttcaaaggtgttgtgcctcaacaaaggcagcagaaaccgtaagaaaattcatagatctgagattttgtgacagagaggtgatggacattcatagattcaagtttttttctttacagatttgggttttattggccagaatttctttattgttgcagtgaaattttctttttctgctggtttaagttgattatggatgttgtattttaattgaaatggagataatagaaaaatttgcaatcgggtggaatttccccttgttcatcgatcggctttatagcattgttaatttcttcattttctacaagtgttgtattcaatttgggaaccatgtgaaaggttttgtgtacaagcataaattaatgtcttttgat

SEQ ID NO: 17702 - DNA, 199 bp, Glycine max
  Clone ID: PAT_MRT3847_115990C.1
cccacgcgtccggatggtgtcattcttttattattacttgacttctgtaataagtgttccggggtcaaacccattgtggtgatttctaggttcgatactagatatctgtggaattgtgtatttgctgttgaagattgtctctgcctttttatgaaatgactaataatgagagattactaattttaattaataatctatt

SEQ ID NO: 17703 - DNA, 874 bp, Glycine max
  Clone ID: PAT_MRT3847_115991C.1
gacgaaacttacatgcactttcttaagtgcacttctctgataattggaggtttatggcctataaagattattgaaatgaaattggtctgagaagaactctaaaattatgttatctattggtaacactgggatgttaatttccccggcagcaacatttttgcgtttcctttgagaagtgagcattggtgatagtagtctcaatcagttgaatctcttgtgtctatctcaagataatttgctagagctgcaataacttgtatagtgaaaacagtatatgtcttggtagagctgcaataatttgtatcctttccagacgttgggacattgattataaaactctccctgtatatgttttttttttttacctctgaatctgattcattctaaaacaaaagtgtttctattttttattatgcatggtcactgatactaacatccaacacttggtgccctaagttcttatttgccaaatgcttcatggcacaataggaaaatccaaaaagaatataattttttgaggtttcggtggccaagtttgaaccaccattacaaaagcattgaaggagggtgtacatgtaaaaaatgtaatataaaattttgtcgggaaagcgacctctgaaaaatcttttgagtctgaacctcaagcttttgatccaaaaagcattttggactctgtcaagaattccttggatgctttctacaggttttccagacctcacacagttattggcacagcattaagcataatttctgtgcgacgaaccctcattgttgagaaatatcagtatctcattattttttactggtgagctgtgggctgctgtttgaatatttatattgttgggacgaatcacttttctagatgaagaaatat

SEQ ID NO: 17704 - DNA, 484 bp, Glycine max
  Clone ID: PAT_MRT3847_115992C.1
gttcaaaaaaattgaaaaaggatttttttttgttcattagggaaacccagcaaaaggtgataaaaaaaaccaaagttctacagatatcacactcaagtatacattggggcacccactttctcaggggtatcaacgatccaacacattttttaaaaagcttccctcaaggggggaaaaattacaaaactctgtcaagacttgaatgaaagatctgccgatgtacatgaccgaaagggatgaatttcaaagcttgctttaccaaccctttttacaccttaaagaacatgattcacgaaactattccctgattaaaaagggtttcaatggccaacaaaattttttttttatttgttcccaaacctaataatactcactccccgaaggaaaagtaatcatgaaggttcttcctgcagccaaaacattgggatttcctgggggttgaaaaataggctgtcctcttaatcaaccaacacaagatttaaaa

SEQ ID NO: 17705 - DNA, 164 bp, Glycine max
  unsure (1)..(164): unsure at all n locations
  Clone ID: PAT_MRT3847_115993C.1
aaccgctgttcggccaggcccatgaagtcaccttcggctatcacatcgatgactacctgctgaagcaggacagctaccaggtcagcgactggcagaacggcaatggcggagcgaagagcgcggcctccggnncggcgagaacccgcnacccaggncaacctggt

SEQ ID NO: 17706 - DNA, 255 bp, Glycine max
  Clone ID: PAT_MRT3847_115994C.1
gagaaccacccccattaaaaggattcttttatgggacctttattaccaaaattaattaccaggatcccctgccagagggggtcacctgaacctggacacattcctatacccctaaattgggggggaccaatggaacaaaaatttccatgcctgccaagaggaaggggggggggaaaaaaattgggggaaaattaaccccggggaaacccccctttcgagtacacattccacttcattccccaaaaacaaaaaggt

SEQ ID NO: 17707 - DNA, 328 bp, Glycine max
  Clone ID: PAT_MRT3847_115995C.1
caagcccccaatgttgtaatcaacgaagcagtgtcagggctctctctctgggttttgggagacatcgaactaccgtgtcggagagggagcttttgcgttgcgtggccaccaccacctcgaaccaacaacaacaacaactcacttcctcttcgaaacttcttcattccccattattccattccaaaaatcatgctcctcttcttcagggtttagatttttaaccccccccccccctttctatacccatggccaatccctggcaacggaccagacacctgaaagaatattctagaagccccccttacgtgtggttcaaatggcgtgaact

SEQ ID NO: 17708 - DNA, 421 bp, Glycine max
  Clone ID: PAT_MRT3847_115996C.1
gctgctagttgctagtggtggttggggcagctactgatgttggttctatgtgatgtggtgatggccctctgggttgctgggtgtatgactttatgtggattgtgctgagggataattgatgaaggctggatgttggggaggtgatcaatgggtatcgagtaatgttgaggtggagtagaagctgctcagtaaggcacggtgctggttgccagccgtggtggttatcttgattatgatgtgtccataacgatggacgtgtgaggagaatggtaggtataggcgaattgagtatgttgaggcaaagtctcatttactcaggatcaagcttcactcacgtcggcgacatcctgctccctgatctatgattcttgacgtgacacagaatccagacttgatcacaatttgacatagcgattatgag

SEQ ID NO: 17709 - DNA, 146 bp, Glycine max
  Clone ID: PAT_MRT3847_115997C.1
tttgttgaagaacatttaatcctttattgatattctaaagtgacatttttccacaaattaaaactcccaaatagataaatcgaggagggaataaaaaataaccttatcttgatacatgttgtacaaatgaactcacatatgagtta

SEQ ID NO: 17710 - DNA, 379 bp, Glycine max
  Clone ID: PAT_MRT3847_115998C.1
agcatgaaaaacgacttattgatgcaaggcgtaaaacttgtactggatatgggctaaactgggacaacggcatacaaattcagttcaacttccacactataagaaaactggataaaaccgagaattatgaatggtgaaaggatcacggagaaacctgcaacgacaaggctatggatcataggatctcgagctacaaataggcctctactgacatctaccataatagagttctcttcgataataagaacaacttccacgactgccttatgccttcctgcatggacataaacagatggctatattactcataacgacaggactgtatccgacgcttgatacattcacaacgatgtatctttcataatctcgaacattactg

SEQ ID NO: 17711 - DNA, 458 bp, Glycine max
  Clone ID: PAT_MRT3847_115999C.1
atttgacaggcctatcaacgtatacttgaatgagaaacaatggcagaggccagcatacggcgagcaaatgcatgagacggtctataccgggcacagacagctctcgacgacagtggctacatacgaataccatatgcaaacgggtaggagttgctacagtttggatccactgtgcacacttgcgttctctacgaatctgaactcatggaatccacaagtgaatagaactcagataggttcagcataacgggctaattgtgtgacatgacgtctagggcatagatactggaccggatggctagagcttacaatgaatggaatggctaactcaacatccttggaggcccctttatgatcaaacgtaccgagacatacccttgacgatacaggagaagactcgtcattggttatcaaaccgactcttgaatgtgcttaccatataaggcagcttgtacagt

SEQ ID NO: 17712 - DNA, 203 bp, Glycine max
  Clone ID: PAT_MRT3847_11599C.1
ggagaccacagaagtgtaaattatattattacattaagaaaggtaacttacaggatccccacagccagctacaaacacgagtcatgtacatatataccctgattatctttttggggtacttttttttttttttcaataactaccctatcccggggaaagacagactgccctcttaattctaagaaaaaaaaaaaagaaaattc

SEQ ID NO: 17713 - DNA, 103 bp, Glycine max
  Clone ID: PAT_MRT3847_1159C.1
gtgcgttagtatacgcgtacgtgcatacgtgcgcatatctgtatgtgacgctactgctatgcgtctacgtatgtgctcgcgtcgtgtgcgtcgtgtgtatgta

SEQ ID NO: 17714 - DNA, 364 bp, Glycine max
  unsure (1)..(364): unsure at all n locations
  Clone ID: PAT_MRT3847_115C.1
tggtttttctagagcggccgctttggggtttttttttttttttttttttttgccgaagggggggttctgtgctcgacccnctcgccccagggcacgcttctttggagcggtgtggggaaggacgccgcggctcatcctggtgcgcctcagagggatttatctcagccctgaaatgtctcccggggggggggagttatttccttccacctttcgtgcagcgggttcgtgncggggcgcggccgggctgttttctttcgcgctgcgttgctgacccacggaggcctgttcccctcacaggctggatgggctctggggccccaatggtgcctttcccggggcggggggggtgcgttggctcgtggcc

SEQ ID NO: 17715 - DNA, 280 bp, Glycine max
  Clone ID: PAT_MRT3847_116000C.1
tggcacaatgatgaatgaagcaacttctggtttgaatcatctaatctgatacaggtaaagcatgccgaaaaaacgacaaaaagggtaaaaaaaaaaacgggcggcccaaaaggttcaaggctaacctagacgttcaaggaatacctaagccctcctgcatggtcaccgaacttcaattaaggggccttcgtttaaaaacttcgtaacgggaaaaaccctccggtactgcaaataacctcccttgaacaaaatcccccttttgcaacaggactcactttca

SEQ ID NO: 17716 - DNA, 1504 bp, Glycine max
  unsure (1)..(1504): unsure at all n locations
  Clone ID: PAT_MRT3847_116001C.1
cccatgcgtccgtacggctgcgagaagacgacaggggggggttgcacaccacccacgcatacgttcgttgattcatgttctgttctgttccttttctaaacccaacacaacatcgtgtccttttcttctcttcgatccactacgtgcctgatcctctgcttcaggcacatactcccgcaggttaaatggcgaggatcaaacctcaggctctgctacagcaaagcaaaaggaagaagggtccttctcggataagtgccgtgactgttatattttactttttgattcttgccttggttgggtttttcctgtttgcttcgtacagacattggtccagcagatcaagattacaatccgaagatcacttgtcagtctccgagggtgaaaatacttttgtggactccaagaaatctgagctgcctggatatgctgttttaaatacctctaaaggttctataataatagaactgtacaaggaaagtgctcctgaagttgttgatgaattcattgacttatgtcaaaaaggacacttcaaggggatgctttttcacaaagtaattaagcactatgtgattcaggcaggggataaccaaggatctggagctactgaagattggaacttgagaggaaagcaacatacaattactagtatgaaacatgaagcattcatgcttggaacttccaagggcaaacacaacaacaaaggatttgatcttttcattacaactgcaccgataccagatttaaatgagaaaattattgtgtttgggcaagtcatcaagggagaggatgttgtgcaggaaattgaagaagtggatacagatgaacattacaagcctaaagtctcttccgggctactgcaccaataccagatctaaatgagaaaattattgtgtttgggcaagtcatcaagggagaggatgttgtccaggaaattgaagaagtggatacagatgaacattacaagcctaaagtatctatcgggatacttgatgtgactcttaaacaaaaggtctgaaggttctctgctagatcaagatcataattagctgtgatacttagtcataacctgttttcggggacactggtcaagtctttttgtatagggatgaaccttgagaattttgcctggggtgcatctatcaagtgtttgagccttgatgttgtttttgctattgcatttttagttaacacagggattatgcaatctcctttccttacatcctgtcattttatctgtttgtttttctttcttttctttgaaaaaattggggggcgggttaggtttgttggaagggttttgcattttgcttgtaaggtttggtaatatcacatttttttttggcattacttttcatttgtaacctcaatgagatcacaggatcacttccttatgcagttcatgacttaatgtatcatttgtgtttccattgaaggccaatttggcggtgagtcagaatggtaaagctttgtaagtcatattttcatnngctattacannnnncaa

SEQ ID NO: 17717 - DNA, 1212 bp, Glycine max
  Clone ID: PAT_MRT3847_116002C.1
agaaaaagtctcacgagtggggagagtttgtaaattgcgacttccaatggcgagttgcgaataaagcgaagatagaaaaagtgcggcaaaggatgtgtgtgcttgcttcattgtttgcgttgtgaagtaggtgatcgaagtcgttgaatgctatattcgtttacgaaatgaaggaggacgcggagaaagataaaggcaaagacaacaataggatttggggagctattctcttcggcttaattggcgccaccgtcactacctttgcggtcggtcagctgcggaggagtgttgaatggttctatactcagtcatcctggaaaggagagagaaatggttctttccgatcagctttacaggaagaggcatggaggaggcacaataagcgaatgcaagaagagttagaggaggagatggaaagagtggaacgaataaggcgtatgcaaagtgtgtttaacagagaaaggaataagtataaaagaagctatgagagctggaggggaagtggtcctggtgcatatcatcagcatttccaaagagaagattggtactggaaggctgatacatcctttagagacaagaggactaattatcaagaaactccaagagagagtggaaactatgcattatcacatcattactcagttttgggtctcgacaggtactcacagaaatcttggataatggtccatctaatattggtttcttaggaaataccatatttttcttacattacttgaggaagtacaatatagctgttcatcatattatagaaaaaaatgagacttgtgtaaagaggaagaaatggtctgataaggagaatattattgtgggttccatatataatacatccagagcattcaatgagcattctcattttaagcaacattgttgacatcacaattaagattgtgagactgcacaattctgtgatctttgggggcagatgtgagttggattggttgttgaatcacgactctgagattacagcaaggatgatgatcttgtctgtagaattgtgcgatagctaatccaatttcaggtggattctctagttcagattttattacctgatatgaaaaacctaacttttcatccaattttcactccatttcgtacatttcaaagctcttctagtcgcatgacgagtgccctagttcccctgtgccccttctttgactcaaaaccctaatttctcaaccattttaaagttgt

SEQ ID NO: 17718 - DNA, 606 bp, Glycine max
  Clone ID: PAT_MRT3847_116003C.1
gctgctgaatgaggggcctggattgatttcttcgaggaggaaaagggctgcgttcaacagtgtaagctcgggatcaggagccgactctttgtccttcactgtaaaggatgtccaacttgtgataatgatgttatcacaaagtgcccccccccttcaggcaatggtgtttggattgcctttatgttaaagcttggcaatttctgctgcataattccaagaattcaaaaagccttcttctaagttctttggccttaaccatacttccatgcctgtgatgtggtcatgtaaactctcccctctgctatagtcacatgtacaagtgcctgagatggcatgataagtggcttaacaaagattgtaaattgtaatatttggccaactcttacctttgacatgtatagcacacaatctacatgtatatttttgctcatctctttttatgtaatcagacaaaaaatgtaaattcaatctcccatgtatagaatagggtactatgcatgttgatggtttgtagcacttttcaattattttcttttcattttgtttcttgcatcttttgtattgattaattcagtctgtggtgaaatatgtatttcattttgaagg

SEQ ID NO: 17719 - DNA, 348 bp, Glycine max
  unsure (1)..(348): unsure at all n locations
  Clone ID: PAT_MRT3847_116004C.1
gctcggctcagaaanaatacatatacccttctatttgaaccatatagaccacaagggggggggtggtttcaaagggaaggcggccaaaaataaaaggaacctaatctcatgttcaaaccgaacatcaggcgttacaggaagtaatgacgatctacacagaacctttcgcgtaggatgacagcacataaaagacagacctgctgaattattgccctcagacgggcagagcatccaattcactcatacttcatgggctaacaaccctatagcgatggttacggatctgctgtccttggagactataggactaacatactttgaaataatactctaggtctcacactgact

SEQ ID NO: 17720 - DNA, 485 bp, Glycine max
  unsure (1)..(485): unsure at all n locations
  Clone ID: PAT_MRT3847_116005C.1
tttgtgtttgtttttaacctatgcctggaaattaaactggggggcgctactttccctatgggtccattcgttaattttccaaattgggggaagaaaatgaagaggtatcccattttttcttttggttcccgggggacccccttttcctggtccccttcgggtcggggggcggtccccaagggccgttaaagccccaaacgcgagggtcccctttgggggcggtgttgggaattccctttccccgaagctccctgggccgcctctcggtttcgggcttcccgagcccgctcccctgggggggggggggcaccncggcggcccctatgatggcgttggagacgccgccgccgggggccctcgcgttcgcgcccggccgccgcgtgttgcggggctgcccccccaggcccgcctccgtgggctcccgcgcccgcgggtctttttcgggtgccgccgcgggggccccccgccgcgggcccggggggggg

SEQ ID NO: 17721 - DNA, 1106 bp, Glycine max
  Clone ID: PAT_MRT3847_116006C.1
ttacggctgcgagaagacgacagaaggggccttacaatcccctctgtcagtgaagactgaagagtaatggcgcttccgagagcatgtttggcgaggattttgtcacatcgtaatccaatgtttttgtcactctcaccacttacaatgcacgccaactacctctctcattctcaaacgcactctctcacactctctgcttcgctttctacttccgaggccccttcttcacacgagcctcactttcgcaggaaacccatgtgcttgtaccactcccagggaaagtgcactaagatggatgatcctatccaccttgagacgtttaaccatgattgcttcagggagcttctagtgaacaccgctgagttgaacaaaatacgctctcgggatctagactttttccttgtgcttgatttagagggtagggttgagattcttgagtttccagttctaatgattagtgcgaaaacattgcaagttgaagacattttccacaggtttgtgaggccctcaaaaatgagtgaacgaagaataaatgaatatgttgaaggaaaatatggaaaatgtggagttcacagagtgtggcatgacacagccataccatttacggatgttattcaacaatttggaacttggttaatgcgacatcaattgtggatgggtgagaaacttattcgtgcagcatttgtaacatgtggaaattgggatttgaaaacaaaggtccctcagcaatgtgaagtgtcaaagatagagcttcctccatattttatggagtggattaatctcaaagatgtctatctgaacttttatgataggagggccacaggaatggttacaatgatgaaggaactacaaataccaatggtgggaagtcatcatcttggcattgatgacactaggaacatagcaagagtactgcagcacatgctactagatggtgcactcgtccagattactgcaaggaggaatcctagatctcttagagatgtcaagtttcttttcaagaaccgtattggatagtgtacttctcaatggactatgtgactttttctaatacttttaatcgtggaattagttaactctatgaacagattatagattataatttc

SEQ ID NO: 17722 - DNA, 490 bp, Glycine max
  unsure (1)..(490): unsure at all n locations
  Clone ID: PAT_MRT3847_116007C.1
aattcggctcgagtacggctgcgagaagacgacagaagggatactcaaataatatttcctagactaaaaaagtaacaaacgtccccttagtggattttaccatgatgttctgtgtggatatataaggctttagcttaagccgatgttgtgttatgtttaactccttgcattatcaaaacataatgagtgttgttacgtgcacaactttattacctgtttagcattttttgttaattttaaaattctcctatgttaaaggtatacgagtttgtggttgatccgtataaaatatacagatcatataatttgcaagtataatttaaatatatggattgatctgtatggtttatacggatacacttgacccatatgacttatacggatcaacttgagtgaaagacatttttgcttattcacttaaaatgttggttgggtgcacctagcatcacccaaacacaattaanaaaattagggaccccttatgtaacac

SEQ ID NO: 17723 - DNA, 355 bp, Glycine max
  Clone ID: PAT_MRT3847_116008C.1
acggctgcgagaagacgacagaagggggagctcaaataagtgtgaccttctattttggggggggcggcataacgatggggacggctcttggttcctctcatcctacaatcttagtagcatgtaattgccttgcatacgatatattgactgtccgaatgaacactggttatggagcccaaactcctgaggtgaaatgctcatgttggatgatcagcttggcagcacacatcatgtttgtatttagtaccattcctgatgagtgcctcgaattaacagacaagtacaggctctgtcaacaatatatatcagactccatatcagttaatcatcaagcttacttctttaccacagacct

SEQ ID NO: 17724 - DNA, 159 bp, Glycine max
  unsure (1)..(159): unsure at all n locations
  Clone ID: PAT_MRT3847_116009C.1
nnnanngcnngcntacgnnagcnncggnanncctgctcgaggagttntgncctntttgaccnnnccaagtagcanagntgtttggnatcatcgcgaggnaacaagggtcacaagntanangggaacttggtgnttatgccgaacagcgntgtgttggnt

SEQ ID NO: 17725 - DNA, 470 bp, Glycine max
  Clone ID: PAT_MRT3847_11600C.1
tttaggcctgcgagaagacgacagaagggtcttactcatcacatgaacccctaaatcctaattgctttgttttcccccaattcccaatggcgaacgactcgtcgtttttgttcgccggcattcgtttcgatagaaagaagttcggcgccgatattgccaggttccagaaaaaagacagtgatactgattcggcgatgattttgagcgccgccgaagacgaaggcgagaaaacaatagaacctctggaagaagagaaagtcgcggcgtcaacgacgaagaagaggaagcgcaagggaacctcttccgaaacggtcgaaggattcaatgtgttcagaagttcgacgtctgtggcgcagtcgaatgatgaagtccgagtcattgaggagtccgttgagctgtataataataataagaaggaacaaaataagcaactcgagcgggacgcaatattcagatagcaacacacattc

SEQ ID NO: 17726 - DNA, 560 bp, Glycine max
  Clone ID: PAT_MRT3847_116010C.1
acattcaaaatagagtagtatctgcgagtgtttccctgttccgcgattctctcaatatcatatacccttttgaacacgatgacgaacaaaagcatcaacgtagatatgcatgaagaggcattcgcctctgcacgacgaaggaatctatagacggaagacttctcaagcatactcttggcgttcttcgggtcatgctctaagatacaatatgacaaggtcaccagacaataccctctgactcatgagcatggctatgcttatactcacttgcacaagccttcaacctctacgccaacagcgtccggatacatcctgaatgatgcgacggaccaagattgacccatgccgtcacattattgctgctacagaattcgtctaaagtcacccttcctccgctcatatcacaatagcaaccatgtgcccagtgtactcacgctacatcgaagccttcctcctcgctgtacgacgacaaattatccactggtcccgcatgctaactctccgatgaagtggaacctctgaacgcctggctgtgatatatatagatagacatcggtatg

SEQ ID NO: 17727 - DNA, 515 bp, Glycine max
  Clone ID: PAT_MRT3847_116011C.1
caaagatccccttcttatcaatttagtcccttaaagatcggggggggcaaattagccctttaaaaaatttgggggacagcaaaacaggcttcgggtcaagtttggttgggacaatagcttggccccttttggggacccctttttgaaagaccaatttggtggcaaggggatctttaaaggaccctaagggaagcttagcctaaattttaatatttaccttctatggccaagggccatgggactgcccttccgagttggcggaaaactctgggggccctccacagacattggcgggacccggggggcataccccctggttttttttaagccctttttcgccccctggcttgggatactcgggggagccgggaagcccccgtatttgggccccttcttcttaatccgcccgacttttggggcattggtcaagttttttggctaccttggccccctcaacctttttggggggtttccggggggggggggtcaccttttggttcaggggcggggggggg

SEQ ID NO: 17728 - DNA, 410 bp, Glycine max
  Clone ID: PAT_MRT3847_116012C.1
aggatgcagatacaacttcttatgaagtggattcaaaagtagtatgtatgatcctagaagatgctagcactaacggattgtgggattttcctaacagaaagatgcctctatagcagacaggatattccctagccactactcagcacccgctcagcaacccttgtcagagttagttatgaaatccttcagggtgattggtgaattgagaattatgcagaacaaaatagcaatttgttgtgatagccaaagtgcaatacatctcttaaaacatcaagtggatcacgcgagataaaattgcatatcgatgttggaattcatttttatcggagatgttattgagaaaaatgaggtttaggtggagaaggcattaaaagacaatcctacttatgcattcatgaggacactaactc

SEQ ID NO: 17729 - DNA, 264 bp, Glycine max
  Clone ID: PAT_MRT3847_116013C.1
cttgcaggtagttgtcttttatcactattttaatcgttagtaggatttttattatactgtaatttatggaagaccataatacttctacctgcttattctgtttttgttggtgaatgatgggaactgtgtgatacatgagaagccactgtgtttatattgatggccctacctgatgaacaaatgtttctcatttgagtctttcaaactggggttaataattaataagataacaactttgtgtggggagaaatgagaggtttaaat

SEQ ID NO: 17730 - DNA, 287 bp, Glycine max
  Clone ID: PAT_MRT3847_116014C.1
ccttcagttcgatcccaagattagcatattatggaaacacgggaagtctttctacaactaaaccgaacagggggaggtgagtttctgatggttcttgggccgcctaattactttccacaatcacctaatactttttttttaacattagaaataccacttcttcccatgccaaacaagaagtgggaccgttattattattaaccccccccactggttccggtaaaccggtagggaataccaaccaccttgcgaaagtgaattggatcaagggccgcattataaggggt

SEQ ID NO: 17731 - DNA, 662 bp, Glycine max
  Clone ID: PAT_MRT3847_116015C.1
ggcagaaccttgtctctgcatcatcataattctctcaattgaggagcccaaagggatcaaatctcttcaacccagaagaagaaaaacaaaagagaaattatagaattaagttgctatagctaatagctataactggcttagatataccatttttattttatttttattttggggtgtacaaaatgggaagaccaccttgctgtgataaaattgggattaagaaagggccttggactcctgaggaagacatcatcttggtctcttacattcaagaacatggacccggaaattggagatcggttcccagtaacacaggtttgatgagatgcagcaaaagctgcagactcagatggaccaactatctccgacctggtatcaaacgaggcaatttcaccgatcatgaagagaaaatgataatccacctccaagctcttttgggtaacagatgggctgctataacttcctaccttccacaaaggacagacaatgacataaagaactattggaacacccatttgaagaagaagctgaagaagatgcaaaattggaggtggtaatgagatgataataatgatggacagagaaactcttctaacaattcaccaaattagggttcaatgcgaagaagaacttatacagatttccacatggcaagacatgct

SEQ ID NO: 17732 - DNA, 328 bp, Glycine max
  Clone ID: PAT_MRT3847_116016C.1
agattctgtttgtgtatttttgtgccttactaatttatttacctacttaatcatggggtgactcatgtgccaacttagtttgtggttatggcagaaagcgaaaccccgggccacatatcaatttccagagcgacaccacagacaagggcccaggtggccactggacttcaaaatagaggagcctaggcgtttgaacacaaaagtggcaaccaaaaatgttcaaacatgaaggactgccccgaggataaaaaaaggatggggacccactattgacagaaccggccaataggggcggctcaaaaaaaaaaatgaatgcacccccacatca

SEQ ID NO: 17733 - DNA, 389 bp, Glycine max
  Clone ID: PAT_MRT3847_116017C.1
taatgacatagcaaaagaggctggcatagaggggccgtgtgacctggaatttgatggtttgtgactaaccgccgcaggacgcctaaatggcgctcacagacaatgctcacgtcagcaacaacgttggttgactagacaggcgcgcaacatacgacaacaggtgcactggaagtgcctgctcgtcacttataacaaataaagaggctcatgcagggaccgatgcgaccgaattcttaagcacgctgagaaagaacgagatgctggggagcagctagagctcaccagtctagacccagccataaagctcaccatagccctccatatacccatcgacgccctcgtaggggagcagccctggtggatcatactcgatactgttcacagatggt

SEQ ID NO: 17734 - DNA, 304 bp, Glycine max
  Clone ID: PAT_MRT3847_116018C.1
gttctagatcgcgagcgtccgtcctttttttttttttttggaaaaagcaagtcacaggaagctggattcggatgcacaagataattgacatgatctgaagtgcttcaccaaacacaaatgtaaaaacctttgacgagtgatctagtggttggacggtcacttagcggagacgaagttgctggcctaagcccaatcgttggtgctgacagggccaactaggtgatcggcgaggctctgcaaaggaccctttccggggactatgggctgaacaaaggagccaaacctagagaacatggcccatcgt

SEQ ID NO: 17735 - DNA, 1197 bp, Glycine max
  Clone ID: PAT_MRT3847_116019C.1
aacatattaatttgcaattccgaatcacatttctattcaacaatctcaatatcaaattagttttgcaaggaaacatgcagattaatataaagtaacgagtatttcacatacaactcttaagcttaaaataactagtaaatataatatgccttcctttgatcttcaatctgttggaactaaaatcactagtaatgatccagattcgtcttctcaaactccaccttcttgttgttggacacatgcagaagaagatcacacacttgccgtgccgttggcctctcctgtggtgcagtttttgtgcactgtattgctatctcaagaacctggaatgcagcaaactcttcaccaggcaaaaggggtttcattttaggatctatcacttcctctcctgcagtgctttgcatgtcaaggtgcatctccacccatctcaccatgttcatctctgctctgaaagctgcgtctgtcggtgtcttaccactaacaagttccatgagcacaattcccatgctgtacatatcacttttctctgttgccttcattgaatatgcatactctggggcaatgtagccataagacccagcaaaacaagaattggactcagtgatagattcatgattctcaaagagtgtttttgctagaccaaagtctcccaagtgtgactccatgttggaatctagcaatatgttgctagatttgatgtccctgtgaaggatctttggcacacaatcatgatggaggtactccactccctgagctaatgtcacagcaattctgaaccttgtgtcccaatcaagtttcctctttaatttgaggggttccccatgtagccaatcccaaacactcccattctccatatactcatatatcagcagattccaacctcctccattaaatctattgctacaacaacctaacaatttcaccagatgcctgtgcttgatcctccctaaagtcttaagttctcttataaagcttttgtgcaacagataatcatttttccacgaaatcttcttgacagccacggtctctccagtgggaaattcaactctgtacactgtcccagaacctccacaaccaattatgaactcttcacttagattgtttgtggcatccatgatatcttcccacctgaaatctcgctttcctggcacagttagggggatcaatgtccgcttctgtgctcgtgcggacgcgtgg

SEQ ID NO: 17736 - DNA, 557 bp, Glycine max
  Clone ID: PAT_MRT3847_11601C.1
cccactcgtccgcccacgcgtccgcccacgcgtccgtgcagaacacagtggccggccgccgcgaacaaacgaagagtgcaagtgtccgcaaagccgttactcttactcatcacatgaacccctaaatcctaattgctttgttttcccccaattcccaatggcgaacgactcgtcgtttttgttcgccggcattcgtttcgatagaaagaagttcggcgccgatattgccaggttccagaaaaaagacagtgatactgattcggcgatgattttgagcgccgccgaagacgaaggcgagaaaacaatagaacctctggaagaagagaaagtcgcggcgtcaacgacgaagaagaggaagcgcaagggaacctcttccggtaattcagattctcttactacactatgctatctcttgcattcaacgtgatgcatctcacttttgcttcattttcgtaaacgcacaaaagaaacggtcgaaggattcaatgtgttcagaagttcgacgtctgtggcgcagtcgaatgatgaagtccgagtcattgaggagtccgttgagc

SEQ ID NO: 17737 - DNA, 869 bp, Glycine max
  Clone ID: PAT_MRT3847_116020C.1
gcaattccaaatcacatttctatttaacaatctcaatattagattagttttggaaggaaacatgcatattgatatgctaattaaaattactaacacgatatcaagcaactagtattccacatagaactcgcaagtctaaataaaacaacagcaaacattctttcctttatttatcttcaatctgttggaatcaaaatcactagtaatgatccagattcgtcttctcaaactccaccttcttgttgttggacacacgcagaagaagatcacaaacttgccgtgccgttggcctctcttgtggtgcagcttttgtgcactgtatggctatctcaagaacctgaaatgcagcaacctcttcaccacgcaaaaggggtttcagcttaggatctatcacttcctctcctgcagtgccttgcatgttaaggttcatctccacccatctcaccatgtccatctctgctctgaaagctgcatctgtcggcattttaccactaacaagttccattaacacaattcccatgctgtacatatcacttttctcagtagccttcattgagtatgcatactctggggcaatgtagccataagacccagcaaaacaagaattagactcagtgatagactcatgattctcaacgagtgtttttgccagaccaaagtctcccaagtgtgcctccatgttggaatctagcaatatgttgctggatttgatgtccctgtgaaggatctttggcacacaatcatgatggaggtattccattccatgagctaatcccacagcaattctgaaccttgtgtcccaatcaagtctcccctttaatttgaggggttccccatgagccaatcccaaacactccccggacgcgtgg

SEQ ID NO: 17738 - DNA, 276 bp, Glycine max
  Clone ID: PAT_MRT3847_116021C.1
tacggctgcgagaatattacagaaggggaagaagagttacatcggaagtgagagcaaagaagaagaagaaaccaccacacaagtccaaagattgattccaaaatgcgatcctcaagcattcgcagctgcaccatcttttttctgttgctgattgagagcctcccccacggacacgcaacaactacgacctgccaacttcgtctaaaacctgcctcttctctccttgaaaccgacctcgaaaccctccagaaacaactcggggaccccttgaagagc

SEQ ID NO: 17739 - DNA, 548 bp, Glycine max
  Clone ID: PAT_MRT3847_116022C.1
tccgtctcttgcaaagcacacgtatcatctccattgatattcccctctagtgattgaagttgtggatcttctaaggcaaagttattttctgctcctcttgagttagaaggcttacttgttacttggtaaatattgtgttccttattttggttgtggaacccattcctcaaattgttgtgctacttggtgtccctcgctctgcttttcaaagtgactcttttatctacatcatcatcgataaacttaagagtatcaaaaaagctgtagtccatcgacaagcctcgaaagtgcccaacaaaggacactcctactagcctcggtcgcctaccagactcatttggattgaggtcaaaaatgtcaaagtttgacaacctattaccctttgaaacttttgacctcaatttggatgagtttggtatataggcggtcgatgctagtaggagtaccctctatctagcacttctaaagcttgtcgatgaactatgacctctttgatatttttgagtttatgggtgatgacattgataagacagttacagtgaaaaatg

SEQ ID NO: 17740 - DNA, 414 bp, Glycine max
  Clone ID: PAT_MRT3847_116023C.1
ccggaccggaacacccgggacgtcccactcgaccgataaaagtacagcccaggaaagagcaaccagggaagcgatcaacaaccaagaggaagccccggctacagagccaaacccagacaagagcccaccacacaccaccgccggaggaaacggacccaaggcgaccaacgaaagcagcgagaaagacgccgacggggcccaagaagagcagaacaacgaagaggaggaccggaagccagaccaaccaccaaccaaccaaacccagggaaggagagaaagaggggaacgacgccaacacaacaaccatcacaaccaacgaagggagaagaagacacaaacccacaacgcaaccggaagaggaagacaacaagcgacaacaacaagacgaaggaccagaaaacaaacacaggcgag

SEQ ID NO: 17741 - DNA, 262 bp, Glycine max
  unsure (1)..(262): unsure at all n locations
  Clone ID: PAT_MRT3847_116024C.1
aattataacattattataccctttatatacatgcataataacaataaagaatcagtccaagttaaataacaagcaggaactancttattaaatcatctattcgttcctcacccttacaaaaataattcttcaacctatcttagaatagataccaatttaatacgatataaaactattgacgatagcataactaatattaccccagttcacaagatctacatacttatataaagaattcatgatagaacatataaataaatac

SEQ ID NO: 17742 - DNA, 271 bp, Glycine max
  Clone ID: PAT_MRT3847_116025C.1
ttcatcatcaacaacagaagaagaaacagctcagagggtttcattggccaaaaaaatcacaggacaaaacttcgtgatctgagacatcacattccctcttcgatttgtgccctagattggaactcccaccttttttccaggtcaaccttaacaagtttcgttttccttttttccacatttccgagaaaaaaaaaaatcagaaattcccgagtttctatttctaatggtaaattggtaactattccctttggaacaattcaattgcaatttt

SEQ ID NO: 17743 - DNA, 747 bp, Glycine max
  Clone ID: PAT_MRT3847_116026C.1
accatatagcattccaaacacaagcatcaatgcctcgtaccaacaccattactatgacaaaactagaaccaacactctttttactactacttttcatgttgtcatgcctaataacagtgaacaatgcacactcaacaacaatcatcaacgtgtggccaaaaccaagaaacctcacgtgggccccaccataccaagccaccctcattgcctccacattcaccatcatcaccaccacaactccccaccacaacaaacacctctccgccgccatcatccgctaccaaaacctcgtaaaatccgagcaccaccacccacttgtccccccaggggtgaacatctccacaaacctcccaccactgaattccctcaccctcactgtccttgatccggtgcaggaactcgtccacgacgtggacgagtcctacaccctctccatccccccttcttcctcctcagccaccctcactgcaaagaccacgtggggagccatgcgaggcctggagacgttctcccagctcgcatggggcaaccccacgtgcgttgcagtgggggtccacttgtgggattccccgctctacgcccaccgtggcatcatgcttgacacttcaaggaactattttccagtgaaggacttgttgaggacagtggaagccatgagcatgaacaagctcaacgtgttccactggcacgtcacgggactcgcagtctttcccattggtccttccttcggagcctgctttggctgaa

SEQ ID NO: 17744 - DNA, 395 bp, Glycine max
  Clone ID: PAT_MRT3847_116027C.1
ttttgcggacgctttttgaaaaggcaactggatgcgaccttgtgacaaaattcctagtgtctcgactacaaccgacgagagataggtaggcacagaacatgagggatttgaccctctcctcggtggaattcaaaaaaatgccactcccatgatgcccctagatgaagaaatactctctaaggttgcacaagatatggttgaggaatggttagatcgtgtcgacgaggaggattccttcgaggaagttcctttaagcgcagcacctcaatggagtccagggtctggactactcggaaagaattcctcttgccacatccgaaggacttccctaagtgcctttcacgcataaatatggtgaaaaaaggtcaaaaatggaggatcttgttctcctgggg

SEQ ID NO: 17745 - DNA, 796 bp, Glycine max
  Clone ID: PAT_MRT3847_116028C.1
cccaccggcccccgacaactcatgttagtgaattaatttactcactatactaactcctaactccaacttcagctacattctcccggcgtttcgatcgatcttgatcccaattcccatctacacacatatcacaatgctaagtcgtaaacgactcatcgtttcgctctctctcgccactctccttctcttctcctccctttccctcactctctgcgataaaatcccccctcaaaacgacaacaacaacgatgacgacgaagatctcagcttcctcgaggaacccgatgacgccgccgccacttcgcaccacggccattttccagatcccgaccggttcgacgaggacggcgacgacgacggcgacttcggcgacttctcaggcttcgaccactcgacggaggaggcgttcgaggtggatgacaaggacgtcgtcgttttgaaggagcgcaacttcactaccgtcgtcgagaacaaccgcttcatcatggtcgagttctacgccccctggtgcggccactgccaggccctcgcgccggagtacgccgccgccgccaccgagctcaagcccgacggcgtcgttctcgccaaagtcgacgccaccgtcgaaaacgaactggcgaacgagtacgacgttcagggtttccccaccgtcttcttcttcgtcgatggggtccacaagccctacactggccaaagaaccaaagacgctatagtgacatggattaagaaggagatagggccctggtgtgtccaacattactacggtggatgaagctggacgcgtattgacagctga

SEQ ID NO: 17746 - DNA, 774 bp, Glycine max
  Clone ID: PAT_MRT3847_116029C.1
cctacgctctaactccaactggcgtcagatttctatttccccggcgaagctattcgatctcgatctcaatttccaatccacagatcacaatgctaactcgtaaacgactcgtcgtttctctctctctcgccactctccttctcttctcatccctctctctctctctctgcgataaaaccccccctcaaaacgacaacaaaaaaaacaacaacgacgacgacgaagatctcagcttcctcgaggaatccgatgacgctgccaccacttctcaccaaggccattttccagatcccgacgagttcgacgaggacgacggcgacgacgaggacgacttcggcgacttcgctggcttcgaccactcgtcggaggaggcgttcaaggagcccgaggtggacgacaaggacgtcgtcgttttgaaggagcgcaacttcaccaccgtcgtcgagaacaaccgcttcgtcatggtcgagttctacgcgccctggtgcggccactgccaggccctcgcgccggagtacgccgccgccgccaccgagctcaagcccgacggcgtcgttctcgccaaggtcgacgccaccgtcgaaaacgaattggcgaacgagtacgacgttcagggtttccccaccgtcttcttcttcgtcgatggggtccacaagccctacactggccaaagaaccaaagacgctatagtggactggattaagaagaagaaggacctggtgtgtccaacattactacggtggaagaagctgacgtgtattgaccgcgggaagc

SEQ ID NO: 17747 - DNA, 1217 bp, Glycine max
  Clone ID: PAT_MRT3847_11602C.1
accaccaggttctacgggggtattgctgcgttcttcgctgcttctgtggtggttggggtctctcccccgggggttggttctcgttgatttggttcatagcaccataaatttggcctatgtaattgatcaggtacttcctcgaggtctacgagctcgagcatcgggaatccttcaagtggtgatatcttccatgctgcacccaatgttgatcattctcaggactttgtaaggaaagatatcaaggagtggttgaactggctgcgcaatgatataggttttgatggatggcgtcttgactttgttagaggtttctctggtacatatgtaaaagaatatattgaagcatcaactcctgtatttgccattggagaatattgggacagcttgggctatgaacatggaagtttgtgttacaaccaagatgctcatcggcaacggataattaattggatcaatgcaactggtggtacttcatctgcatttgatatgacgacaaaggggatacttcattctgctctgcataatgaatattggagactgatagatcctcaagggaaaccaacaggagtgatgggatggtgggcttctcgtgctgttacattcctagagaaccatgataccgggtccacacaaggccactggccattcccacgggataagctcatgcagggatatgcatatattttgactcatcctggaactcctacaatattttatgaccatttctatgattttggcatccacgatgtattaaccgagttgattgacgctcggagacgagctgggatccattgtcggagctctatcaagatataccatgcaaacaatgaaggttatgtagctcaggttggtgatgcgctggtaatgaagcttgggcagtttgattggaatccctccaaggaaaaccaattggaagggagctggcagaagtttgttgacaaaggaccagactaccaagtgtggttgagacaatagtttaataccaatctatagacattgctctattctgtaatggaaattgaaaatagcttcaataaagcacacacatcataggaaaaaaaaatttgtttgtaacatgtaacgaacaaacagataaggtatttcttatctgcttcgtatgagcttgagtcaaatgcctccataaaaaaacaataaatttcatctgcattttgagttacatttgtttaaatgtagccgtgtgtattaaaaataaaaaa

SEQ ID NO: 17748 - DNA, 1191 bp, Glycine max
  unsure (1)..(1191): unsure at all n locations
  Clone ID: PAT_MRT3847_116030C.1
gccgagaaaaacttgcaaggtcaaaaggaagtcagtcaaaaatggaaacttgcatctttccatcaagtagatattgatgccgatgaaatatgtaaattggatgaagataatttgataggtagtggtggtacaggaaaggtttatcgagtggagttgaggaaaaatggagccatggtggctgtcaagcaactagggaaagtagatggtgtgaaaattttagctgcagagatggagattttggggaaaattaggcatagaaacatacttaaactctatgcttctttacttaaaggaggatccaaccttttagtgtttgagtacatgccaaatggtaatctttttcaagctcttcacagacagataaaagatgggaagccaaacttggattggaaccagaggtataaaattgctctgggagctgggaaaggaattgcctatttacaccatgactgtaacccaccagttattcacagggatataaaatccagcaacattttgcttgatgaggattatgagtcaaaaattgctgattttggtattgcaaggtttgcagaaaaatctgataagcagttgggttatagctgtctagcgggcacacttggttatattgctccagaacttgcttatgccactgacatcacggaaaagagtgatgtttatagctttggagtggtgctattagaattagtgtctggcagagaacccattgaagaggaatatggagaggcgaaggatattgtttattgggtgttgagtaatctcaatgaccgtgaaagtattctcaacattcttgatgaaagggtgacatccgagtctgttgaagatatgatcaaagtgttgaagattgctattaagtgcaccactaagcttccatcgttgcgccccaccatgagagaggttgttaagatgctaattgatgccgaaccttgcgcattcaaatctccaaacaaagacacaaaggcccttctctagtactggtagtggccagtgggtttcttttcttttcaaacacttgctcaactatatttactatttcccaattgagaagcactgcactttcgtaacctagccgacatttatatcataattatgccctcctaaattgttgtcttttgctcgtctattgctttgcgtgtttaggtatcttgaatattatattgtccaagctcttttcacctttttctttttntt

SEQ ID NO: 17749 - DNA, 1749 bp, Glycine max
  unsure (1)..(1749): unsure at all n locations
  Clone ID: PAT_MRT3847_116031C.1
ttcaaaggcaaagattctgggcaggaggttgaggaagatggtgaggggttggaagtttctgaagaaaaaagtgatgtggagggtgagaatcaagagggacgtaagtaggttagtgttgagtactatgagcccaaacctggggattttgtggtgggtgttgttgtttcaggtaatgaaaacaagcttgatgtcaatgtaggggcagacttgctaggtacaatgttgaccaaggaagtgcttcccttgtatggtaaggaaatggagaacttgttgcaccatgtggacaaagatgctgaggattttatgtgcaatgggaagatgggaattagcacgaatgaggagctggtaagtggataagtttgaaaaataatgatgaaactggagatcacaaaaagtttgatacttttcactgacagaagctcaactgagagaacttgacattgcatgggggcaatgcctgtctggaagaaaacatcaagagcctcagtagttgtcattttgctcaatgaacctatagaggttgagattactgagtggaatactgggggcctgctaacaaggattgagggtttgcgagctttcctacccaaagctgagcttgtaaaaagagcaaatagctttactgaattgaaagaaaatgtggggcgctgtatgtatgtacaaattactcagatagatgaaactaaaaacaatttgatacttagcgaaaaggaagcttggcaaaaattgtatcttcgtgagggaacacttcttgatggaactgtgaaaaagatcttaccgtatggagctcaaattaagctaggaaaaactaatagaagtggattgctgcatgtttctaatatctctcgagctgaagttacttctgtcagtaacatactttctgttgatgagaatgtcaaagttcttgtggtgaagtcaatgtttcctgataaaatatctcttagcattgctgaccttgagagtgaacctggcctttttctatcaaataaagagagactatatatggaggctgatatgatggcaaagaaatataagcaaaagctaccaccttctgtcaccactcaaagattagaacccctaccaaccagttgcttgccttttgaaaatgaagcactttatgcaaactggaagtggtttaagtttgaaaaataatgatgaaacaagttgacacaaaaatcatgatatttttcactgacagaagctcaagtgagagaacttgacattgcgtgggggcaatacctgtgtggaagaaaacatcaagagcctcagtagttttggttttgatgcagtcattgttctcctgatgagttccatgaagatcactggctattatgtggtcaaaagggtcaaagcataattcggtgttttttttgtcacgaagaaaggttctttttcctttctttatatcttaatttttcaggtgccgggcgtcattttatagatagattcatgtaaattctgggataaatttcgagcttaattttgattaacgctcagagtaaagcttttgcactatcatcaaattgtgttaactcttcattttttagctttcaagttagtaggtttaatgttctaacaatatcaaatgatagtgtagaaggtttacatgagatcaaaattaagtctgatttgcataacattcacttcctcaagtgtttttgttttttttttcctttctttacctcatcttgaattttgccttatgttttctgtttattttanggatttggacaattggacagcatggat

SEQ ID NO: 17750 - DNA, 279 bp, Glycine max
  Clone ID: PAT_MRT3847_116032C.1
acgccagatcgagactattttttttttctcaatacaacgagtgttttttgcccaaatggaaacaaatatgtctaaactgccttctcgatgatgtttgatactcctaaaggcttccattgttgggatcttaaaatttcttcattctaaaatttcacctctccaaatatcacagtatgtaggaaccaattctgcgtagcgatctatcggcaacattctttgtccgagggcaattttagagccaagtgttgattgcagctcaacttcatcctattaatggaa

SEQ ID NO: 17751 - DNA, 265 bp, Glycine max
  Clone ID: PAT_MRT3847_116033C.1
gtcaagcattcgcatacttgtgctgatcgttatctgtctctacacctcttcctcggattgggagatcggaaaaacttgcggggcatacaacaaatgcgacactggacttaactgtcaaacatgtactgccaatgggaatacccgaaccagacgctcgcggatacaatcatggagcccaaggtgtaaggtgaaaggcttaccgagaaaccgctattcatggatgacgacttacaactcatatgctctgggcgaagccagatgctgc

SEQ ID NO: 17752 - DNA, 1191 bp, Glycine max
  Clone ID: PAT_MRT3847_116034C.1
cctagagccaagcttccttccttctccatctctccgtggatcctactccgccgttgcgccgccaccgccaccgccgtgccgcgtcgccttctccaccaaatctgtctcctatgtctttctctttcaatcttccattctgatttttgcacggttttggttagggtttgagggtttaaagagacaaccaaaggatatagaatgatcgaaaacgtcacagttacaaattgagattcacattttctcagcaaggacgacgcaatgttgcgaaacgcgggatttatggttccgtcttcttcgcgcaggaactgaagcctctcatattgaattgaatattcgtaaatcgaatcatttatttggacacaaaaatagttgaagatggttgaacggaagcagttcaagacgaagctatgcgttctgtatcagagaggtcgctgcaatcgccataattgctccttcgcgcatgggagtgccgagcttcgacgattctctgcctcgtatagtgggaggagagactatttagataatgacttgagggataaacttgacagaaggcatgtatctcctcgaaggtactcaccaactccagatactagaggccgccagatcatccgtgaatacagtcctacaagatctttggagaaaaaaagtgacaggagacataggagaaaacaggatactactggccaaagtgatatttctggaaatttgaaagtctcagatagagttcaaggtcaagttaaagaaggaaaattgctttcctctggttctaggaataatcttgaggagcagctgaagaaagtagattcagatatcagcactctgcagaaccgaaaattccagctagaggtctatcttgatgagagtgttcaagaagtggatagccttaattctagaattcgggaacttgaagctcaactatgcaaagaggatgaggagtgcaaaagaattacttcaagaataaggaaatttgtaagagtgcacaatcatatgtcagagttacaagatgaactgaggagatcacaagtccgacttcaaaggtttggagatcagcttgtctcagacatttctagaattggtgccaacgaagaagatttaagcattgatattataagcaatggtgaaaatactggtcttcatccaatcgctaaacataatggggaagcacaatgatgcattttttcccaccaaaaa

SEQ ID NO: 17753 - DNA, 445 bp, Glycine max
  Clone ID: PAT_MRT3847_116035C.1
aaaaaaccccccgaagggaaaaccaaaaaaccgttaattattaaaaaaaatcccgggggttaacaaaaccgggcaaaaattattcaaaggggcccaaaaaatttaaaatattttttttttaacgggaaagaaacagttcccccacaacggttggaaaactcacccggggaagggacccaagttggggttccccctttaacagaaccttgaaggcaaaaaccacccagggctttggttttctttatattggaaaaaagctaatttcccattttaacattggggggttcggtttaaggggaaccttaacccttaaacatggtaaaacaaaaataaacattgccgggaaaagaaccaaaaaaccttccccccccagggaaagcaaaacctgatttttttggaggtgggggggggccacccccaggtggggcggaaagttttggaaaaa

SEQ ID NO: 17754 - DNA, 354 bp, Glycine max
  unsure (1)..(354): unsure at all n locations
  Clone ID: PAT_MRT3847_116036C.1
aacgggnctggatttccgggttggcaccacacccttccgaaaatttcaaggccttacagcatgtccagaaaaccccaaataaaattggccctgcgggaaggaagcctgggaagaagtccatgaaaccagaccctaaactaagaaaaaactactttgcaggggtgtagctgggttattagttaaaaggggttttctgcatttgtttaaataagggattggcaaaagggcctggtttttttaaaggtttggtaagtccttaattttgaagccgaagggtttggtattttgcgtgctggtgtacggatttttagaagggaccaatgtttaaattggaattttcggtctatttttacc

SEQ ID NO: 17755 - DNA, 155 bp, Glycine max
  Clone ID: PAT_MRT3847_116037C.1
ctcgatcccttcgcttcctcttccgagagctgtttccagtcgttacccccacagtcattcgctcataagaatctaccatcaacaagatgcgttacaccgagatcctcgccctggccatgggcaatgtggtcgccgcccagttcgacaccactcgt

SEQ ID NO: 17756 - DNA, 439 bp, Glycine max
  Clone ID: PAT_MRT3847_116038C.1
cggactcaaaagcacaatactagtgccttgtttcaaatgaagattcaatgtgtgatgctgtgcattatgcttcttagtctttttctaattgaagcagacgtgtcagcaccagcaccagcaccagcaccagctccagtggcagagtgttgcaacgtaatggagttggttccatgtgctgctgccttcaccacctcaaccccgccctcaccagagtgctgtgaaggactcagagagcaaccaagatcatgcatttgccagtacatgaaagacccaacacttgagaagttcatcaacacttccaatgccaagatggttagtgacagttgtggctccccaatgccaaccaattgctgagtatacactatcgagtatatatataaattaaaataagtggtgtaatttatgatgagaaaaatcttatcttgtggttgttacaagc

SEQ ID NO: 17757 - DNA, 302 bp, Glycine max
  unsure (1)..(302): unsure at all n locations
  Clone ID: PAT_MRT3847_116039C.1
gggggggggaagganaaaaaaaaaaaaaaaaaaacaattaatttataaaaaaaaaaaaaaataaaactggatggggtttatttanaaangcgcncccccacaaaaccaccaacataatacaatncctatcctcttcttccttaacatattttccatntccaaactacaattataatttcttcatacaaaccctattcacaactaattttcctatttaccattcattttcctccatattatccctttaaaccacccaattttccattcaacacaaactttttccacccaaatataaatatcaa

SEQ ID NO: 17758 - DNA, 976 bp, Glycine max
  Clone ID: PAT_MRT3847_11603C.1
cgtacgtacggttgtcaatagacagcaaggtgggtatgagaggaacaagaatttggattgtgggagtgacaagtttttgcatgtaaagaacgtgaagttaccgtagacaacctatgtgtttgtgaacaggagcatgaacccaagggagtgtcaggatttttgcctcagggattgttcttgcactgcttatgccaacattcagatcacaaacgaaggaagtggatgcgtgacgtggagtggtgaactcatagatatgaggctgtatagaagcggatgcgtgacgtggaatggtgatttgtagatatgaggttgtattgttacgtcttgcttgctcgggaatttgaagccatagtttgaaaatccaacaccttgaggacaaggtgtttttgatgggctcgggaaccaatgttacgtcttggaattcgaggaccaagacaagcttattgagagagaagaagagagagcttttttgatatttctttcttatacatatatatattgctagctgctagggaacaaactgccccgtcgatcgccaataggatttccgaattcatggaatatccttgtagactagtaggttttttattcttgccaaactgtgcggagcgaaggccaacacctacttctgtggttctgatgcttagtatatacctggcatcaatggttcaacccaaaaaccctggattttgtttaggaaggaatcctatggaaactgattttttttcaagtaaacaagaagaatcatgccctgtgaaccaagtccctgtcccaatgttaaatgccaggtagtaaaaggagcatttcctcatccaatatagccccccagtatattttcaaaaattctttgaagttaatccttaaaaaaatagttgcaatgtttttttatatagtatgatctttttttggtgtgtaatatgttaaagaagccttcgttaaattgtactatatagtataaaaacccttttttttatcc

SEQ ID NO: 17759 - DNA, 785 bp, Glycine max
  Clone ID: PAT_MRT3847_116040C.1
cccacgcgtccgggcagcttctagaactatctcttttccagtaccactcgagccgattcggctcgagacaacacaacacttgttttcttaaaagttcaaactgtctgagttttgcagaatccacggagctaagaatgaaattgtagaagaagaagcactttcacagaaaacatgaaagggttaggtcctcatgcccctttggtttcaaggggaaagcttcctccttcgttggcagtagtggatgccttgccaacatgctcttcttatttctctagaaccaccgtcctatacccattaagatgcagacaaaaatcaaggttgagcttggcccgtggcacaattcgagcccaagcatccaatattagtggtgttgaacctggagattatggaagcaatactgagaaagatggtcagaatgtatttgaagggaatgttatcgaaggcagttcttctaatgttgtaaaacctcctgatcggatcccttatcctctctctatagcttttgtgctgttgggatgtgcacttgtgttttcactaatagcctttgtgaaaggagggccttcatcagttctagcagcaattgcaaaatcaggattcactgctgcatttacattaatatttgtttctgaaattggagacaagacattctttattgctgcactcttggcaatgcaatatgagaaaggattggtcctattgggatcaatgggtgcccttgcactcatgtcaatcctctctgttgtaattggccgaatctttcaatcagtgcctgctcagtttcagac

SEQ ID NO: 17760 - DNA, 582 bp, Glycine max
  unsure (1)..(582): unsure at all n locations
  Clone ID: PAT_MRT3847_116041C.1
ctctaaggggttaattggggctttgacaagcaaagtcgctctgactttattactggcacgaactgtgcgatccaactgataggattacttgatgcaacactgatatgcttggaagattggaagcgatatcagggccattgggcaatttacggttactggccactaaggggaaccacgccttggaagtggctcaagagactactgagctctccatcattaaagtttctgcagggcacccactgtaagtcctgtcttctgcgaacctgatgtgaaggtaacagcaacactatcattccataaccatatgagagcctcataatgcgctagacaagcctatgcaacaactgatagctattggaggcagtggagttctcatatcacccttgacctatatttttgatgagggatctgcaaggaggcagcagctcctatctaaacttggtctatagcacttgatgagcaatcaatggagccattaagggctgtttcgctgctcacaactgtacaagcagatgagcgttaaatntatggtcagggctgcaaaanccgactgcaccaatttggaggacggagatcactgac

SEQ ID NO: 17761 - DNA, 236 bp, Glycine max
  unsure (1)..(236): unsure at all n locations
  Clone ID: PAT_MRT3847_116042C.1
gacccacgcgnncgcccacgcgngcgcccacgcgnccgcccacgcgnccggngaaaaanatgaaagnnnanccgagacacgcnccagncagggcgcaaaancaaggaagaagaggncaccancancancnncngnacagaagncnncnggggcggggggnnaccgccacaangaagggaagcaccaggaganaaagagganggngaggacgnngagaaagaacgcgcccganggag

SEQ ID NO: 17762 - DNA, 427 bp, Glycine max
  Clone ID: PAT_MRT3847_116043C.1
ctcagcattcctttcgagacgacattagaatttacccttctttctctaccatggcacaacaaccagcggttgtagtcctttatcccaacaccggcgttattctccctcaatcctgtacatggacttccaaaatgtcgaggccctccttaactgtgcctaaccgtaccataaactcgcctatgatgaatatgaaccccaatgccgcatcaacaacgtttccattaagcacagggctgacgaggaatactaaaactccgtccaagaacaacccttgtacaagcgctatctacaagattaataaacacgagaacattactaaactgaacaagaccaggaagaagagaaagaatctggctgttccgcgaacttgcgattcaagagcctccgttcttccttcgagacgcttcactacttatacaactctttt

SEQ ID NO: 17763 - DNA, 763 bp, Glycine max
  unsure (1)..(763): unsure at all n locations
  Clone ID: PAT_MRT3847_116044C.1
cccacgcgtccgggaggagcatgagatgcattagttctgttaaaatttgttataatagaatagcattaaaatatataataaatattctgttattaaattcatttgaaaatctataatggaatttacaatgttttataatagattttatgataaaaagatattgaaaagtaattgatatgaaaacaattatcacatcacttaaatattttttattttttattattagacaatacttaaatatcatggcaatagttaaaactgatgttcgaagtcgaaccacagtctgtcttgcaactaaaacacaaaagttgctaaaataaaaatatgtcgtcatttagggttagggttgcgaattgggtcatctctcttctctgacctgctagatgcaagcacagccatgggcagacagaagctagacctgcattgcggtgcgatgcctgctccagctgccattggaggagcagcagggtgccataactccttatgaggcccttatagaacctatgcaagaattgtgcgattcttctctaggttgcgattcaggttcaattcatgtgattcatgatgcgattcaagcaccaaaaacgatttgctcacctcttcctattgccagctacttgaatcgtatgcattgtatcatgaattgtacggtattgataacacagcttagaatacatatgtattcttatgatggatacaattatcttataaaagttgaggtgctgttgaatcgtatgatacanatcatatgtattattatcac

SEQ ID NO: 17764 - DNA, 154 bp, Glycine max
  Clone ID: PAT_MRT3847_116045C.1
cttttatcaaaaacaaataatacttcagcgaataggggtgcccatgcgcccacccgattgaatgtggattcataaaagaatcttcttttatcaaactcaaatcagcctaatgtgatgtgggaaattaatccagggaatttgaccccccgggagg

SEQ ID NO: 17765 - DNA, 120 bp, Glycine max
  Clone ID: PAT_MRT3847_116046C.1
cgtacgccgggcaggacagggaggccacggaggtttgcttgaaaaacaatgcggggtgtttccccaggaccgatagagaggtcgaacctcataatatcagcccgggaatcatgtggatgg

SEQ ID NO: 17766 - DNA, 260 bp, Glycine max
  unsure (1)..(260): unsure at all n locations
  Clone ID: PAT_MRT3847_116047C.1
gnctaattgaactttcatggtacaacaaattacaaatgcatgaacatcacatggtccatgaattacattgtgaattggtcaaaattccatttgtcagcttcatcagtaaggtttaccctgtttgttaacccttttaagttgtacctttaattttttaccttctaatttgctttcattcatcatacttgttgcatgatgagcatcctttagggtatcaattcttacaatcccaatacattttgctatcaccggtttgcttt

SEQ ID NO: 17767 - DNA, 335 bp, Glycine max
  unsure (1)..(335): unsure at all n locations
  Clone ID: PAT_MRT3847_116048C.1
ttccnntttcaacacctcctccttctttggttattcaccgattgagttcattttttctctggcgtgaaaataccttgctgcggtcgtaactacagttgcagaagctcctacaaatgcgtctacagctgcggatgcttcaatatgtacccatactcgatctacactgaatctaccaccacctagacctttctcatgtgagtggcacctgttcaggctcaatttgagggtactgaaatctttgttcccactgagaaccatttcttcatatgtgcaccaaactactcctgcaaccccttcactatcaaagtaagtgtttatagagcactcttcaaaca

SEQ ID NO: 17768 - DNA, 719 bp, Glycine max
  unsure (1)..(719): unsure at all n locations
  Clone ID: PAT_MRT3847_116049C.1
ccacgcgtccgtgaggcttgataaaaggacagatgcatgttcagatggtgggtcatctggtgctaggtcacatcctaacataccttctctatcacctgttaaatcttttccagcttctcatcctgtgaactattattcttccagctcatataataccaattctccctattatccatctagttctattccattaacaagtagcccgatctctcctaattctcagccaccgatatttaattatcctgtgaaccatggtccacaaggtgcaaatttcatgaattcgtcatcacttggttccccacctattagtaaagctagcactccaacaggggttgcatctctggccattaagccaagtggtacgtctgctaatgtggactcatcattgtccaattccagtatttctgatgttcaaaatacagaatcccctagttcaacagcatcttgtgatgctagctcctctgtgctgcaaaaagggtctgaaacttgttcagaaatctccttaccacagtacaagttgtctatgattctgccccagttgtggataataatgaaggcgggagggaatctcttagtaggtccaactctttgaaggataagaaaccatggaagaaaggtcaattatcacaccatcaggtttctgtacaatctcccacagcggataatgtgcctttttgtgctgntgaccatggaatatatgatacccggagtttccaaac

SEQ ID NO: 17769 - DNA, 471 bp, Glycine max
  Clone ID: PAT_MRT3847_11604C.1
acatattatatgactcctaatttcaaaataaaatgtaccttttcttatttttccgactaaaattttactcctgaacatatccatgaaaaactgaatatacagaaactttaccctatttctacaaacgagaagcgaagcaccttcaacctgcttcaaccaaccattgatcaatcattatgatttatgacagaaagtataatgcaatcaattaaagtaaaacgaaatccccatgattagaggccatcatcctttcatgcagcctcatgctttcgtcaaagtgcaacaacaacaacaacaacaacaacgccttatcccactaggcggggtcggctacatgaatcaacttccgccataatgttctatcaagtaccatactttcgtcaaagtgcaacaaagaccaataattggtaaagggctcattgaatcattgtttgattttaggaatatgaattagagctccggcttccatga

SEQ ID NO: 17770 - DNA, 115 bp, Glycine max
  unsure (1)..(115): unsure at all n locations
  Clone ID: PAT_MRT3847_116050C.1
ccacgcgtncggaatttattcacaaaaaccttctctgttctcaattgggtgggcatggtgtgatttgatttcattgccatggcttccaaaagatcccaagcnagtagctgatgct

SEQ ID NO: 17771 - DNA, 1270 bp, Glycine max
  Clone ID: PAT_MRT3847_116051C.1
tcttagtgtttgttcaatgccctttcaggctgctcttgtcaaagatccgggtgtttctgtctaccgtgtgatttggagtcctgatggggctttatttggagttgcttactcaaggcacatcgttcagatatactcttaccatagtggggatgatgttcaacagcatctggagattgatgctcatgttggtggagtaaatgatctagcgttttctcacccaaataagcaactatgtgtcataacctgtggtgatgataagaccattaaggtttgggatgctgctacgggtgcgaaacagtatactttcgaaggtcatgaggctccagtttattctatctgtccgcattataaagaaaacattcagttcatcttttcaacggcattagatggaaagataaaagcatggttgtatgataatttgggatctcgtgttgattatgaagctcctggacgatggtgtacaaccatggcctatagtgctgatggtacaagactcttttcatgtgggacaagtaaggaaggggaatcctctattgttgagtggaatgaaagtgaaggagctgtgaaaaggacttatcaaggatttcggaaacgatctttgggtgttgtacaatttgatacaaccaaaaatcgatatttggctgcaggcgatgatttctccattaaattctgggatatggacaatattcagcttttgacaactgttgatgctgatgggggtctccctgcaagcccacgaatccgttttaacaaggatggagctcttttaactgtttctgcaaaagagaatggaattaaaatcttagccaatgcagatggtattcgtttgttacgcacattagaaaattctttatatgatacatcaagaacatcggaagtcatgacaaagcctacaataaatccaatttcagcagccgccgccgctgcaactagtgctgcacttggagagagggccttgtctgtgaatggggatgcccggaacttgggtgatgttaaacctagaataagtgaagaatccaatgataagtcaaaaatatggaagctaactgaaatcaatgaaccatctcaatgcagatccttgaagctacctgagaatgtcagagtgaacaagatatcaaggttgatatatactaattcaggtaatgctatcctggcattagcttcaaatgccattcatctgctctggaaatggcagcgaaatgaccgtaattcaactgtaaaggcctctgccagcgtgcaaccccagttgtggcaaccttctagtggcatc

SEQ ID NO: 17772 - DNA, 257 bp, Glycine max
  unsure (1)..(257): unsure at all n locations
  Clone ID: PAT_MRT3847_116052C.1
aattcggcaccaggctaattgtatgttatcagacatatctgctgctgatacaactttttcctatggggtgtctcgttgagcataatatatacataaaccaagggatatnnactcttgccttcatnaattcttgctttactgatgctctagttgagcatnnaatatatacataaatcaaggggatatacacnatgccttcataatntcttgctgccaatgctctaatagtatacctcagggaggggggggagaatgat

SEQ ID NO: 17773 - DNA, 692 bp, Glycine max
  unsure (1)..(692): unsure at all n locations
  Clone ID: PAT_MRT3847_116053C.1
ctaataattgagaaaatatatatattattataaaatataatatctatctttaatttttaccaataaaaaaattatttttaactaacatgataataaaatatttataccctgacatgtcaactccacaaatactaattaagttactaacatgtcaacttcatgacgcacacttcagattttattacaataaatttcctaaagaatgttaaatttatactataaaaaatgcaaatttcattatttttctccaaaattctacctactttttactacttgttaagactcagctaatcttgctagcatttgcatttacaactattaaattaccatccgattcacactcaagcgtacatcaaaaccaatattctaccttcctcttaataagataaagtttttctctttgtttcaacagtaccagatcccactgctgaggcagatgctggccataactgtgcatttttcacctttgatatgctagccaagacactcaatggagtcacatccccaaccactgtcaccttcttcgccgcaaaatctatgttgaaggaagtaactccttgcattctaaagaggtgtttcctcaccttcccttcacagcctttgcaatgcaaagatacccctcaatactacaacctgctaaaaanaattactcgatccaaatgttgaaattttgaagttaatttgctccattt

SEQ ID NO: 17774 - DNA, 665 bp, Glycine max
  Clone ID: PAT_MRT3847_116054C.1
ccgggatccagaaagcagaaggcaagatgatggggttattagggttttagagatgaaatgagaaggagaatggcatcgtcggcatttatggtgatctgcatcctgcactcggtgatagcaatgacatgtggggccctgatgatgttctacatgaaggaggtctacaccttcggccacggtgtgcaggccgccaccaagctcttgggatccacgccgcacgaccagcttctcatcaagacctccgattccttctccggcttgctcctcgtcgccattggcttcctcctcttcatggtgtcgtttgttaaagatcgtgactttcaggtcttcttcgccaagggttgcacgcttctccacctcttcatggccatgtggagggtctacttcgaacgcaaggtcgaggatctcgccttggattggctccgccagactgttggcgattttctcttggccctttcgtgggttttcttccttgtttactcttggagggagaagtatgattagcttccctctttcttcttcttcttcttttatttaatttatgtttccagctttggatttaccttgtaaaaatcggatctcacctgtgtttagagatacgttataaagttgtgaattttgccttcccctgcttcaattacagaaaatggtcattattgttcccc

SEQ ID NO: 17775 - DNA, 746 bp, Glycine max
  Clone ID: PAT_MRT3847_116055C.1
ataatctggtaagattattgaccattttctgtaattgaagcagggaaggcaaaattgacaagtttataacgtatctctaaccacagatttgataagaaagaaagccaggtgagatccgatttttacaaggtaaatccaaagctggaaacgtaaataaaaaaataaaaaagaaagagggaagctaatcatacttctccctccaagagtaaacaaggaagaaaacccacgaaagggccaagagaaaatcgccaacagtctggcggagccaatcccaagcgagatcctcaaccttgcgttcaaagtagaccctccacatcgccatgaagaggtggaggagcgtgcaacccttggcgaagaagacctgaaagtcacgatctttaacaaaagagaccatgaagaggaggaacccaattgcgacaaggagcaagccggagaaggaatcggaggtcttgatgagaagctggtcgtgcggcgtggatcccaagagcttggtggcggcctgcactccgtggccgaaggtgtagacctccttcatgtagaacatcatcagccccccacatgtcactgctattaacgagtgcaggatgcagatcaccagaaatgccgatgacgatgatgccattcgacttctcatttcatcatctctaaaaccctaataacctcatcatgcctttgctttgcttctggatgcacccacccatcctctatgttcttcaaaacctgaaactttctcgcagttgtttctg

SEQ ID NO: 17776 - DNA, 596 bp, Glycine max
  Clone ID: PAT_MRT3847_116056C.1
caataaaacatcccactgttgttcaccccaacctacaaacacaacaacttcactaacatgcacagtcgcacaccttcggatcattttcccaatttataacaatcctcaaactcgacacactggctacagcactcaatgtcactctgctgaacatcaggcataatctggtaagattattgaccattttctgtaattgaagcagggaaggcaaaattgacaagtttataacgtatctttctccctccaagagtaaacaaggaagaaaacccacgaaagggccaagagaaaatcgccaacagtctggcggagccaatcccaagcgagatcctcaaccttgcgttcaaagtagaccctccacatcgccatgaagaggtggaggagcgtgcaacccttggcgaagaagacctgaaagtcacgatctttaacaaaagagaccatgaagaggaggaacccaattgcgacaaggagcaagccggagaaggaatcggaggtcttgatgagaagctggtcgtgcggcgtggatcccaagagcttggtggcggcctgcactccgtggccgaaggtgtagacctccttcatgtagaacatcatcagcc

SEQ ID NO: 17777 - DNA, 263 bp, Glycine max
  Clone ID: PAT_MRT3847_116057C.1
caatttcatactatctctacaccgtgaagagaaggctaattccggtctattcctacaccataaacctttactcttaatgccctattacttgaatcatcttcatttaccttaacaaccaccaacaacacgcaccttatggtaacccggaacccttatcaaattccataaattacattccgggcaaaaaccctaccttcttgttcgggttcaaaagaaccacctggtccttcaaaccccgaaaatagacctttttatgccaccca

SEQ ID NO: 17778 - DNA, 515 bp, Glycine max
  Clone ID: PAT_MRT3847_116058C.1
cacacacagaattgtaatttagaagaattacggctgcgagaagacgacagaagggagggtatgagttgttgaaaggtcagaagcaaaagaagaatagattagcaaaggaaagcaatattgttccaaagggaaagggaaatggagtagtttcatgcacagaggaagttggaggggttgtgaggatgaagattgtggtgagaaagagcgagttaaagcagctggtggaagtgatgaatggtggtgtcaagtcaactatgcatgtgtcttcagtggaacaacgattgaatctgttgtggaagaaaaaatatttgtccagagccaaaggaaacccccaaaagtgctggagtcctgtcctacaaagcatccctgaagagaaattagtgtaactgtgtgtgtggatttttcattattattcattctagttttgatttgattggctaatgtataaactccagtccttttcgcaactccaagcaaaataagcaagtttaggttatgcatttttttttcttttt

SEQ ID NO: 17779 - DNA, 208 bp, Glycine max
  Clone ID: PAT_MRT3847_116059C.1
gctaaaggtgtgcttttagattttgttcctggttggggttacagctgtacgcatgtaactgagcttcttcaaaagtgatcattctattagttatgataatgatcagttttcagaaacatgatgtgatctctgcatgttcacactctaattgccttctaaatgcatctgtaaagatattacgttgatttcatacaatcttaattgtaat

SEQ ID NO: 17780 - DNA, 2882 bp, Glycine max
  unsure (1)..(2882): unsure at all n locations
  Clone ID: PAT_MRT3847_11605C.1
cgaattcgcgctctttacccggggatcctctagagtcgacctgcagtattctaaacattaaggcgttctatcatctgttgggattctgcaattgtaaatcccataaacatatgcttcatggggaattcatccatgtgttaatttcacataaaagaagaggtgttttgtcataatatcatgtcatattctcttcatgaaaaatttatatacagaaacaacacaagatttgatgttgctgaaaggaaaaatgttcctattcaaaatttgagtcagtatactgtgttaacaccccgttatgtttttaggttcttgtttgatcttttgaatgtatttttactcgatgcatggttgcatgtttcagattcctctcttcttcatgagggtagtttgtcctcatattccactattctattccttgttactttggcgatgtgggcctttnctcatgggtgattggttgaaatgggcattggtgagtgtcatccaatttgtgattggtaagcgcttctacattgcagccagcagagctcttagaaatggttctacgaacatggatgtcctggttggctgtggaactactgcttcttatggttattctgtttgggctcttctatatggtgctcttactggattttggtctccatcttactttgaaacaagtgctatgctcataacatttgtattgttgggcaagtatttggaatgccttgccaagggaaagacatctgatgctatcaagaaattagtagaacttactcctgcaacagctttactagttgtcaaagataaaggcggtaaatctattgaagtaagggaaattgattctttgcttattcaacctggggacacattgaaagttcttcctggtgcaaaggttcctgctgatggtattgttacttggggctcaagttatgtgaatgagagcatggtaactggtgaatctgtacctattatgaaggaggtgaatgcttccgttattggaggcacaataaatttgcatggcgtccttcacgttcaagctaccaaagtaggatctgatacagttttgagtcagattattagtttggttgagatggcccagatgtccaaagctcccatccagaagtttgctgattatgtagcaagcatatttgttcctacggttgtttctttagcattattgacactattgggttggtatgttgctgggtctattggagcttacccagaataatggctgccagaaaatggaaatcactttgtttttgccctaatgttctcaatatctgtagtagtgattgcatgtccctgtgcacttggcttggcaacaccaactgctgtcatggtggcaacaggggttggggctaacaatggagtgttaattaaaggaggagatgccttggaaagggctcagagggtgaagtatgtgatatttgataaaacaggcactctaactcagggaaaagccactgttactgcagccaagacattcacaggaatggaacgtggagaatttcttaaattggtggcttctgctgaggctagcaatgaacacccactagcaaaagcaattttagcatatgcacgccattttcatttccggctcgagctcttctgatactactggtaccgagattgatgctgaaaatgatgcaaagtctgggtggctttttgatgtctcagacttctctgctcttcctggaataggtgttcaatgttttatagacgggaagcttattttggttggtaacaggaagttgatggaggaaaatggcatagatatttcaacagaagtggaaaattttgtggtagagctggaagaaagtgcgaagacagggatactggttgcatataatgatatattaactggagtcttggggattgcagacccactaaagagagaggcttctgtagtcatagagggcctccagaaaatgggtgtcacacctgttatggttacaggagataactggagaacagctcgtgctgttgccaaggaggttggcatccaagatgttagggcagaggtcatgccagcgggaaaagctgacgttgttcgttcattccaaaaagatgggagcatacgctcatgggtgggtgatggtatcaatgattctcctgcattagctgctgctgatgttggtatggcaattggggctgggactgacatagcaatagaagctgctgagtatgtgctcatgagaaataacttggaagatgtgatcacagccatcgatctttcccggaagaccttttctcgtattcgattgaactatgtgtttgccatggcttacaatgttgtggctataccagttgctgctggtgtgttttatccttcactggggatcaagctgccaccatgggttgctggtgcatgcatggctctctcttctgtaagtgttgtatgctcttctttgcttcttaaaagatataaaagacccagacttactacaatacttgaaataattgtagaataataagaaaggaatgaaacctactagggtcggcctagtagtggggagatttgtgtagtttggacgagattttaggtttaaatctcgtcattattgttcacacaaaaaagagagaaataaatgagaataattataggttttagcttgtgagggtacaaatgacttttgatcggaacttctaattccagttttgtgcatgtttcttccgtttctgcattcctggggtgttgttgtaaatgtagtagctgccaattaattgtaaattgtacttggattgtaattggtgtagcactctcccctccaatacgcacaatttcactcctcttgatacgtaacttctcccatagagccatatgtaggggactatgtgaatgtgtatgtgtgcaaaagtgaatttatagtgtttctttgaatttatctaggtttttt

SEQ ID NO: 17781 - DNA, 390 bp, Glycine max
  Clone ID: PAT_MRT3847_116060C.1
tactgctgcgagaagacgacagaagggggaatgacattttaagagaagagaagagaggagagggggggagaaggggtttcttattgagagtgaccgagttttcatcatcttcagacctggtcggtcaaatagtgctgttgaagaggtgtgagcctctttaggagtctgaagtgaatgccctttgcctcaaagccatttaaatccttgtcccagagagcttctttcaaaggctctacacccccttctccatatttggtgatcttcacggtcagttttatgaccttactcaccttttcatagttcgatgtgtttgcccccctactaactttattttttctggggattttgctgctttccggttttccttccttctttcctcttttctttttc

SEQ ID NO: 17782 - DNA, 2020 bp, Glycine max
  Clone ID: PAT_MRT3847_116061C.1
gatgccaaacaaaatggagtgaggagcaaatgcgaagtatccaaagttgcctctcgaaacattcaaaagagtttcttctcctttcttacatcgtgccacggcgaagatgaagatagcgtggcttctgctgctcctcctggtatcagtgtccgtttcaagtttgggccctgaaatagccgtttcacccgcgggaacgtaccgttcctctagcttcccaaacagttgtcgtggccccatcctgcaatcgccactccacagcgcggtggatctcctccccgtcttcgtcggcgccgcctcttctccggacgacaatctcaagtggaaaggtgcatgcttctacgagaacaaagcctggatggtgtttcacaacaagagcggcactcaatttggcggtggaacccttcacctaaaggttagcaatgctcacagttggacatgcatggatctttatatttttgccaccccttatcgtgtaacatgggattattatttcctggcccgggagcatacgcttgagatcaaagagtgggaagggaaagctgagtacgagtatgtaaaaaaccatgggttatcaattttcctcttgcaagctgggatgttggggacccttcaagcactttgggaggtcttccctctatttacaaatactggatggggggagaactccaatattaagtttttggagaaacatatgggagcctcgagccgctcgagccggctcgagtgggttacaaatgtcagtgctgatgacattcattctggagatttccttgccgtttcgaaaattcgaggtcggtggggtgcttttgagactctagagaagtgggttagtggagcttatgctggccacactgctgtttgtctaagggactccagtgggaagctttgggttggagagtcaggacatgaaaatgaaaagggagaagatataattgctgtgataccatgggaagagtggtgggactttgaactgaataatgatgattccaatccccatattgctctgcttccattgcaccctgctttgcgtgccaggtttaatgagactgctgcatgggagtatgcactgagcatggcaggaaaaccatatggttaccataacatgatcttcagttggatagacactttaaatgaaaactatccaccccccttggatgctaatgtggttgcttgcgttatgacaatttggagtcaacttcaacctgaatatgcagcaaatatgtggaatgaagccttgaacaaacgacttggaactaaaggacttgacctttcagaagttttagtagaagttgaaaagcgtggatcatcttttgatgaactactgacaattcccgaacaggatgattggatctacagtgatggaaagtcgacttcttgcattgcttttatacttgagatgtacaaggaggcagggctgtttgatccggttgctagttctgttcaagtgacagagtttacgataaaagatgcttacatcctaaatttttttgagaacaattccactcgcttgccaaaatggtgcaatgatggagacacggtgaagcttccttattgtcaaattaaaggcaagtatcgaatggatttacctggatacaacaccatgcaaccatatcctcatatgaatgaaagatgtccatctcttcctccaaagtactccagaccccagaattgctagcagtcttcaatttttttcctccaatcggagggctgattgcgtgtgaccagattttttggtcttctagatttggattgcttaggagattccaaatgaattattgtttgtatccatttaattttaaaaaattattcaaacaattagatattttgcatatatttattcttacaacttatattagacattcatgtaatttggattatctatgtagccagactcaacatactgtaaatataaggaacttgaatatatgtagctcatgcaaaattaacttgaataagtgtcatgtaaaatattttgtaagtcttgcatatttttttctctaaaatgggtttggcaactttg

SEQ ID NO: 17783 - DNA, 741 bp, Glycine max
  Clone ID: PAT_MRT3847_116062C.1
gtttcttctcctttcttccatcgtgctcgtgccatggcgaagatgaagatagcgtggcttctgctgctcctcctggtatcagtgtgcgtaacggcctctcaagtttgggccctgaaatcgccgtttcacccgcgagacgtgcttcctctgctgccgagacagctgtcgtggcccatcctcaatcgcctccacagcgcggtggatctcctccccgtcttcgtcggcgccgccttttcgccggtcgacaatctcaagtggaaaggcgcctgcttctacgagaacaaagcctggatggtgtttcacaacaagagtggcactcaatatggcggtggaacccttcacatcaaggtcgcttccttctcaagtgttggaatggaaatctaggttagcaatgctcacagttggacgtgcatggatctttatatttttgccagcccttatcgtgtgacatgggattattatttcctggcccgggagcatacgcttgagatcaaagagtgggaagggaaagctgagtatgagtatgtaaaaaaccatgggttatcaattttcctcttgcaagctgggatgttggggacccttgaagcactttgggaggtctttcctctatttacaaatactggatggggggagaactcccacattaaatttttggaaaaacatatgggagcttcttttgaagtgcgccctcagccatttgttacaaatgtcagggttgatgacattcattctggagatttc

SEQ ID NO: 17784 - DNA, 202 bp, Glycine max
  Clone ID: PAT_MRT3847_116063C.1
cttgaacatctctatgatcttcactatggtctttttgtgcaaatatatgggtaacgtgggtgtaaatggttttgctcttccatatggagctatttttaactatgctgacgctatacgtgggactctagaagctgttaataatcaactatctatgcctaggtaccatacttatggttgaacatactccaaacaatcttttgga

SEQ ID NO: 17785 - DNA, 181 bp, Glycine max
  Clone ID: PAT_MRT3847_116064C.1
tcaaacataaaccctgaagtactcatccacccagaatggatcttttgatttacgtctccctttgtttcaccttttctttgtattatagatccaagatacctaaactatgtgacattgtatcattggtatggatggtatctaattttctcctccaagcctgtacaagggggggggggggggg

SEQ ID NO: 17786 - DNA, 344 bp, Glycine max
  Clone ID: PAT_MRT3847_116065C.1
tttttaatgatgacagagatctctaaccacttggttgaaccaatgcaactaagttaagaagcttgacccctctaaatttttgtaaataaagtgaagacgcacaaaatttttatcggtgatcactaatcggcaaaaaagggggggtctttgtttttgggcccagggtatgaatcataggcgtgctgtatggaaacaaacaaaaataccctatggcttggggtccaacccgaaaggagattcacaattgtgatggacatgatagcactcttaaggagagtgatttaactctggcaaatgtcaaatagcctgtgtgacctggagcttcaccacatggtttagccatg

SEQ ID NO: 17787 - DNA, 1012 bp, Glycine max
  unsure (1)..(1012): unsure at all n locations
  Clone ID: PAT_MRT3847_116066C.1
ctcatcctttttttcactttcacctttcttattgttacaggtatttcatatttgtttttaatttccctcatttttgtttaatggatttcttgatgtttttcatttgagaaatcaaaagggttttgtccaacaagaagctgtgcgtatgtggtgattctcgtccatctttttcttcttttcattttcacttttgtgattctaatgtcaaagtttcttgatgtttttttattttaggaatcagaaaggtttccagcagcagtaagtagtcatggctcagttggctgagtctaattattgtcaggtttgcacaggtgtgataagagatggagccttaagtggatcaattgctcaaggcctgatttcaagagagttacattatcacaagaagaaaaaatcattattgaacttcggctcgagctttttcttatttttgctggacatccattttttcattaatataactgctagatgttgcagtttttttgaatatcttcccagtctagaaggtatgttgtcttagcttccttttaagagttatgtgagttcaaatatcttccttgtgagatatggcttcagctctgtgcatcattataaaatttcactgacataatcactttgtgtatattaggactgtaagactacttaataagtatgagctacttttttatttcctatctaccacttaataagtatctggagctattacaacaaatgcaaaatcttcctcctccattagttgagttacttttttatttcctatctgtatatacaaagattttatatatattcataagatatatgatcctatgcattgaattaatttcaatttcaggctcaattaaatcatttattaagttttcgtaaatgttggtacatcactaganactttcatttcagcatagaggataatattgcatcggattaagtntattgcataaaatagtttatgacacctcttagagatcccaatatgcaatgatatntctctattttttggtctgaaattatgatc

SEQ ID NO: 17788 - DNA, 238 bp, Glycine max
  Clone ID: PAT_MRT3847_116067C.1
tttttaaaagaaagaaaccattagtccattaaaggggagggggtccaaaagaggaagggcatttcaaactaaccattaataaatataaaccaagacaaagtacaaatcagtacattactacaaagaagatgtggtaatactacaaaaattccataaacacaaatggcactatgataaaaacatatacatatcctattaaactcgcatacataatattaccatttgcaattatcattca

SEQ ID NO: 17789 - DNA, 677 bp, Glycine max
  Clone ID: PAT_MRT3847_116068C.1
gatgctaagtaaatcccaaatactatgtgttctatctacatagcatctttgtatggaatctaaataattttcaacttgcaactcttttagttttgctaaacttttgttgatatctcattggatatattggaacttacctactggtgcatgctggttggttaggttttcagcttcactgctattaactaaaggactaattgtacattttgatgattaaagaattcatgtgtgtttgtcatggtcagactataatactgttttttcacttcttcataggttatatgtttcttttaagtttttttttttctttttcattttgataatgttccactatctaatagtgatttttatgatatctaattgatattgacattgaaaataaaactgcctctttttttttatctatatcatactcaaagattttgttcttgtttaattcataatataatttcagaaaagctttggttttatttccaggaatgtattaataatgtgcctgctttctgtatataatccagccttggttgtttttcttttcggtttctttttaatccagtaaactagtaagttctgatgtttttatgatgcagtttttgtcactattggattccagtgcaacatttaactgtgaagttattcgggactgctatgaggcttttgcattatattgctttgaa

SEQ ID NO: 17790 - DNA, 284 bp, Glycine max
  Clone ID: PAT_MRT3847_116069C.1
gggttgggtttttttttttttttattttacccaagggaatatgggacaaaaccaaaatttgggggtgggttggcacataacctacagagccttggaaactaaaagcaataaaatatcttcgccattaggaatgtgaataccaataccgggggtgggtaacataaccctgttgacagaaccaatgtccggttgaaattttctacgaaacattattttttttggatgaaaagaaaagggggaaggtctttattttaccgccgaatttttagcaaaaaggggggagc

SEQ ID NO: 17791 - DNA, 231 bp, Glycine max
  Clone ID: PAT_MRT3847_11606C.1
cagggtgcaggaggtggggtgagtgttcacaacattcgtgccacaggaagtgacatgcgtggggcaaatggggcatcaaatgggattgtgccaatgctgcgtgtgtgcaacgatactgcgccctatcgggagcagggggggggcgagagggaaaggggcgtttgctgtgtgcctggggcgatgggatgctgatatattccagttcttgggtttaaggagaaaccatgggaa

SEQ ID NO: 17792 - DNA, 325 bp, Glycine max
  Clone ID: PAT_MRT3847_116070C.1
cctacgctttcgaccacgcgtacgaccacgcgtgcgcgcgcgcatgctgtgacaccgtatacggggaccaatgtggaagaggctcacgactaagctgatgttgcacttgataaaagcgtatctacattggatggcatagagtgaaccaaggatgagaatctgcttgccagcgaaattttggaccaacttaagacaacactgtttcactatgactccctacagagtttaatctggtggacggcttctagttagaacaaaacgtgaggctgattatgatgaaatgggacaagatcaatatggaagaggggatcaaccctatcttcat

SEQ ID NO: 17793 - DNA, 281 bp, Glycine max
  Clone ID: PAT_MRT3847_116071C.1
caaattaacacaaaaacccctactttctctctgtaagctctttcttctgttcttgtctctcgcctgcaccgccattgccgacgatggcgtgttcatgtcgaagctcgcgaaggcgctgatcccgtcgccgtccgggtggacggggagcagcttctgccaatggacaggcgtgaagtgcagcgccaaccgcgtcaccataatcaaaatcgcttctcagtcactcggcggaactcttcctccggatctgaactcgctctcccaactcacctcgctctctctcc

SEQ ID NO: 17794 - DNA, 531 bp, Glycine max
  Clone ID: PAT_MRT3847_116072C.1
aaaaactgaataaggatcatttttaatgtattgattaaagagaatgtaatatttaatatattaattaaattataaaaatgaattaaactgcgtagtttataaatttatatagttctacttctatatatacattacagttaatcacatgatttagttgaattgtaaaagaagagtatggactgtctttaatgtataaattaaatagaattaaatatattaagttaattagaaaaatgaactaaaatttcctatttatttatttttatgcattttagtaaaattttaaattctggtaaaaaaaggtaaaatttaaaataaaaattatattcagtaatatgatttttttgctgcaacaataatgataatagaacttaactaaattgatagtgtcaaaattttggcaaccattcaatcacacattattatcgatgataattttttattttgcatgataattatatattaaaaatcatgtacaatatatttttttattacttgataatggaaaaaaatttataccatcaatgaaga

SEQ ID NO: 17795 - DNA, 225 bp, Glycine max
  Clone ID: PAT_MRT3847_116073C.1
gtgttgttttttttttttttttttttttttttttttttatttgaataagcgaaaattggccttaatttccccccccaaaaaaagtccgcatttgatatgcgcccttgcattcacacatgaatcattggactggtgcaattggtggctcacgtttcaacaagacatgagcccccggaagtgaaatatttctgaaatctctgttgtgggcatatattttggcttcag

SEQ ID NO: 17796 - DNA, 382 bp, Glycine max
  Clone ID: PAT_MRT3847_116074C.1
ccggcgaagcaatagccgtctacacctgtgtgtctatctctctagatcagcaatggctagagcgaagagcgagcccatgaaggaccctatcttgaaccgcgtcagcgcaagcgacggtggatacaggacagacaacgttcgtgtcaaggtacctcaccggtgaatctgagaaaaaacactaaccgaccataggagtggaggatcacccattggatttcttgacaaactgcggaaagatccgcttctacagccggtgtactgctggtcaacagaagaatggggggctaagagatggattttttatccatgggcactgtgccattataaggtgtgatgttactgcaccccttaccagtcatacaagatcctacctggcaccggt

SEQ ID NO: 17797 - DNA, 518 bp, Glycine max
  Clone ID: PAT_MRT3847_116075C.1
aaatttccgtgttgaagtgcgattagaacttagaagcatcaattcaagctccaatcttcgacactgtgcgtaattgttcaaactgattgaaaaggctttttgaattagttaattgcgttgtagtcacttaatacattgaaagcagagtatgccgagtaggaatagtgccaaaactccaaagaaggatggaaacaactcaaattccagtctttcttctctagaaaataatttctatgaaggagaacgtctcaccaatttgctccaatcaatccgtaggtataatgcatgtttttcacatgtgatgcttcatgcttcctgtttttattattcttccaacatgatttgatgatttgatccacacggccattgcttattgaagctgaattggtggccagagagaatttttaacagtttaagagtgaactactaatcaactgccttcaattttatggtgcaagttccaacctgatcttactaatgcttattctgttgaacagggggatccaatctgcaagaca

SEQ ID NO: 17798 - DNA, 187 bp, Glycine max
  Clone ID: PAT_MRT3847_116076C.1
agccggacccaattctataaaccatgcccgctagacttaaaaaattatagtgttctccaacgaaccacaaaggccaatatttttccatgttaaaccgagccgggacctaacctgttgtacttcattggcacaaaaagggaaccccaagtgaaaaaggacgggctcattaataggcttcatatacaaa

SEQ ID NO: 17799 - DNA, 506 bp, Glycine max
  Clone ID: PAT_MRT3847_116077C.1
gggatgaagggatagaaaaaggtgttaagcccactttggttacttgcaacactggtataaagggccatttgcgggctggcaatgtgttaaaggcaaatgacttcttcgaaaagatgattttggaaggagtttctcctgattgcatcacgtataatactcttataaatggttttgtaaaggaagagaatttcgacagggcttttgtcttggttaataacatggaagaaaaagggctactgccagatgtcatcacttataatgcaattctcggtggatattgtaggcaaggcagaatgcgggaggctgagatggtgttactcaagatgattgactgtggcatcaatcctgataaatcaacatacacatcattgataaatgggcatgtatctctagacaacttgaaagaagcattccgtttccacgatgaaatgctgcaaagcggatttgtgccatacgaccaattctgatgcttttaccgctgcagctcttgttacagatacctgata

SEQ ID NO: 17800 - DNA, 220 bp, Glycine max
  Clone ID: PAT_MRT3847_116078C.1
ctctgcaaagagggcaactaaagtgattagtgacccacttttcaacacaatcacagtggaaatagtggtcacaccccaacaaaaccttcactttctcaccagctctaaactccccaaagcaaatacagcactccatttcgtcccacacgctttcctcgcaatccaacagcgcctagtaaaagattataggcaatttcttaataaaagctaaatccattcc

SEQ ID NO: 17801 - DNA, 218 bp, Glycine max
  unsure (1)..(218): unsure at all n locations
  Clone ID: PAT_MRT3847_116079C.1
gagtaaacatgtaattctaaaattttcaaagtccattgtagcttttcttcatgattcttgatcgtttacatatatatgtgcattctcatttttcagatacatgttcaataatgattaaacatacgatacggcttctacttagaatgggttaatatctctnctcttcagtgggnttggaaaggaatggttggatttttttttctggtccaaggtggggg

SEQ ID NO: 17802 - DNA, 1020 bp, Glycine max
  Clone ID: PAT_MRT3847_11607C.1
ggggattgcagacccactaaagagagaggctgctgtagttatagagggcctccagaaaatgggtgtcaaacctgttatggttacaggagataactggagaacagctcgcgctgttgccaaggaggttggcatccaagatgttagggcagaggttatgccagcaggaaaagctgatgttgtacgttcattccaaaaagatgggagcatagttgcaatggtgggtgatggtatcaatgattctcctgcattagctgctgctgatgttggtatggcgattggggcaggaactgacattgcaatagaagctgctgagtatgtcctcatgagaaatagcttggaagatgtaatcacagccatcgatctttcacggaagacctttactcgtattcgattgaattacgtgtttgccatggcttacaatgttgtggctataccagttgctgctggtgtgttttatccttcactggggctcaagctgccaccatgggttgctggtgcatgcatggctctctcttctgtaagtgtcgtatgctcttctttgcttctcaaaagatatagaagacccagacttactacaatacttgaaatagttgtagaataacgagaaaggaatgaaacctactagcgtcggcctagtagtgggggagatttgtgtagtttggacgagattttttttttttagaaaaatctcgtcatcattgtacacacccaaaaaagtgagagaaagaaatgagaataatcattgtaggttttagcttgtgagggtacaaatgacttttgatcggaacttgtaattcaagttttgtgcatgttccgtccagttgtgctgttgtaactgtagtctgtagtagctgccaaatgccaattaattgtaaattgtactttgactgtaattggtgtggcactctcccctccaatacacacaatttcactcgtctttatttatgcgtaacttcttccatggagccatccatatatacaaaagcaaagaggttgatgagattttccaacctcgtgagg

SEQ ID NO: 17803 - DNA, 250 bp, Glycine max
  Clone ID: PAT_MRT3847_116080C.1
ctggatctcttgcaagtgcaatcaaggacttttcagctagtgaaaattcttgcctggctgaacagtttgataagacgccggacactggcaacatagaagaagctgaatcatccttacgtgagagtggcatcttgaactatgaggaagctagagctctgctaggaagatatgaatatcagaaagggaatatagtagctgctttgcatgtctttgagggaatagatataggtgttgtgactcctaagatcaa

SEQ ID NO: 17804 - DNA, 338 bp, Glycine max
  Clone ID: PAT_MRT3847_116081C.1
tgtcgtccgtgtttttgtgttgtgttgtgtacacagagagagagagagagagagaggctgctatggggaacagagctatgttaaccttgctactactcctatttttctggaccaattggtttccttccgcctttgttttttgcttagcatacccaccaattgcccttagttccggttcgatggaattccaaaccacggcggaggtttggcccagtaccctcttatctccagtgattaagcccacaaccttaccattggcgtttaggtgacattaccttatgggaacaatctttatcacaaggagaacacaacacatggttgtattgggtttacaactc

SEQ ID NO: 17805 - DNA, 385 bp, Glycine max
  unsure (1)..(385): unsure at all n locations
  Clone ID: PAT_MRT3847_116082C.1
gtttcagcagcagcatgttggatttctctaacaataacaccgatgcgaggcctcctccaccagatccatcctcagagtgtgatagcgctgcaactggtggggcattcaagaaagctagggttcaaccgcccacaactcaatcgaccttcaagactgacacggcttctgtcttattagaagctattggctatatcagattccttcagagtcaaattgaggcccttagcttaccatacttgggcagtggatcaaaacatgagacagcaacaatccgttcaaggagagaacaattgtatattccctgaagaccccggtcagttgctgaatgaaaactgtttgaagaggaaagcanctagtgagcaggattctcaagaagaaccaaaga

SEQ ID NO: 17806 - DNA, 1013 bp, Glycine max
  Clone ID: PAT_MRT3847_116083C.1
aatcttaaaggcttaaatagtggatatgcagattatgcattagtaatagcttttatgatctcctgtttagttactgctaaagaagtagcaatgaaaataatcatacaattattgcatatatatacatacattaattaatctagcattgttcgatcgatcgacctcttaattaattaagctagtgaaaataaatagagcctgatttccgtgaattaaggagtcttcacaagggcttgcaaaatatatactacttgacttgactggcagcatacattttattcaggaatgctgtatagcatcatgagcaatcagccttaattaggttttgcagcagattgactgctaatgatgttatacaatctccatgaatattatattttcctctctgctgtatatatgctgcatatgcatgataacccattaatatatagtaagttgagcaatctaccgaaatcccccaccaaaagcaggagcccaatagtcagctccattgtcacttccaacttggagcgtacatgacactggaaccaggcacaaccctctactcctcaggtctttctttgcttcttcttgagaatcctgctcactactagctgctttcctcttcaaacagttttcattcagcaactgaccggggtcttcagggaatatacaattcttctctccttgaacggattgttggtgcctcatgtttcctgatccactgcccaagtatggtaagctaagggcctcaatttgactctgaaggaatctgatatacccaatagcttctaataagacagaagccgtgtcagtctttccgaatggggaaacgagttgatgaagggcggtaattctgtcacctaatttctccttcctaaccttgaaggtcgactgagttgtgggcggttgaaccctagctttcttgaatgccccaccagttgcagtactgctattacacttcaaattaaaaaacaaaaaaatcgttaaaattataatgcaatagaaaaagaaatacttaacccacgcgtccg

SEQ ID NO: 17807 - DNA, 639 bp, Glycine max
  Clone ID: PAT_MRT3847_116084C.1
tccccaccaaaagcaggagcccaatagtcagctccattgtcacttccaacttggagcgtacatgacactggaaccaggcacaaccctctactcctcaggtctttctttgcttcttcttgagaatcctgctcactactagctgctttcctcttcaaacagttttcattcagcaactgaccggggtcttcagggaatatccattcttctctccctggaacggattgttggtgcctcatgtttcctgatccactgcccaagtatggtaagctaagggctctcgtggttgtttgcaaaaatcgacagagcgaggagaataaacattaatgacctcaatttgactctgaaggaatctgatatacccaatagcttctaataagacagaagccgtgtcagtctttccgaatggggaaacgagttgatgaagggcggtaattctgtcacctaatttctccttcctaaccttgaaggtcgactgagttgtgggcggttgaaccctagctttcttgaatgccccaccagttgcagtactgctattacactctgaggatggatctggtggaggaggcctcgcatcggcgttattgttggagaaatccaacatgctgctgctgaaacttgttacacatgatttgggggaag

SEQ ID NO: 17808 - DNA, 1806 bp, Glycine max
  Clone ID: PAT_MRT3847_116085C.1
atgatcttctgtttaattactgctaaagaagtagtagcattgaaaataatcatacaattattgcatatatacacaattatcgaacattgtacgatcgacctcttaattaattaagctagtgaaaataactaaagcttgatttccgtgaattaaggagtcttaacaagggcttgcaaatatataacttgactggcagcatacattttattcaggaattgcgtatagcatcatgagcaatcagccttaattaggttttgcagcagattgactgctaatgatgttatacaatctccatgaatatattttctctctctgtatgctgcatatgataacctattaatagtaagttaagcaatctaccgaaatcccccaccaaaagcaggagcccaatagtcagctccattgtcacttccaacttgcagcgtgcatgacactggaaccaagcataaccctctactcctcaggtctttctttggttcttcttgagaatcctgctcactagctgctttcctcttcaaacagttttcattcagcaactgaccggggtcttcagggaatatacaattgttctctccttgaaccagaaatggtgggttggtattatttcttacggattgttgctgtctcatgtttcctgatccactgcccaagtatggtaagctaagggcctcaatttgactctgaaggaatctgatatagccaatagcttctaataagacagaagccgtgtcagtctttccgaatggggaaacgagttgatgaagggcggtaattctgtcacctaatttctccttcctaaccttgaaggtcgattgagttgtgggcggttgaaccctagctttcttgaatgccccaccagttgcagcgctatcacactctgaggatggatctggtggaggaggcctcgcatcggtgttattgttagagaaatccaacatgctgctgctgaaacttgttacacatgatttgggggaagaagcaggcactatttgagaccatgtaattggctttgctgcttgaaactcttcgtttgttccatgcccatacacatagctgttcaccgagctttcttgcttaacatcaacaataggagcacttggagcctggcttagcatttgttgctcccagttctccaacttctttgactgaatctggcacataccccctttctcttcttcagacaccatcccactcatgagtagctggctccatgactcgggtagctcttgattgttgtcatgccaagaaggaagaggaagagaagaagtgggggtataataaggagttagaaagttggaaggagtggagaagaaaggaggagaagcttgtggaggaggaggaggagggcgcatggtgttgatgttccaccaattgttagggttcccggccatcatttgtttcaccggtgagctttgcaaaacacctctattcatgcctttcttaatttctacgatctcgatctacaaaagagaaaagaaagtttgctttctcttttttgatgttgttccaacccaagcctaaacagggtcttgtagagactttgagagaggtcctctcctgtgggttgattaagtagagggaacactactactgcttggtactgttttttagagaatttgaataatcatggagttttgagaaccttttgtctttgttttctctcttcttctttttttttccctttctttattgcttttcttttcttttctttctttctttcatgtttttcttttcttcctttgcttttctatttcccctagctagctgcttgcttttgctttatcttaaagagggcggaagaatggg

SEQ ID NO: 17809 - DNA, 1230 bp, Glycine max
  Clone ID: PAT_MRT3847_116086C.1
tccaaagctagctcggccccatacggctgcgagccgacgtcagaagcagggtctctcaatcacttcacgcacactgtcacaggtgtagcggcgaaactgaggtcgtagaaagaatggcgaaaacgacgtcgttgttgctctttacactgctcctcttcggaaccttagctctcatccaggcgaacacacactctcatagctgtagcggcgacactaagatcggagaaagaatggcgaaaacgacgtcgttgctgctctttacactgctcctcttcggaaccctagctctcatccaggcgaagaaatcgaaggaggatttgaaggaggtgacccacaaggtttactttgatgttgagattaatggaaaagaagcaggtcgtattgtaatgggtctttatgggaaggctgttccaaaaactgcagaaaacttccgagcactttgcacaggggaaaagggaactggtaaaagtggaaagcctctccattacaaaggtagctcattccatagaattattcctagctttatgcttcaaggaggtgattttacacaaggaaatggaatgggtggagaatcaatttacggagagaagtttgctgatgagaacttcaagttaaagcatactggaccaggacttctatcaatggcaaatgctggtcctaataccaatggttcacaatttttcattacaactgtgacaactagctggttggacggaaggcatgttgtttttggtaaagttctttctggaatggatgttgtttacaagattgaagctgaaggaacacaaagtggcactcccaagagcaaggttgtgattgttgacagtggtgaactccctctataattgtacttcttgattctcaatcaggacttgttgaaggtgttcccagttttcatttcaattccatctacgagactacttatcttttataagcatgttctaatagatcaatgactagttgtatgtttgtgatacttattagataaagtttttccccctaatgataatatggaaaatggcatttgtgaacatgaacattgtagagggaaatctaagtgaacatggctgttgaatattagcagctgcccttaatgtggagtatcttgagctaggaaagaaattggcacaccatcaatgtatgttctgcagttatgttgcaattagtgtaacattccatttttcataaactaatttaaaaagaattgttatttataaataaatagaattt

SEQ ID NO: 17810 - DNA, 420 bp, Glycine max
  Clone ID: PAT_MRT3847_116087C.1
cctttttgtgcgggcgggtgtgagctggttaatgaggagacctgatattgttgttggtctccataggaaccctaacccctttggaatcggaggacgaaccatgaatggaaggagtggtgcccgggaacaagcaccagatcatggtctatttcttgctagaggtcgttcagggccagaccgtcttgactgtacggcagttcctccagggcacaagttgaaagcttgaggaggttcttgggctgttattgataaggagggcaagcggagcggtgaagttggaatcaacccatactccatgggatggactgttttggccaagaaatgactgagtatgggcagcgaaactctgtgtggcgagaatactagaggtgatggtttggttaccaagccagagatgagctcgaagggagacatgataaa

SEQ ID NO: 17811 - DNA, 872 bp, Glycine max
  unsure (1)..(872): unsure at all n locations
  Clone ID: PAT_MRT3847_116088C.1
gctctgtgaatcacttcacgcacactgtcacaggtgtagcggcgaaactgaggtcgtagaaagaatggcgaaaacgacgtcgttgttgctctttacactgctcctcttcggaaccttagctctcatccaggcgaagaaatcgaaggaggatttgaaggaagtgacccacaaggtttactttgatgttgagattaatggaaaagaagcaggtcgtattgtgatgggtctttttggaaaggctgttccaaaaactgcagaaaactttcgagctctttgcactggggaaaagggaactggtaaaagtggcaagcctctccattacaaaggtagctcattccatagaattattcctagctttatgctccaaggaggtgattttacacatggcaatggtatgggtggagaatcaatttatggagagaagtttgctgatgagaacttcaagttaaagcatactggaccaggacttctatcaatggcaaatgctggtcctgacaccaatggctcacaatttttcattacaaccgtgacaactagctggttggacggaaggcatgttgtttttggtagagttctttctggattggatgttgtttacaatattgaagctgaaggaacacaaagtggcactcccaagagcaaggttgtgattgttgacagtggtgaactccctctataattgtacttccttgattctcaaccaggaatagttgaaggtgttatcagttttcatttcgattccatctacgagactacttaacttttataagcatgttctaatagatcaatgggttagtntgtggggttgtgatactncagtcgatgaagtttccccctaaatgataaaatgaaaaatggcatttgtgaacatg

SEQ ID NO: 17812 - DNA, 403 bp, Glycine max
  Clone ID: PAT_MRT3847_116089C.1
cgttctttttttacatgtctttcatatgtatgtatatattgtggattatgtgttatgaaatgataacttaaagcatacaaagtgtgacttgtgtcataatgttggtccatattattatcttaatacaaagatgacatacacatgacatgaatttatatatattttaaaaaaactcaatctcaaaccaccgagcatatactcggttattgtgaaccaaattcatatgtactgcacagcacgcattatcaaaacatggaatgccttttggtctataatgttcttctaccttaggaattcatccagattcgactttaactatatctaaagtatttccaggtttcattgttcccaatacttttcgattaatggtaaatgtctgaacactacattggatcctttacta

SEQ ID NO: 17813 - DNA, 653 bp, Glycine max
  Clone ID: PAT_MRT3847_11608C.1
ccttagaaagcactattataaaaagcattattagaaagaaataacattcttttaaaaaaatattatattgcttcctaggataagcaccaatttcttgcttctccttaatagcagatttcccactttttttgtctatttaaaagaaattgagaccttggtcaaataggctaacacctcaaaaaattaaaagtgcttttttacccacacaaaaagtagtttttattgattttacactgcagctaaacactaaatccgggagaaattgttacactatattgttgattgtgtaacaacaacattgcaatgcatagacatcatcaattccttcctttgctccatatacaacagttgaaagttgaaacatacggattgacgatataaggccacaatgtttcatctttaccatcttagttgtatattaaggttggctctttgctatgtttttcaagacaactagtgattaatggacgatgtacaacacagaaattagctcattttaagaagcttcaatcagaaaatttttatgtatatgctaatgaaggctttctcttttaaaatattctgattaagtaaacctcaatcttgatacgtacgtactttgagttattccattaaaattaagataaataaaaaagtaaagatggaagacaaat

SEQ ID NO: 17814 - DNA, 454 bp, Glycine max
  Clone ID: PAT_MRT3847_116090C.1
cgtgcgcattaataagcttaccaatataaattcaaatgaagtttatgtttctttgtgttctatatgtgtgccctaggcatttaaatttattgacctggaggatatgatcacttcatcatgtgttgattagcatatcaatagtttgcatatggtcactgacaatgctttattccaataactaaaatgaagaataacttcatatgacttgtcttgtcgtattgttgatgttgagatcaagcctgtggaaggtgaactttctaaatcactgttggaaaacaacaaatgctatttactggactgtggtgctgaggtgtttgtctgggttggtcgtgtgacacaagttgaagaacgaaaatcagcctgccaagccgttgaggtaaggccattgtagaatctataatctaattcattttcatttggttgcgaaattggattgattgattctaccaatacc

SEQ ID NO: 17815 - DNA, 168 bp, Glycine max
  Clone ID: PAT_MRT3847_116091C.1
ggctcgagcactgtcatccatggggcatacctattttctatgacggatctagatgtgggacctggggccatctggctaaacctgatgacgcaatgcattgcctatcatggggcctatatggcaaactaatgtctttttggggccattgtcttcttgcctgcacctgcc

SEQ ID NO: 17816 - DNA, 499 bp, Glycine max
  Clone ID: PAT_MRT3847_116092C.1
gggacaaaaccgtcaatcactttatataacttccaggatttccctactttattggagttggtaaaatgaaatggtttaagaattgaaggaaaagaattcctagttgatttttggaattcttctaaatttcacaacagcttatttggagttctttttggcatcttaattttaacttaacaacttggaaataatgctttaataccaaaataaccattcaaaatttctaaaataacattgtaaattatttttcaaaggtaatcataatctaactctgcccatggtctcatagccagtcccaaatccaatttaagggaaagggttgtgattagcccttaatcattaacatataacttgttgaaaccccaaacaatcaattaatctatgatggtgtcactatcatgtgtggcagtttaagatggttgaaacatcaaaagatatgcggatacatacagataggttgtgacaatatccttcaatatgtaaatgaacttttgttcat

SEQ ID NO: 17817 - DNA, 148 bp, Glycine max
  Clone ID: PAT_MRT3847_116093C.1
ttgtctttccatggtccgtgatctcaggcgctagcttatcagttattattgttgtcgttgaaggttgtgttcactttttctttgtactttcccgtgcaaagatcataaggaccctattaccttccaacctacaaaatctttcatctct

SEQ ID NO: 17818 - DNA, 470 bp, Glycine max
  Clone ID: PAT_MRT3847_116094C.1
gtaatgaaaattgagcatataattaaactcaggctcaaacaatctaaattacacaattaattcaatcctaactcatctctgctactagataactaagccttgataaatgcttataataaataaacatcgctgctgcatcaacatttatcgcactaaaatgcagtagccgcaatagttacacttttgatttacacgttttaaattgaaattttagttattttagtcaggaagctcagaacgctccctctttgctgtttctatcattgtacataagaacttaatagggttgcattcaaaaggatttgcaagtgcagcatgtgccaaaaatggaagctttctcaacgaccttccactcattccctcacatgcctctgcagtttcaagtagttgtttgcacaattgcatgaatggagcatcctcatgaaaatctggagtggtcaacctatccttcgcactagcataatttggaa

SEQ ID NO: 17819 - DNA, 478 bp, Glycine max
  Clone ID: PAT_MRT3847_116095C.1
aattcggctcgaggtctgcaccatttgtagtggctgctatcaaggcagtggaaaaactcttttcctccaatgctaatgggtaattggggatgagctaggaaatacaggggtggatcagggacgttttagaggcgagtttgatgcctttgcttttttaaaaaaaacaagaagaaactgaaactgagaactcattaggagttcatagggggatgcatgtttacaatgcgattgctatgggggctaaggctgcccctactcatactgattcaacttctatactccaacaaatcaacctacaaattatacgctgaggctttgttcactttcaagggttctcttggaggtccacagcaattaggatgcagcattgtgaaatatccatgtcaaatgcaatggccttgtcttgactgctataaactaaaagatccaggtggaataacagcaaagatagatgggaataacgacgttccaacactta

SEQ ID NO: 17820 - DNA, 1143 bp, Glycine max
  Clone ID: PAT_MRT3847_116096C.1
cttgatggcatttgtttatacaattggcggattccttactcattcttctctctctcattactttatgacgacaccggaaaaaacaaatcaccaccaagagagagataacgatgaaaagtggcgaatcccaaatgccaacaacaacaaatttaccaaattaaattaattaatgaacaaaattcaatatgcaggaaattacctaattaattaaattaaactaatcagttattactagcataggaaataatcatcatcagaagaagaagtcaagctgagaagttgctccaagtactcagaacccaaatcctccaacaccagcacattttgtgaaataatattcacattttgtgattccattccatggtcccttttgttttttttgttggtagcctggattttcttctcatggtgtgttttctcttgagtgccaacactggagaggaaccatcttccaatgatattggcttattattactctgcatgtctttgagtgattccctcaccacttcttctgggaaatttagcactgccatggaccctcttgtggacaaagcagcttgatcataagccagtgctgctgcttcagcagtgtcaaatgtgccaatccaaactctaacaccatttctcgttgagtctcttatttctgcagcaaatttcccccatggccttctcctcactcctctaaagggtctcttgtctttgttagtttcctttggtggttgtggttgtggtgatgcatgtgtttctttgagttgatggcttgcatgagttaaattggatgacacttctagttgtgatgactcagtgctgctgaccaaggagcctgaagagttggaataatctgaggatgatgattccttgatttgtgattgtgaggagtggtcagtgatggtgaaggaatcaagggcggtggtggtggtggtggtgttttcttcattgaagaaaagaaagtcttcccaagggaatggttctgcacaaacagaggaatttacaaaggaagagttaaagttttggtattggaagaaagatgaatcaaaatccatctcttgaaatcttaatgtagactgacaccaaaattcagctgttttgtttttgttttctttccctctcctcttatgtgcgtggctctgtggtatgctttca

SEQ ID NO: 17821 - DNA, 341 bp, Glycine max
  Clone ID: PAT_MRT3847_116097C.1
ctgccggactttgagcccggcttaatattggatttgtaactgagtactatactagcaaagcatatagctccttgcaagaggtcgcatacttctgggagacatgagcttctctgaggtgatcacagaccttgccttgagatacaagtctgatactaagccaatttgcggtacacgtcatctatatgatagaggacttcaccttagatgccaagtatggcagtgccgttgccaggcctgtgatgcatgagcaccatcgccaccgtgaaggccagtgatacagatggcacaatcatatacaatgctggacgtcttggtgagacggctgtattgagctacataat

SEQ ID NO: 17822 - DNA, 334 bp, Glycine max
  Clone ID: PAT_MRT3847_116098C.1
cccacgcgtccgcccactctgcctactgaattctccaacttgctcacatgcaggtggcgcgggcgaatacaaaggatgctatggtaacactaccttctgaattgactattcaagtcaagatgtgctaaccttaaccccttcagcgaacccatcatgatgttatgaatatggatgtagtcaatacaatcaatgctggtttggaaagacatcaagaatcataagtatagccaacgacatactctgcatgctagctcaatcagaccaacaaatatggaaatgcctactactataggattcactcatcttttcagagcaaccaagctcttcagtatca

SEQ ID NO: 17823 - DNA, 269 bp, Glycine max
  unsure (1)..(269): unsure at all n locations
  Clone ID: PAT_MRT3847_116099C.1
gctgtctgtgtctccactcccttccctgctattcgcacgcgccataaaagtagcgccnntcnctgcttatacgttcgttcaactcgnatcttgatccacacttcnttccttcnttccttcggattctaaactcaagtccancacactcaaatgccagacaccanacagaaccaaattntctgntntcntcnttctcnanattncaatgctnaattaatccctcaaatctttcttccttnnttctctgtctaacgcccactcctncntct

SEQ ID NO: 17824 - DNA, 848 bp, Glycine max
  unsure (1)..(848): unsure at all n locations
  Clone ID: PAT_MRT3847_11609C.1
ggctcgagggttgggcgaggaatggatttgggatgttcagacgcaagcgtgtggaaggaagcactctctttatacccttctcgaatacaaactctctctgtgaaaaagaacaaacccgatttggtttctctggatgacttctattgcaaccaactccctctcctccttcaccagcgaaaccctaaccccttcatcaccactcccgagctctccaccctcatgcaatggaagctcacgcgcggcaaatggaggccgcgtctgttggatttcgtgtcgtccctagacgacgccgttgtgaaatccgcttctcagaaggcgtttcagagccttcccgatgtatccaaagccgtttccgagctcactgtgttgaaaggcgttggtcccgccaccgcctctgccgttttggctaccttcgcccctcacttaacccctttcatgtctgatgaggctatggaggcagctcttggaagctcaaaagattattcactgaagcaatatataaaatttgtggataagttgcagaggaaagcggagggactaagttcagaaggggattccgttaccccatctgatgtacaaagggctttgtggagttttgctgttggacagtcatcaggacctcaagcagatcaggaccctaagaccaaaccaagcaggagctctaaaaggaagagaaaaaattgacatagcaagcagaccaacaaatgaaattgcaagcaatatctgttctttttgcagtctgcaagttttattccctcgttatgttgggggtttgtccttcaatattggacagtgcaaattactaatcgttatcaggtattttggtttcatgttaggccgaannaagt

SEQ ID NO: 17825 - DNA, 452 bp, Glycine max
  Clone ID: PAT_MRT3847_1160C.1
tggccgtccttttttttttttttttaagatacataattttcgttgaataatacccataagtgaaccgttgcattaaatttgaaaaatagccaatacatccacattaaaacataactatagatcatctaagtgccagcatcgaatattgactggagctgcattcctttcagatagaggcaaggtacctgctccagtctcttctacatgcactagcaatatactatcagactcaacacgatccaaacaagctcgaatacaaatgaggctgcatgccattgctgggctggcaaaagtttgacagtgaagagcctcgatactagaatttccaaggacgaccttcttcaagaccgggatagccaattggcctattagaggtctggctttttaccactaccccgtgacgctatatggtgaaactatgaatgacccattaggggtggtcaaagggagca

SEQ ID NO: 17826 - DNA, 310 bp, Glycine max
  Clone ID: PAT_MRT3847_116100C.1
gatgttcatcatgcctatttgttactttattcggcgcacacaacaagcggtctacatgtgctgtactacaaaggaagcctgctcctccaaaaactggttgttagtggcctgaccgtttgcctacaaaatgtatcatccttgatcattaatcaaattatgtattattatttatgttccaatctcaaaattcctttcatatttacatacctttcctttatagtattcatttttaattttatctcttttcttttatcctctatcttttcattattctttattcattttactttcttcatcttttcttttttat

SEQ ID NO: 17827 - DNA, 322 bp, Glycine max
  Clone ID: PAT_MRT3847_116101C.1
tttttggtcagcatcaaagagctttgcgaggaagcctaatacagatttatccatgttcctacaagggccacccctaatacacgccccggctagatgtgaatcactggctcttagcctttcaatgaaaacctctacagacacagtggcctcacatttgagatgcgtcgcccttcacccaatgaaaccagtccgagcaacttgctcaaatacacgacatttgtgacagcccactcatttgatgtttccatgcgtaaccatatactgtccacttgttggtctgtaaacagcttaaaatgtcttgccacatgccatatttgtggaa

SEQ ID NO: 17828 - DNA, 1624 bp, Glycine max
  Clone ID: PAT_MRT3847_116102C.1
cctcgagccgaatcggctcgcgtcaccctctattcacttctctctctcaaaacaagttatggtagtatttgtcattcatttcacaaaaccggttcacctttggacccatggcttctaaaacccctaccttattccactctcgtttcttcctcttcggcttctattgctgggactgggaatttctcaccgctctcctcctctttagttcttcttcctaattaattaaattacatacaccttttctttttttttttttacctaaatttctcattactacaacatcaacaaaagaggcataggttttttttttcttttcttcttttattaaaataataatagtttctgtgaggtaggtggagggtagatcgggaagaaaaaaaaatgtcacagcagcagcgttcgacgccggcgccgttcttgacgaagacgtatctgctggtggatgaccccgccaccgacgacgtcgtttcgtggagcgaaggtggcaataccttcgtcgtttggaaacacgccgatttcgctaaggacttgcttccgaagtacttcaagcataataatttctccagcttcgttcgccaactcaacacctatggattccgaaaaactgttcccgacaaatgggaatttgccaatgagtatttcaagcgaggacagacggatcttctcgccgagatcaggcggcggaaggtggtgtctccggtgaccggaaaatctaccggcggtggcgttaacatctcggcgtcccactccggcggcgacgacatggggtcgacatcgacgggatcgatggaggcggcaacggcggcgggcgctgatatatcgggcgagaacgagaaattgaagaaggacaacgagaaattgagcggcgagttagcgctggcgaagaaacaatgcgaggagttggtggcgtttcttagagactcgctgaacgtgagccccgatgtgatagagcgcatcattcggcaaggaacgtgtgtgtccagcaacaatgatgcggtgcgttttgatgctattattaataatgatcttgatgacgacgaaaatgcggtaggtgagtgtgaaccacaacaaccaccacccaaaggtgacaatggagaaagtttgaaactatttggggtttggttgaagggtcaaaatgggaaagagaattcaattggtaaatgccgcaagagagggcgccaagactaccctattgctgccactgccaaggaattgaagaccctagtctagtacaacatatcatattcttgttaattaattaccttttaagaaacaactattgtagccagatctagaacacaaagaaaaatactctcttagtcatcatggaaaatgtatggctctttcatggtatttcgttgtttggtttgatggtgcaagggacctaataaaggatactaatgatgatgattaagattatgtttatagacattaatttgtatgattggaaataaatgtgtcttgtttaaggaatttgacattgacggtctcattattacgtgggacagagctattgtagtaccatgccaattttaattactgtatgactgtgtatgtttgattttccgttataaatagatgtcggtagcaaaaaaaaaaaaaaaaaactcgagactagttctct

SEQ ID NO: 17829 - DNA, 1476 bp, Glycine max
  Clone ID: PAT_MRT3847_116103C.1
cccgtcgcactcgaaaactccgttttctcccgctccaacaaaatcaaattaatatagcgactgcgacataaatacataaatcaggtatccttcaaagcttaaccccgcaccctacctctgcctacgttgttacatccacggtatccgtcttcgtctgcatctactccaatcctttccatttcatcccttcccgctggaaagtcgaagccaaagtgacccggcgagggtcctaaccatcgacgatggcatctatctgcgacaacggtatccctctccgactacacaacatcgacgctttcatcgcttcttacagaaactctctccaatcgctgagagccaccgcactcgaagccgcgcgatctcaatccgaactaacagaggttcaagctaaactcagagaggctgaggatgatttggtaaaggcacgtgcagttcagactcggagagaggcgaagcgaatggccttgaaagccgcgattgtttctgtgaagggaagaattgaggatctgaagacgagtattcagaagcagagaacccaaaacgaggaatgtgccacggttgtgtcgcatcaccgtcttgttttggaagtgtctgaacagaaatcaaatgaaagcagtgaacatagagatgaagtccaggaggccatatcttggtacaataggatccttggttttcagattgaaggtggacgtggggtaaaattcagcttcaagaatattaatgtggacaacccaaatgaggagttcttttttaccatccgccacgaagatgacgtgtatacattgctaaattgtaaaccatctgtcaaagatactgacgagttgatccatgaattaaacaacacaaatgggctatttaaatttgtcagaacaatgaggaaaaagtttcaagaagtagtggcacaaggccgtttatctatgacaacaaatgaacatcaagaatctgcctttatctctgcatctggtccagttttatcaatatcaaccattactgaagataatgatcatcaagatgaacccaccaaaggtaatgcacatctccagaaacaagttaatcgaagaagggtaaaatcagcaattctatctcctggatctgcatcatctgtccgtcaatctcctcgtttgaaggtcaggaaatgaagcggtgtgggggatgctcacctgctcggtaccttattttgatgagacatgctggttcatgtagggaattaattgctaactaattgacatgtaaattaagacatacccaggttccagatgtctgaacctgtatataatagaccagaagatccctacattttttgtgtatggtccatttgatatttgtgtgtattttattttggtttttccattgctgatatactggtattgttcaataaaacatcattcaatctagtgagatatcttgttttggcattgtaaacaaagtattatattgggatttgggaaatggatctgtatgatccttttattaaaa

SEQ ID NO: 17830 - DNA, 424 bp, Glycine max
  Clone ID: PAT_MRT3847_116104C.1
cacataacaaaattcgatacattgtattgaataaagataacaaaactgataaacaattcaatttacaattttcaacagctttcagtctcacctccacagccaccgatccgtttgagtttatcaaaatggaaatcatcccccggcaacagctcaactaaaccaaccaaacattttcaagattccaagcctctaatacccaagaaggcttttaaaaaagtgtacgcttgattagagatacccacatatcgagccactatttctttcttcacttcaatcgctgccacgtttctgtttctcactttttacaccaaatgcagtcctctaatcatttctagctcaacatgtcacataattttcatctgggcaagaagggtgcatgccaaattgccaattgctaaggctctcgcatctgaacaattataaa

SEQ ID NO: 17831 - DNA, 152 bp, Glycine max
  Clone ID: PAT_MRT3847_116105C.1
cgaacgcgtggtgtttttaaccaaatggggcaggggaggatccaaaacccccagaattgttaaaaaaaaaggggctggaaggggtcggaaaactacccctatagcggaacccacaagggcctggacggtgattgatttggaggtgaacacca

SEQ ID NO: 17832 - DNA, 347 bp, Glycine max
  Clone ID: PAT_MRT3847_116106C.1
cccacgcgtccggagcgagctatctcggaacagagcgttgaaaatgaaggtgcttgcattgttagcagctacaattttgagagtatgacactgctctgcgtacgatatgttccgtatcagaatgaacactggctatggtgccagtacttcggaagtgaaatgcgcaagtcggatgctagatgcagaagcactcaacatctcaggctgtgataccattcctgagtagtgcgatgaagcaccaaatgaatacattcattgcgaacaatatacatcacactacaaatcagctaaccaactagcttacttttatgccaaagaccttgaactgcattccagggacacatttg

SEQ ID NO: 17833 - DNA, 1743 bp, Glycine max
  Clone ID: PAT_MRT3847_116107C.1
gactggtctttgctactctctctctctgttctttctttgaagagggaaagagagaaagggtcaccggccgcccccgccaattgaaccctcctccctctttcctttctacaataaaagtcaattcccagagccaccggcccaactggttttccgaaaaggtttagtttttgattgaattggattggttctttggccatgtctacgtccaacgctgggggtgctggatccaatgattccaatgctaccaggagacaaagcaagagacccaagtactcaaagtttacacaacaagaacttccagcatgcaaacctattctcacaccaagagcggttatttcagcattcttgattgtcaccattgtgttcattcccattggagttgcttcattaattgcttcgcatgatgtatgcttgagtgctgtactttccgaattttggttaccagttctttatattattaatagtgctgacttaaattttctttttgtcatttatctatctatcaatcaggttgttgaaattattgataggtacgactcacactgcataccatcaaatgtgacagacaaggtggcatacattcagactcctggagaaaagccatgcaacaggcagctaactgtaagtttcctagacactgatttttctttttgatatttaaccattatttttctattaactctgttcacctaattgatgaattaggcattcaaattttgatgatagtttgttttcttaaacattgctcttgtgaataggtggaaaagcgtatgaaatctcctatctatgtttattaccagcttgacaacttttaccagaatcatcgacggtatgttaaaagccgaaatgatgatcagctgagggattctggaaaagcaagctcagtaagtggttgtgaacctgaaaataatgtaaatggaatggcaattttaccttgcggtcttatagcttggagcttgttcaatgatacgtacagcttctcacgcaacagcaataatttaacagtgaacaagacaggcatctcatggaagagtgacagggaccacaaatttggaagtgatgtttttcctaaaaatttccaaaatggtcctataataggtggtggtggcctcgatgaaaatgtacctttgagtcagcatgaggatcttattgtttggatgcgaactgctgctttgccaacttttaggaagttgtatggaaagattgaggtggatctagagaaaggcgatgtcataaacgtgaatttgcataacaactacaacacatacagttttaatggcaagaagaagcttgttctgtcaactactagctggctcggtggaaagaatgacttccttggcattgcttatctcactgttggaggactgagcttctttttgtcaatggcctttaccgtcgtatatcttgtcaagccaaggcaacttggagatccctcttatttgtcatggaataggagcccaggagggcactgaccaaagaaacttgatgttcccaagatttacattgcttgtgcattatgcaaactacagttgcgtttgtaattttgtacatcaatactcatacatgctaatagttaggtgttattattatcctctaccccaaaaaaacaaaattcttttattgtttttcggtcttttgcatcagaattggtatatcttgtattttaagacaaaaattggcctatacctatatatttgctagttacttttattcaatttaaatagaaccaaaaaaaaacaattt

SEQ ID NO: 17834 - DNA, 364 bp, Glycine max
  Clone ID: PAT_MRT3847_116108C.1
tttgcaagtactgtaatctttccctgcagcttactaatttcaactctatcaaattctattttcagtccattctaaagaaaatagacagatccagttgatatagagttttcaaatttggaagcatttatgttaaatgaaaattttattcaacccaatttgaattattgatggttcttatttgaaatgtggttatgcaggcttggttcacttacatttaaaactccagataatgtaaattatccatccatgaatcttgcattttctgctggccgtgctggaggcacaatgacaggagttcttagtgcagcaaatgaaaaagctgtagagatgtttattgatgaaaaggaaagtttttgtgttattt

SEQ ID NO: 17835 - DNA, 902 bp, Glycine max
  Clone ID: PAT_MRT3847_116109C.1
ttgcatgcctgcagttgatgccatttattctactaaattggtttgtgcaatttttctaacaagaatttttacaagtttgacactgttaagtaataaatctaaattgaaaagattttctgaaaaacccttaccaacacacaacaataacaataaaagtcagttacatgaattacaccttgttaattaaattttaggagatatattatttactataagattcatctcccttttcatgaaataaacacaccatgtattctactctcgtcactcatgtcttgagtggtcttctttctgtatgtcgaaatcattttaaccccccttttttttccatatctttcaattagtattgcaccaaatatctcttcgtgtacaattcttgcccacacaacatgaacacaccattattaagattttgagttaaaaaaattctatttatagattctttaggtgtccttttaattagagcacttgataacaacattgttttgttaaatattcctcagaagcactcttcaaaagcaaaacaactccacaaacgaagcaatgatattgttcggtacaaagagaccaaatgggcagtagaatgtgcaaaagctcaagcagaagctgaggtttccaatgctaaacagacagtgaaatatcttttctctatgattggggaatctatgtacaaggcaaaagccgaaatgtgagacatggcaccactaaagaagtatgtgaaaccgagcaacgatgataatcagtattcacaagttatgacagaattggaacatgctaagtgggaattgttccaacttaagcttcatgtgggttctgttttgcaggagaaactgcgagtggagaacaaaatcaaagcatcgagatccagcatgtagtccttctcaagagtagcacaaaaactg

SEQ ID NO: 17836 - DNA, 370 bp, Glycine max
  Clone ID: PAT_MRT3847_11610C.1
atctcactggacttcggccgcccctatttttgatctttgtcaaagctggtgctgctgcttccagcgcggccatggctcccattaacttaaccatcgacggccctttgcccctggacgatgaccttgtggaagttgcttttttggaggaattccttcgccatcgggtcagcgtcgactgcgatgttggcgcgctcggccatcatctcaccaacccccgcgggggcttccttatcgctggcgtctgcaaacgcgacttctcaagaacctaccttaatggtcccctaacaggtgatggagaattcatctgctggcagactacctttgacgccttgcccgaactgggaccggatgctcccttcgatactaccac

SEQ ID NO: 17837 - DNA, 1542 bp, Glycine max
  Clone ID: PAT_MRT3847_116110C.1
gattatgtaaaaaatggtgtttttccttgaggtccacagaataaatgtgaagcaacaatcaaccaaccattcaggcacaaccatgcagataaggctgagagataagccacattttatgctcacacactccatccatcacaaaattaactcacccccacactgaaacacaaatacataaacacacttacatatatatacatccctttcccacactttttccacccacaaacacgtaactactattccaaactccgccatggccactgccaccgccgccgccgccacgtcatactttttcggcacccgtctaaacaacgttaacacgacaaccttaaacaacggaagattccacgcgctcttgaacttcggcaaaaagaaggcggcgccgcagccgccgccgaagaaaaaggaagtgaaagtgaaaccctccggcgaccggctggtgtggtttccgaatgcggagccgccggagtggctcgacggaagcatgatcggcgaccgcgggttcgacccgttcggtttcgcgaagcccgcggagtacctgcagttcgacctggactcgctggaccagaacctcgcgaagaacgtcgccggcgatgtgatcggaaccagggtggaggtcgccgacgttaaaccaacgccgtttcagccctactcggaggttttcgggattcagaggttccgcgagtgcgaactcattcatggaaggtgggcaatgctgggtgctctcggtgctttggtcgttgaggctctcaccggagtcgcgtggcaagacgccggaaaggtagagctggtggaaggatcatcttacctggggcttcctcttccattttcattgaccacactgatctggattgaggtgatagtgatagggtacatagaatttcaaagaaatgcagaacttgacccagagaaaaggttgtacccaggtggcaggttctttgatcctctgggtttggccaacgaccctgaagaaaaggccagacttcaacttgctgagatcaagcattctcgcttagccatggtggtcttcctcatctttgcaattcaagctgctgtaacaggaaaaggccctatcagttttcttgctaccttcaacaagtgacatcatatcatataatatataactttataaatgaaaacttccaaccttattctcattctcctctattaagttactcacctcctcatctaattttattaattcttttctgtacacccaaaagatgaaaactgctacttataattatgtatgtatgtttgtactctgttgtatgcttctgtatgatattcagaattgttactttggtgtgctcattctcctcggttaagttatccacatcctcatctaattttattaattcttttctgtacacccaaaagatgatgaaaactgctacgtataattatgtatgtatgtttgtactctgttgtatgcttctgtatctcgtgccgagttctctcaacgttttacagtttccccgtctctttccttgcaaagattctgctaatgaatacccttttgctctgtttgttttggct

SEQ ID NO: 17838 - DNA, 269 bp, Glycine max
  Clone ID: PAT_MRT3847_116111C.1
tcgttgtaagcatatccctgtgtctaatatgagtgcgggggaaaatcatacggttaaaatgccaattacggcacaggaggaaattatgttttttagcgcaggtgatttgagaactgccatgtgaagaaaaaatagctagcccgaagctactgctacgcatgtggcagcgatataaattatcattgattggttcgcaagttctgactgcaacagagctggcgcaatgctgatggttgatacttaacatacctatccttgaaaaggaattt

SEQ ID NO: 17839 - DNA, 391 bp, Glycine max
  Clone ID: PAT_MRT3847_116112C.1
gggatacctctgtgagattggacaggctaactaagaggcggtacttaaatggccacccttgttgttcataaccaaactacttccgctcaagatgctgaagctctgcaacaagctttcaaaggatggggggctgatgacactgccattatagccattctgggtcacagaaatgttcatcagaagcaagaaatccgtcgcgcttatgatgagatttaccaagaggatctcatcaaacgccttgagtccgatatctgtggtgactattaaagagctatgtaccggtggatgatgcagcctgctgatcgagatactgttttggcgaatgtggtaatcaagaatggcaccaaagactaccaagtgattgcagagattgcatgtgtcctatcatctg

SEQ ID NO: 17840 - DNA, 300 bp, Glycine max
  unsure (1)..(300): unsure at all n locations
  Clone ID: PAT_MRT3847_116113C.1
agtntaaaaacagcaaggggagatttgcgccatttggaatttgaatacaaatacagggcattgataatataaccctatggacagagccaatgtctgactgaaatttgatactgaacattatcttttttgtatcataataaaatggtcaagatctttatgtttcgtgcagtattatgtgaagaaaggggtagtgcatgaatctgaaactttcttgcagttatacaactttgaatttatcattgtgccactctatatgtgcatgttttcttaaactaatgatgcacttgtgcaatgacttta

SEQ ID NO: 17841 - DNA, 484 bp, Glycine max
  Clone ID: PAT_MRT3847_116114C.1
ctaccgaagcccaaacgcaagcaccttccgggttcgccactgccctcacgaccactcttctcactcactggggattcgagggctatataaggtggctaaggggtatcaaatcgacctacaagcagcgccgagattggatatgcgatgctttccaggacaacttccatttggagcttgacctgaagagcattgggcaggcgtataatggggagaagggggtggtcctggagatcgaggggctggggaggggggtgacttgttatgcgaaacaaaatgctgaaggggtcgaagcgaaatgggacgagaagaggggtgtcgcaccaaagaggaaaggacgtgctctggtctctatcattccgacgaccgccgggatgttcatcatactagctgtccatagatagcataaccccaaaaacctttcactctcgagctctggttaatcacccttcgaggccacaccacaactgatggacattcttttgcc

SEQ ID NO: 17842 - DNA, 213 bp, Glycine max
  unsure (1)..(213): unsure at all n locations
  Clone ID: PAT_MRT3847_116115C.1
gaatatcntcttaatntctcatatgtggatgatactcgaggattttaaggtcngtctggactactggaatgtcttggtttcagaactgnttganccacaacgaagtttgcgagaaccctgcagcagcaaatatgacaggnttcaggtgcccggnatgattgatggnattggntcacagcttcttcancgccgacagctttatgccagtcccat

SEQ ID NO: 17843 - DNA, 494 bp, Glycine max
  Clone ID: PAT_MRT3847_116116C.1
gggcacaaaaaacataacgttggggggggttaagccaaagcaacacaccgcaacaaaggcctgaaactggctgcgctgaccaaaaatggaatgcggggctgcgtccaacacaacgcgttaaaacacaaattagtagaaccaatggtcacaccggttatcaggaaccaagttttgggaacaaccgttgccacacgatggtcgagacttcagactttgtccgaaaaacaggctagctaaaaaagaagacacaacgtgccataaacgaaaccaactttttttgcgaccaacatcccctgatgaacgagcccccactagttacttgagtttcggcacagccttggagaccgtggctccggtaagatccttcttcgtgacgtttttgttgactaccacaccagcagtttgacgcatgtccttaacagcatacctctgaaaaagaggatgctcgcggaaagcgcaaacaaccatgggttggggtggaatcagcttaacaa

SEQ ID NO: 17844 - DNA, 2394 bp, Glycine max
  Clone ID: PAT_MRT3847_116117C.1
tgttttggcattgatggatcaacaaaaaacattcatattgtccgacaagaaattccttccttcattgtttgcatctgcttttcgctcatcctgtccaaacatcttggagcctcgaaacatcttggtacctcaagatatagaaaaaaggtttgaccagcctacaaaaataaaaattctcggcttcattttgggttccactcttaaattctctaactacgggaagctaatgattttatctttattcaaaggaattgggaatgcccttatgcacattccagaagttgggccattgttgtcctcttttctggagcagtactatgatgagctcaataagtcttgtccaaaattgtcaaacactgaaactcatatagtgtgccttttgcagtgtggtgggatgcttattagtcataaattgacactacttaattgttatttatatgtaatatttaatggtggatgaacagtggatgtttctaccattgattgtgccaccaacaatttatcaagcaggtctttggtcaacttggttgaccgtgctttgttctttgaagatgtttcaagctttggctagagatcgtttggaacggctgaatgcatctccgtctgctacaccctggacatatcttcgagtatattcagcattgttatttgttttcatggttgatgttctctggataaggttttgtctgacaatatatcaagcacatgggtcctctatgtatctgttattattctttgagcctttcagtatttgttttgagaccctacaggctattttggtacatggatttcagttgcttgacatatggttgcatcattcagcttgcaatagcagtgatttccgaacacctaaactgcttgacatgttaactgcaggttcattgttggaattgaagggaattctcattcggaacttgggatttttattagacatggcaacattttttatggcacttggccattacttgtatatatggcggcttcatggcatggctttccggctaatagatgcattgctatttctaaatatacgtgcatgatgttgttgaatatatactcgccatggactgagactgttcgggaggttctacctcatattccggatgacatgatattccaggacttgcaaaggacaaattcagtcacggttactgtgaataatcttcttagaatgtgaattgtcaaggtttattatttaaattgccaacgtctatgaagacttacatgtttgagatcttctaaggttggcttttgaaatttttagtcttggtttattttatggagattcaacacgttccttcactgattccaggttggatcaaggcctggctgggatgtatacttgtccaacatgccgaaagcatctttagtcaggtgtgcctgggaatgaaacaaactctgaggcggggacgatatctagtgatgagcaacttgcacggcaaataagtgctggattggatcggccaaactctgctaggcataccatgcctacaggattctatccaaatcagacactaaacactcctgaaggtgttccttggtggggtgcagggctgtacttcggttggtatcattcttggccaaatcaaggtgttgatggggccggtccatctactgctatcagaacagttggattaggaagagttcaaatgatgatgcggcgcgtggaacctttggcccattagtctctcgcaggcttctgcaagtggttcaaccattcctccccctggtggaagattgcctgaaagaactggtagtttacatttaaggactgcttcacagtcttctaatgataatgttgcaaatatacttgccatggctgagactgttcgggaggttctacctcatattccagatgacatgatattccaggacttgcaaaggacaaattcagtcacggttactgtgaataatctcctccaaatgtgatgaatcaaggtattattttactcctcaaggaatatgaagaaggacatagagttactactacaattgtccttggaaaggcataggctttcattttatgtatatagagtcagcacattcaatctgttgtactcaagaaagatagcagaaaatataggcattttctttctttctttgtcttctccttgaatctgtagtaaaataaatgtggggtgtgttcccaagttgggtaagttcctatctgtcatggttccatttcaattgtaattttgaatttgctgctacctccaaaatatgatgtaattttctttccactccccactccattttgtggggttggcaaaaaaagtgaggggaatttccactccccactccattttgtggggttggcagagagaatgaggggaatatcaattatcttcaagtgactcaatctgagtcatgcaacatctaattcaaatgtgatct

SEQ ID NO: 17845 - DNA, 1468 bp, Glycine max
  Clone ID: PAT_MRT3847_116118C.1
tggacgcgtggggggaattctcattcggagcttgggatttttattagacatggcaacattccctatggcacttggccattacttgtatatatggcggcttcatggcatggctttccatctaatagatgcattgctatttctaaatatacgtgcattgcttagtgcaataataaatcgcataaaaggctttatcaggctaaggatagctctaggaacacttcatgcagctcttcctgatgtaacaactgaggagctaagagcatatgatgatgaatgtgctatttgtagagaaccaatggctaaggctaaaaggctaaactgcaatcatctcttccatcttgcatgtttgagatcttggttggatcaaggcctggctgagatgtatacttgtccaacatgccgaaagccactttttgcgggtgtgcctggaaatgaaacaaactctgatgcggggacgatatctagtgatgagcaacttgcacggcaaataagtgctggattggatcggccaaactctgctaggcataccatgcctacaggattctatccaaatcagacactaaacactcctgaaggtgttccttggaggggtgcagggctggactcaggttggttgcattcttggccaaatcaaggtgttgatggggccggtccatctactgctatcagaacagttggattaggaagagttcaaatgatgatgcggcatcttgcatctggtggagaaacctatgctcagactaccttagaagataccgcgtggaacctttggcccattaatccctctcaagcttctgcaagtggttcaaccattcctccccctggtggaagattgcctgaaagaactggtagtttacatttaaggactgcttcacagtcttctaatgataatgttgcaaatatacttgccatggctgagactgttcgggaggttctacctcatattccagatgacatgatattccaggacttgcaaaggacaaattcagtcacggttactgtgaataatctcctccaaatgtgatgaatcaaggtattattttactcctcaaggaatatgaagaagggcatagagttactactacaattgtccttggaaaggcataggctttcattttatgtatatagagtcagcacattcaatctgttgtactcaagaaagatagcagaaaatataggcattttctttctttctttgtcttctccttgaatctgtagtaaaataaatgtggggtgtgttcccaagttgggtaagttcctatctgtcatggttccatttcaattgtaattttgaatttgctgctacctccaaaatatgatgtaattttctttccactccccactccattttgtggggttggcagagagagtgaggggaatatcaattatcttcaagtgactcaatctgagtcatgcaacatctaattcaaatgtgatctaaaactataaaatagattctctattaaaa

SEQ ID NO: 17846 - DNA, 204 bp, Glycine max
  Clone ID: PAT_MRT3847_116119C.1
agtgtgtttttctgaacaaaagggctcaagtagcctacgttggctattctaaggtacatgtcatttgtttgaaaaaaaaacccacccgaaagaagcgacatcgcacgctacccaccacagctaacaaaagaccatccgccaaaaaccgctgccaagatcacagaacaatgaagcgcccacgcgccgacacaaaaaggaaaaccc

SEQ ID NO: 17847 - DNA, 480 bp, Glycine max
  Clone ID: PAT_MRT3847_11611C.1
cctggaaaaccactccacccattcgggggggggctttttttccctttttaaaccccccccccattttaccccttagaagtgaaaagactaacccttgggttgggaaaaaggaaaaggcgcctaaaaccaccctacgatggtcctttttgagaaacgcccccctgctttaaagctccctcctcatccaaagaaacgcgggggggcttcccgggcgaggtgaaaaggtttccaacccccggggagaatccccctgcatggaaggggctaggagccgcgccctctgggcccaaaagggggggggccaaacctgagacggtctggggcacgaacccccccccaaaggcccccgggagattcttgggatcgaatggggttgatttttcctccccccccagaatattttattggccacgccagggcccgacccctcagggcccgtgggggggggcccggttgcgacggcaatgttttacaggaaaa

SEQ ID NO: 17848 - DNA, 127 bp, Glycine max
  Clone ID: PAT_MRT3847_116120C.1
aatttacttgtcatcttagaggaaaccggaggaaattgttggcagctttcaaccatgatcgtggcacatggtacaaggttgaaagcaaccaacaattaacttgttatcttagaggaaaccggaggaa

SEQ ID NO: 17849 - DNA, 295 bp, Glycine max
  unsure (1)..(295): unsure at all n locations
  Clone ID: PAT_MRT3847_116121C.1
btngtatgnangngtangtaagntnggaattaggntngagggaagnattgttgtgagtaagagaaaaggnttnntgnanngagnanannaanttgatanntntgattntttntttgnttagaattnnananaanatatgnnggggaanannnntagnggtntnnnntngtnttgnggtgtnngnntngntgnngnnnnggtggggnngnnnnngnnngggnnnnnnnnngnnnngnnnnnnnnttnnnnnnnntgngttnnnnnnntnnnnnnnnnnnnnnnnnnnnnnnnnnnn

SEQ ID NO: 17850 - DNA, 332 bp, Glycine max
  Clone ID: PAT_MRT3847_116122C.1
atttctcttcctgcccaaatcattggcgcgtggatagacaaccaattcacatcactgaaggagactctggcagaaagcatgatgtcatcatcgagtatgatgcatgctcaattgcaaatgaaagagggtcattggtaggcgccagggatgcatatcacaaacaaagagatggttatcatgtggctggaaggaaaggaagactgcaatatgcttgattggcaccatatgtggagccagcagagcaagctcaaagaggcgaagcttactatgactgcttccctgttgaggatgataaggaccatggagttgctcacattggcgaatagcaatgt

SEQ ID NO: 17851 - DNA, 326 bp, Glycine max
  Clone ID: PAT_MRT3847_116123C.1
atgtggacattcatcgcaagaactacaaagcgattgcacgtctgaacttgatgggggtgattaccttataaatatatctaaggatctgggcatcacagacaccaatgagaacaattacttatcgccctacaatgcactggaggatcacaacgtatgaaagctgattatagctcataacatgtagtcacacctaggtgaatacatactcacagcggtgatcaactgtacacttcataataatgctgatctggacatctccattatgacgggaacatttatggagttccgcattgggatgcttaatgccttacctattggtcgaaact

SEQ ID NO: 17852 - DNA, 172 bp, Glycine max
  Clone ID: PAT_MRT3847_116124C.1
tacttgctgaattgctgttttgcactaggtagcggctacattggttaggttgttattctcagttatgttttacatggctttttgaattgttatttacttttgatttttgtatcggccttcataatcccagatgagcttgaacgtactgttaagtgcttatgctgattcatgg

SEQ ID NO: 17853 - DNA, 314 bp, Glycine max
  Clone ID: PAT_MRT3847_116125C.1
gggaagaaacaaacgtccattttttgtttttgggccctccgaacacattcaagagaagagacttacccttttaagttttttagcacaagaggacaaacatttgttcaaaacaaacatggaagatgttttctcatcattccatttctggctagttaaatagaacgggaaagctggtttggtttcctattagtactttcctgtgcacaagttggccggcgacccttttttggaccttctatgattccccatctctcaaattgtttttgtcgagctcgagccctttccttctttttatttgatttctgggcaaaaca

SEQ ID NO: 17854 - DNA, 248 bp, Glycine max
  Clone ID: PAT_MRT3847_116126C.1
cttttctttatcaagttgtagataatttaagattctaccagaaatatttggatgattgagatgaaaattatataatataattaaagacgtaaaacaaaatttaaaagacaattttatccccgtccagagaatcatcgatccattcaccgcacaacaaataacatcatcattcatttttcactgtaaaaaaatggaattaatcgctcattcaaacatgttcgctgccttccaacacggggttctcccct

SEQ ID NO: 17855 - DNA, 169 bp, Glycine max
  Clone ID: PAT_MRT3847_116127C.1
acccacgcgtcccgcgccgccgtgcgtttttcattttttgacgagtcaggactgcccctttaaagatcctgggctgtattgtggatgatgacgaacgttggattgtataaatagcggctgagtcctccacatcttctgtgtaggtaaaacatatctctgtgcttgatta

SEQ ID NO: 17856 - DNA, 692 bp, Glycine max
  unsure (1)..(692): unsure at all n locations
  Clone ID: PAT_MRT3847_116128C.1
ccacgcgtccgccacagactcaatgggtttgtctctcttctgctggagggctgatagtgcatgcatgagtgtcttcttgcttttgtttcaagtgattcacgtgaacagaaaatacgaatcctccatgtgatgagacaatttagagcaactcgatttcatttcctttcacattactatgagtacaacaatttacgtgattcgataagattggatcgtttattagcttgctccttcaagttcagaaataaattaaaactcaaatatatatgacatatatctgcctttaaaatgttctttttttttatataaaatattaaaggcaacaattcaatgaacaataccccttagattatcaaacatttttttaccgttcgttttaataagattttcttttataaaaaattatatcaataattatgatcagttaattagaaacttagaagttcttgaaaaattataatgagaatttaacaataataattttttttatttaacaataataacttagaagttcattttaataatttttttatcaatcaatcaatattaatagttaaccaaaggaattcaaactcatggatctttntatattttctcttctttattcaaccatgcatcaatctaatcttataactcattactatatatggtcatcatatgagagcatagtcttcatgatgatctcacatccg

SEQ ID NO: 17857 - DNA, 936 bp, Glycine max
  Clone ID: PAT_MRT3847_116129C.1
ccggctcgagccatctctcacatcatttcccactcccgcgtttcctttatcatattcttattccgccatgtcccagttgaacggagcctactatggcccctccatcccgccgccgaaaacctcctaccaccgcccagggcgcggcggaggctgctgctgcggctgcctcttcagcctcatcttcaagctcatcttaaccgtgataatcatcgttggcatcgccgggttcgtgttctggctcatagtccgtccgaacgtggtgaaattccacgtgaccgacgccaccctgacgcagttcaactacaccgtcaacaacactctccactacgacctcgccctaaacatcacggtccgaaaccccaacaagaggctcggaatctactacgaccgcatcgaggcgcgtgcaatgttccacgacgcaaggttcgattcacagttcccggagccgttctaccagggccacaagagcacgaaggtgctgaacccagtcttcaagggtcagcaagtggtgccactcaacgctgagcaaagcgcggaactgaagaaggagaacgccactggggtgtacgagatcgacgtgaagatgtaccttagggtgaggttcaagctgggggtgttgaagaccaagacgctcaagcccaaagtatcatgcgtcttgcgtgttcctttcaaaggaagcgccgcctttgagaccaccaagtgccactgggatcgctgatggattcgcatctgttttcactcatttcttccttttcatatttctttattgattggttacttttggacataggtccttcagggttatcccttcgctcgaggggatttttgctccattctttatcctttatatcacactcttgtcgttatttgttaataaatcaattttattttcattccccttcttctgaataaagtataaacaaatccaactaccga

SEQ ID NO: 17858 - DNA, 741 bp, Glycine max
  unsure (1)..(741): unsure at all n locations
  Clone ID: PAT_MRT3847_11612C.1
ccacgcgtccgggcagaggcttaattacttttggtttcttaagaggcattggaagagcaacgttgctactggaaggtcgcaatccatgcgccctccaaaagtggtggttttgggatgtatggctgagaggttaaaggagaagatacttgattcagacaaaatggttgatgtggtttgtgggcctgatgcttacagggatttgccgcgattactggaggaggttgattatggtcagagagggatcaatactctcctttcactcgaggagacttatgctgatattaatccagttcgaatctccaagaactcagttactgcatttgtctcagtgatgaggggttgcaacaatatgtgttcgttttgtattgtaccttttactagaggcagagagcgatcacgccctgtggagtcaattgtgagagaggtagcagagctttggaaggagggtgttaaggaagtaatgcttcttggccagaatgtgaacagctacaatgatgcatctggaattgagaagagaggttgaatcagggtccaattggaaacttagtgaaggattttccagcatggctaaggtcaaaataatggtttaaaggttcttctgatctactggnatcgattgtcctcagaatttcctgagatgcgattcagaattcacgtctccacacctaaagatttnctggatgatttgctttatctaatgcgagaaagacatatatatgcaaattgatacatttacctgct

SEQ ID NO: 17859 - DNA, 132 bp, Glycine max
  Clone ID: PAT_MRT3847_116130C.1
gagagatgagagaagagactgccccttgccatactgcagctcaaatcatcatgcacgacttcagctgaatgaggatctcccctcaggctcccgtgtccggcctcttctatggcaagctcgagcctatccaaa

SEQ ID NO: 17860 - DNA, 884 bp, Glycine max
  Clone ID: PAT_MRT3847_116131C.1
aaaaaaaacccacacctttttcactctctttccctaacagtcgcagattcaaatggagcccgagcccgaacccaagcttgagcctgagccagagcccgggcctgaatttagttcgaaagaggaagcattctcatactaccaaacctacgccaaatccgtgggcttttccgccataatcaaagccagccgtcgatctcgaatctccggcaacttcattgacgccaaattcgcctgcacccgctacggcactccaccgaaccctcaaaaacccaagcccaaacgggcccgaacaagccccaaaactgattgcaaggcctccatgcacgtcaaacgaacaccccacggcacatggatcatctcttccttcatcaaacaccataaccaccaaactaactcaaataataatgcaagtccttcgaggaagcctaagattaagaaaacgctgcatcatttggttttcgccgaaggagaccttcaatttctgcttgatactttcatgtctatgcaaaacgaaaaccctaatttcttttacgccgttgattttaatgaggagcagcgtttgagaaccgttttctgggtggatgctaaagccaggcttgattacagacactttagtgatgtggtgcttttggacaccatgcatgttaaaaatgagtgcaaattgccctttgttccgtttgttggtgttaaccaccattttcaggtttttttgcttgggttggcgtttgtgtctgacgagtccgaatcgacgttttcgtggctgatgaggagttggttgagagcaatgggaggatgtgctcctaaggtgatgctcactgactgcgacgaggcgctgaagagagctgttgctgaagtggctcctgagtcttggcatggttttgtct

SEQ ID NO: 17861 - DNA, 489 bp, Glycine max
  Clone ID: PAT_MRT3847_116132C.1
ccatttccaacattcatttccatgcctttgaagttccaccctttgtttcccctcctcccaaccccaataatgaagaaaccgatttcccatcccatctagttccctccatttggcctcttcgcatcttcgtgaacctgtgaggaaccttcttcaatccctttcatctcaagccaaaagggtcattatcatccatgattctgtaatggcatcagcggcacaagatgccacaaacatgccaaatgttgagaactacacttttcgcagcacatgtgcctttaccacctccgtttatttttgggagctaatgggaaggcccttggttgaaagcttgtgtgtccctgaaattccttctctggaaggatgctccacaacccaattcatggatttcctgattgcacaaagtaatttcctcaaattcaatgatggcaacatctacaacacaatcagggaaatcgaaggtgcttacattgacttcatggatcgcatcag

SEQ ID NO: 17862 - DNA, 348 bp, Glycine max
  Clone ID: PAT_MRT3847_116133C.1
tgcatattcatcctaatatatacagaagaaaagtaagtattatgtacagctgtgttttttatgtgtgtatgacgtggttataatcctaactttacatgtatgaaaacatcatttcgcctaattcagcttacccagcccaaagaggcaactagaataacggaggacataatcacacaagcatagcatatccacaggagtttctataacagccttcttacttttatcaaacaatccaatcagagccatcttcaatatgacttaaccaaactagattttcatttcatcaaaagtttttaaaaccacccttattgatcgatacttatgtgggaataagctatatagactcac

SEQ ID NO: 17863 - DNA, 398 bp, Glycine max
  Clone ID: PAT_MRT3847_116134C.1
tccggccataaccgttttcgaaacatttctatttctgaaccccggtattaacggggggcttaacataacagggggttctctttctctttttcaaccaacttgtaactcgaattattattattataaatcaatagaaagacaggaaccaaaactaattaaaaaccacattcacattattcctccgaagatgacagtgactagtggagaacaaaaaagcccctgtggacgagttcatatccaacacaggaccaaaattgtgcttccagattttctccagaacgtgaatcttatgtacgtgaaaatatgttaccactacttgttctccaaccttgtacattattcctagtccctcttatcctagaaaaactcattaaggttttttagaccaccaacattta

SEQ ID NO: 17864 - DNA, 424 bp, Glycine max
  Clone ID: PAT_MRT3847_116135C.1
ttctctttaccttttttttttttttttcttgtctttattgtttcaaacactgcctttcttccaggtgatcgcaaagaaaaaaaagcatgcataagagggcctggaatgtgacatgctcttacacagagaacctagccttcttgattgcgaggtggcgtgtacccctgtcatctccctacagagacaaagtcccccggtgaaaaacttgagcaaggggcccccagaatggcaaaacctgtgtcaccaaccactcacagatcccccaagagaatgccccctgggcttaacggagggcgggcgtggcaccccccccaaacacttgggggggggccccttagaaacggcgccctgtgctggagcactagtggggggcgggcctcccttatgaccaccggaggggtgacattccctttatgggcggccc

SEQ ID NO: 17865 - DNA, 491 bp, Glycine max
  Clone ID: PAT_MRT3847_116136C.1
gtgttttttagcttataaagaaaaaccattctttcaaaattcattaagcacctctcttatccctgttcatgactatttattttgtagactactccttatgtctgaaatggtgaaagaaagtacgacttatgctgatcagatttacaattaagatcaagaaaaaaaaaaactaaaaataatgcctattagcacctggcaagatgctttatcaggatccagaaccaaatgtaagctttagaaaccattacccagtacccaccactaaaagttttgcagcacagattaaacttacttctaaagggaatcaatgcacgagttgaaaaggggagaattgcgagtagaaactgcaaaattcacaacaaaatgaaaataccaaataccatgctgagctagtgagcttgggcagattccagttagttagaactttgaaaatgctgagtcgggtacacaaatcaaaccatactaaagcatgtttctcttttcaatcatga

SEQ ID NO: 17866 - DNA, 2064 bp, Glycine max
  Clone ID: PAT_MRT3847_116137C.1
gtcaacgcccaggttcaagaccttaacaccctcggaggcagtggtagccccgcgtcccctactcaatccgagtccccaacaacacagtcttccgctgtcgaatgaacttaatcttccaaactaccttatatctcctgctaaagccgtgtgtatctctacctctgtctcccttgagcagagtcaaaaaacaaaaatggcgtattttagctgaaaacttcttcaaggtgagaaaataccctttcattggcactctcttaatcgttgctcatttgcgtcacactattcctcttcagcttcaacctcaccacctcaaacactgttgctttctattacgttttccattagaaaccaccccttaacccttctctagcatcagtggaatataatagtaatctaatagtgcaagaggtttccccatacgccaccgagctcgggtccggtttcactctatttaagatgccgggaagccttgattttacccccagagccgtctgtgtccaggcggttgcctcccttgagccgaggaaccacatggccctcagggagaggcattgtccagagtctagactgcactggttgctttcccttcccaaagggtataaagtcccagttccgtggcccaagagcagggacaagatttggtatgataacgtcccttattcaaagctggtggagtacaagaaagaccaacactgggtagtgaagtctgggaaatatctggtctttccagggggtggtactcagtttaaagatggggatgacttatgttttatgccagacactaccaacaatccaatggggacagaatatcagggttgttcttgatgttggttgtgaagttgctagctttggcggctatcttctggacaaaaatgttattgctatgtcatttgcaccaaaggatgagcacgaagctcagatacaatttgctttggaacgaggaattcctgcaactctttctgtcattggaacacaaaagttgacatttgctgacaacggatttgatttgatccattgtgcaagatgcagggtgcattgggatgcagatgccatggtgaccgtaacaaaagcaatgtgctggactgttgtggctaagactcttgattcatctggaattgggcttgttatataccagaagcctacctcatcttcctgttatcaagaacgcaaagggaacactcctcctttatgtgaaaataacgatagaaaaagtatctcatcatggtatgccaaattcagtagctgccttatacctcttccagctgatggtgagggtaatatgcagagctggtcaatgccttggccccaaaggcttaccagtatacctccaagcttatccattgaatccgatgctggtgagatgttcttgaaggacagcaaacactggtccgaattagtttcggacatttatggagatggtctttctataaactggtcaagtgttcgaaatgtaatggacatgaatgctggttatgcaggatttgccgcagctctcattgatctaccagtctgggtgatgaatgtagtacctattgatgtgccagatactctttctattataatggacagagggttaataggaatgtatcatgattggtgtgagtcctttaacacctatcctcgcacatacgatcttcttcatgctagctttcttttcaaatatcttgagcaaagatgtgacatcgtagatgtggctgtggagattgatcgcatattgagaccaaatggatatctcgtggttcaagattctatggaaatacttaacaagctcaatccaatcttgcgttcacttaactggtctgtaacgttgcatcaaaatcagtttcttgtaggtagaaaaggtttctggcgtcctacgagctcttgagactgaatgtatattaggttaataaaaatgacgtattcttcaatcacccgtgtatcagtatattctggataaaaattaggtgcaaaaagaatgaattttaagaaaggaatatttattcgacaaagtaatcttgtctgagtgtgaagtatgttaacgagacatttacttatagtataatacagaggaatttgttctcc

SEQ ID NO: 17867 - DNA, 1461 bp, Glycine max
  Clone ID: PAT_MRT3847_116138C.1
ctttctattctgttatccaagagaaaccaccccttaacccttctcaagcatctgctgattatactgcaaatccaaaagtgcaagagcttcccccaaacgtgaccaatgtgaggttcgattggaagctatgtaaggaaccgcagaatgttgattttataccctgtttggataatttcaaggcgattaaggctcttaagtctaggaggcacatggagcacagggaaaggcattgtcctgagactagactgcactgtttgctttcccttcccaaagggtataaagtcccagttccgtggcccaagagcagggacaagatttggtatgataacgtcccttattcaaagctggtggagtacaagaaagaccaacactgggtagtgaagtctgggaaatatctggtctttccaggtggtggtactcagtttaaagatggggatgacttatgttttatgccagacactaccaacaatccaatggggacagaatatcagggttgttcttgatgttggttgtgaagttgctagctttggcggctatctgctggacaaaaatgttattgctatgtcatttgcaccaaaggatgagcacgaagctcagatacaatttgctttggaacgaggaattcctgcaactctttctgtcattggaacccaaaagttgacatttgctgacaacggatttgatttgatccattgtgcaagatgcagggtgcattgggatgcagatgtgtttaggattcttagacctggtggtttctttgcatggtctgccacaccagtttatcgggatgatcaaagagattgggaagtatggaatgccatggtgaccgtaacaaaagcaatgtgctggactgttgtggctaagactcttgattcatctggaattgggcttgttatataccagaagcctacctcatcttcctgttatcaagaacgcaaagggaacactcctcctttatgtgaaaataacgatagaaaaagtatctcatcatggtatgccaaattcagtagctgccttatacctcttccagctgatggtgagggtaatatgcagagctggtcaatgccttggccccaaaggcttaccagtatacctccaagcttatccattgaatccgatgctgtacccattgacatgccaaatactcttacaactatatttgacagagggctaataggaatgtaccatgattggtgtgagtccttaaatacatatccttggacttatgatcttgttcatgctagctttatcttcaaacatcttatgcaaagatgtgacattgttgatgtggttgtggagatagatcgcataatgagaccagatgggtatctcctggttcaggactctatggaaataattcacaagcttggtccggtcttgcgttcacttcattggtctgtaacattgtctcaaaatcagtttcttgttggtaggaagagtttctggcatccaaggccgtag

SEQ ID NO: 17868 - DNA, 358 bp, Glycine max
  Clone ID: PAT_MRT3847_116139C.1
gttaaattcactcaactcactttattatagggaataaaagatacaatcattttaatgaaaaatatcttttggctacaaagcaaaaggaaccacttttccttaaacgcttttttatgaaacgcgaatggcccaactaagggccatatggcaatttgacccctctaaaaaacccccggattttttttttttttggagaatcttattgttggggggcccccaccccaggggtgttaaaaccccaactggggcaatgggcctcaaaaaaaaaaaaactgtttttacccccctcccctggggggatcagagacctttttttttggggttggtgggaggccccacccccccccctccacaaaaa

SEQ ID NO: 17869 - DNA, 411 bp, Glycine max
  Clone ID: PAT_MRT3847_11613C.1
aagtgtgacccaagctatcattttcagtgtataaaacaatggcttgtgcataaaaatttctgcccagtttgtaagcaaaaagttgtggttcgacactaagtggcactatcctcaacgttttttacccttaaattggtgtatagtttttcatatgcaatataagcaatcttcattacatattttaaaacttttggcttccttagcgaggagtcggcaatattatacttgtaagttttatattatgatctcgtaattggacagtgattttgcatattatacgcaaggttttgaaatttgaatgttgtcactcaggtaaacaacgatttgataagggagaactcactttctattcctttttgccccgtgcaattctaagttttctagttattaaaacattggtatttttttacc

SEQ ID NO: 17870 - DNA, 1961 bp, Glycine max
  unsure (1)..(1961): unsure at all n locations
  Clone ID: PAT_MRT3847_116140C.1
gcaccagccgactcggccagagagccgagcgtgttgattctaacgagggttgttacacctatagccttcagtatgagcctcagatgtatcagacattcaacgaggatcagggaaagtcttcagggaaggctgttgttgggtggcttaagctcaaagctgctttaaggtggggcatatttatcaggaaaaaagctgcagaaaggagagcactgctcactgagttgaattgagttaaaaggcttgaaagtgggacattttcaacttatttcaagctaataggaaatagcttgctgatattgcttttggaatctaaccaaaagaaatccattacattgcatagaagaagtctttgagaaagaaaaaaaaagtgaaaaaagttgtgaagatgtgacatttcaaggtttcaacagttggttgaaggtggaactaatgcataatgtgtcaacaaattcagaaactgcaacctatgacatgcttacagccttaatagaccacacagcttgtgagattaaacatcaggcagcactatcttgtaacaggctctcttgctcttattgtggcattatttccattattattgcgtaatttaattatgaattaatttcatttcttactttttaaattactgatcagaggtttgtatctaatgtttcttttttttttgttattgttttttttatactgtatcatgacatatttgtgagcacttacctcatgtaataaaataatctatagtgaagaatattagacttatgttcataggacggagcatgccaagacatgtgtcttgggtggcaagctctttgtatactacattgatgaaaccaatagttctggcattatgttcaacaatatatacgagctgagaggcctcatttcggatggccaatttttctctttggaatcacttactccaaatcagaagatgtctgtggattccttggtgaagaaagcatatgaaaattggcaccgagttgtagaatatgatggaaaagttttaaattctcatactaatttgaaaaaggaatcaagagctgtggtccactcaaataatgcaccataacagtttccctgagcagcagtatacctcagctaaagaacaagttgtcatacgtcgattcggccccaaaaagaaatggacaagggttggatgacattgtcgcagaagaacttcgtcttaggagttcagagatgttggagagtgatgatatgcagaggttactcaagacaatttatgcagaagtgaacaggtccgctaatcttggtcattctaacgagggttgctacacctatagccttcattatgagcctcagaatgatcattcatgtcacgaggaccagggaaagtcttcggggaaggctgttgttgggtggcttaagctcaaaactgctttaaggtggggcatatttatcaggaaaaaagctgcagaaaggagagcacagctcactgagctgaattgagttaaaaggcttgaaagtgggacattttcaactcatttcaagctaataggaaatagcttgctgattttgcttttggaatgtgtaacaaaggaaatccattacattgcatagaagacttagaaaaaaaaaaaaagtgaaaaaagttgtgaagatgtggcatttcaaggttcaacagtgggttgaaggtggaactaatgcattatgtgtcaacaaattcagaaactgcaacctaagacatgcttatagccttaatagaccatacatcttgtgagattaaatatcagacaacactgtcttgtaacaggctctcttattgtggcattttttcgattattattggataatttaattatgaattaatttcatttcttacattttcaattactgatcagaggtttgtatctaaanaaaaaaacacaaccaacaccacccctcccccctcccccttccctnccccccctccccccttcccccccccacccccctcctctctctccccc

SEQ ID NO: 17871 - DNA, 850 bp, Glycine max
  Clone ID: PAT_MRT3847_116141C.1
cacaaaacggtttgtgtgtagattctgtatttatatgcaatagcgatgtaaaaaaagaggtgtaggctgtttttgtaggaagggaatctgtatagtggaaatgagtctgaggcacctgagttgacttttgtcatttgggttacagggagttaagtagaggtgattattccaaatatgccccaacaacacttccctttagatttttttttttttttttgtttctgtgatattcatagtccctttagatgttttgtttcttcaacaggacaatgttttaataggttgaacaaatttcttaccccctttttggggcatagtatatgtgtgatttgtgtataatcccaaagtcatttggactggcccgggcactgggttatgttgctttcacgaaactttgtttccaagagtcctaatgatttgatgaagatcaaattttcattgactcaaattgattgcacgcataccaaaggcggtttgtgtgtagattctgtatttatatgtaatagtgatctaaaaaaagaggtgtaggtttggttttgtaggaaggaaatctgtatatagtggaaatgagctgaggcacctgagtcctgagttgacttttgtcatttgggttacaggggggagttaagtagagttgattcttccaaatatgccccaacaacactcccctttagatttttttgtttctttgatattcatagtccctttagatgttttgtttcttcaacaggacaacgttttaagaggttgcacagaaatttacaccctttttgggcataatatttgtgtgatttatgtatatttcctcttttgatggtactgggaattgattgatgttgttttctcaagt

SEQ ID NO: 17872 - DNA, 457 bp, Glycine max
  Clone ID: PAT_MRT3847_116142C.1
ggttttttttttttttttttgatgtctaaggatctggaagcggaaccatgcaagcttggagtattgagatgaaaaatgaggtattccctattttctactacaatatgattctgctaattttatttatttatttttaattctaaaaggatactttaaaatgagacattttcgttaaactgagagagaacagaagagagaaaatcaaagattaaagaaactgatattattgatctgtaaaagttagttagagttagttacaattgaggtatatatagacctctgcactgctgaactaaccataactgattctaactaatcaacagaatctaactgcctgatcctagtgaggtgcagttagaagagactaacagccctgtactgctgactaacattagatgggtgttgctagcaaaagccaacagcccttacaatagctatctaacattagatgggtgct

SEQ ID NO: 17873 - DNA, 498 bp, Glycine max
  Clone ID: PAT_MRT3847_116143C.1
cttctttttttttttttttttttttttttttttttttttttttttttttttttttaaaaaaccccctatttttaaaaaattggaaaagttttaaatttccaaaaaaggggaaaaaaaacattattaaacccttcattttttttcttccattcccttcccttttttcccttggatttggctagctctaaagaccccttcccttaccaatatccaaacatcctttaaaaaaaaccaaccatccctttgtttcaggaccagaatcccctaatatggactctcactctataggactaatttggaagccccaggaaaggcaaacctttttcatatgtatgcttttatcccccgaaggcccccacccttgggatcttcaacctttttacaggggaaaaaaacactccccaagggacatccccacccaaaacaaaatccccttctcctatcttaaaagtaaaaacatgacatcttttgggtggccccccctccttttaagccccc

SEQ ID NO: 17874 - DNA, 881 bp, Glycine max
  Clone ID: PAT_MRT3847_116144C.1
cccacgcgtccgcccacgcgtccgccaaagcctcaaaagtcaaatcctcgcacaacaacataaaatatgtttcattggtaaaatttctctctttagatttcagattcttacaaattgagggtgtctctatgttttcttcacgaagtttcctttttgatccatttttccttctgggtcttttgtgctaaccattttctcctgaacagagaatcttcaacttcagggtttcatgacccttctgcactgacttttcttgttggtgaattgtttgattagtaaaggcagagtgatgatgttaagagttggtattgttcatatctgaaggttaaaaaagaaaaaaaaaagtgagaatttttcagcttgttaagcttgattttgtgttgttagtgtaaaaaagggtgtgtaatggaagaagggttgtgtcaaaactcaattcctggttcaggttttgttgataaaactaggattgtagaggctaaaccccttcgtagtttggcacctgtgttgccaaaatctcttcaatcttctctctctggccggtatccatctgtgtttcctccatttgttttgtttgaggagcctcaggagtctcagccgtcacctgctcccatgccggctccaataaggtcctatagggacccactagatgaagaagaagcccctcatggagccaatggagagacttcttcacctatggagggtctcaacggttgtaatgttgatgatggccaaaagcgtgttgtgttgcctatgaacagctgcaaatcttcccaaaagaggagtaagaaaactaaggagtcaccatttgatttgagttcttcggttggtggtatcagcatggccaaaagggaagatggcgatcgtgaagtggttaatcttgt

SEQ ID NO: 17875 - DNA, 369 bp, Glycine max
  Clone ID: PAT_MRT3847_116145C.1
atatattcatttctttatattgctcattggttatgtattgatttttttacttattgcttttgtggggaaacccaattttattacaatggggcccacaaccacctccctttgtttttttataaaaatctgcattttttttgtctgtggaaagggtttacacaatttttctctaaaaggcaaatgcttatatcaacaccttcccctgttcttacagaaggcctggtagaccccccggaggggggggtttacaaaaaaaaactggagcccattcgctcttgaaggcataccagaagcggaccaaagaggtttccttccctcataggagccccctcttagggacactgttcacccggcgagacaaaagtttca

SEQ ID NO: 17876 - DNA, 802 bp, Glycine max
  Clone ID: PAT_MRT3847_116146C.1
cggacgcgtgggcggacgcgtgggcggacgcgtgggtttttattaacagcttttcaaatggcaccctaaccttaacctatgttttcaattggaacactgttgtctgttccaaattagacatcttttgttattattctttttatttctgaaaaaaaattcaatctttgtggattgatttatgtataattaaattattattacatacaatttgtgttgactcgtgagttcgtgttgttgcagggctgcgagaagacgacagaagggggaggcaaaacacaacacaacacaacacacgtgtgtaattgtttatgtgactgacacacacacactacacacattgaatcaatcaatggtggttgcatccattcggcttcttccttctccactcctctctttcgctcctcgtcgctctccatattcatattcatggcgctctcatccctctttaaccattcccttctcttccatccactccaaagcttctactaagggagatggtggagcagtggaattgggtggtgatcaaacagagcttatatttttggggactggaaccagtgaaggggttccacgtgtcagctgcttgactaaccctttacacaaatgtgaggtgtgttcaaaagctgctcaaccgggtaataagaataggagacttaacacaagcatcctcattcgtcaccccaattcctcaggaacacacaataatattcttatagatgctggaaaatttttctatcacagtgctctccattggtttcctgcttttgggataagaacaattgatgcgggcattattactcat

SEQ ID NO: 17877 - DNA, 1103 bp, Glycine max
  Clone ID: PAT_MRT3847_116147C.1
tacggctgcgagaagacgacagaaggggaagaagcgcactcgcaacaggggaggaagcagagcactgcagcctcatcatttcaaggccaacacaaagcagagaaagcaaaaaagaaaaaaaagcaaagagagagagagagataataaagagaaaaaactgaaggaagaagaaagggtttgtttgtgtgaaagaaagagaaagagaggatgcagagtgagaaccagaacaaccagttggtggtgcagaattcggggagcctgagcttcagcagccatttgtcgaaggaagatgaagagatgtcaaggtctgctctctccaccttcagagcaaaggaggaagagattgaaaggaagaagatggaggtcagagaaaaggttcagcttcagtttggtcgagtcgaagaagaaactaagcgtcttgcaaccattcgtgaggagcttgaagccctggcagatccaatgaggaaagaagttgcgcttgttcgaaaaagaattgattccgtaaacaaagaattaaagccactgggtcatacctgccagaagaaggagaaagaatacaaagacgcccttgaagctttcaatgaaaagaacagggaaaaagtacagctaatcaccaagttaatggagttggtgagtgaaagtgaaagattgaggatgaagaagctggaggagctgagtaagaacatagattcgatgcaatgatttagccaaactgctaatgactcctgattagccttgtgtggtatattaaagatgatgacatagtatatttttatatgtatgggtgttttgttttgtgcttgtgtaattttgtggtgttgatgtttgtttaactagcatttgatgggacaatcagctaatttaggagggctatataccctacaaacagccaggcttgtaactaaatacttgcattttgttgtcattttttctccccttcaattcacttttctttggctttgttcaccttaatttaatttattgatgtaatttgaattttgttgccacgaaggatggttccaacaaagtcctggtgtgttttgcttttagttcaatgatttaccattataattgaatataaaattatattataaacttcaccc

SEQ ID NO: 17878 - DNA, 123 bp, Glycine max
  Clone ID: PAT_MRT3847_116148C.1
gcacgaggaaaggatggctcaggcaagaacaataaatttgggaagactatgctgagcttcaaatgggtgaaagaactccgcaagaaaactcaaaagtgatgaaaacattgtgatggtaattat

SEQ ID NO: 17879 - DNA, 169 bp, Glycine max
  Clone ID: PAT_MRT3847_116149C.1
agcaaggcaactggacagctctggcatttatgtggaaggagagcccgattgcagttttcttcccccgggcattgggtccgtggacagattcatcaggagtcctaaccttcaagtgggatgtggacaacgcaactgcagtttttgtatcggcgctccttggttttctctt

SEQ ID NO: 17880 - DNA, 413 bp, Glycine max
  Clone ID: PAT_MRT3847_11614C.1
atctaaaaagtgattgcagaaaacttcccagtacacattaacattataacagcttgaaatatatagtacttaaaacgacaactaattactaggacatttttatttagaagactaagaaaataggtctctaattcgagggattaaaaacatattataagttaactttaaattgtacaacccccgttcacatttataatctggccagtgatgaatgacgcagctggaaggcagaggaacgcgaccattgctgatatggcctcaggatctccaagtcgaccagccggagcttgagacactatagcctcaatgggtttatccgcttcattaccagatttcacgaaagaatccagaagtcaggacttaacaggtgcaggtgccacggcatttgctcgaatattatcctttgcccattc

SEQ ID NO: 17881 - DNA, 1130 bp, Glycine max
  unsure (1)..(1130): unsure at all n locations
  Clone ID: PAT_MRT3847_116150C.1
tcgtccaggagcaccccgtgcgtagaggacttgcgaacactcactcgccactgctcacgaaccgtataaaccctaaaaccttgatttttcccaatccattccacgcacaatatggcttcagatgctgacatggaggactacggtttcgagtactccgatgaggaggaagtggagcaagacgttgatatcgagaatcaatattacaattcaaaaggtatggtagaaagtgatccagaaggtgcgcttgctggttttgctcaggtagtgcaaatggaacaagaaaaagcagaatggggatttaaagctctaaaacagactgtcaagctatattatcgactgggaaggtataaagagatgatggaagcctatagggagatgttgacatatattaagtcagcagtgactcgtaactatagtgaaaaatgcataaacagcattatggactatgtctcaggttcagcaagccagaactttggccttctccaggaattctaccagactactctgaggtcccttgaagatgcaaagaacgagagattgtggtttaagacaaatctgaagctttgcaagatatattttgatattggggaaaatgggcgtatgaataagatcttgaaggaacttcacaaatcttgtcaaaaagaagatggcacagatgaccacaaaaaaggaactcaacttttggaggtttatgcaatagaaattcaaatgtacacagagatgaagaacaacaaaaaactcaagcaactttaccagaaagcactcactattaagtcagcaattccccatccgcggataatgggaataatccatgaatgtggagggaaaatgcatatggcagagcgccagtgggctgaagcagctacagatttttttgaagcttttaagaattatgatgaagctgggaatcataggcgtatccaatgcttgaagtaagcaacaaagtgttataatttttaatttagctattagttttaaacaattttcctaacaatatatgtctgcatttcataattgttaattacaaaaagatacagttaactataaatcattaattttggcagtaacttttataaagatgtattatatacttatgaaatccatcatttcctgagatttagcatntaagc

SEQ ID NO: 17882 - DNA, 325 bp, Glycine max
  Clone ID: PAT_MRT3847_116151C.1
cgtccgtacggctgctagaagaccacagaagggggtgtctttcttgtgcgcctattccatctggggacaggggtggttctatacccattgggttctattaagtttttccctttttccaaaactttactttctttttcattggtttttctcatcattctttaatttgtggatatccaccatgttattagaaaaaaactgcgacaatatgatcggattcagtacctgattcctactatttagggctctgatgatcaactctcctgtgttttttttttaaattaatttttcaactgattctttaaatatacaaatttccaattttttt

SEQ ID NO: 17883 - DNA, 505 bp, Glycine max
  Clone ID: PAT_MRT3847_116152C.1
cttcaaacccatttctccaaaattcttttttgttcctttttgaattttcttgttgctgtgtggagccttccaaattttgggatctgggtactagggtttgaagggtttcagcttttgactttctctctccttgggtttctctctccttttctgagaaattgggtttgaaacctattctggattccagacaaaataaaacctttattttgtctttgttgggtttcttgtgaaatggtgagctgagttgtttgtttctctctctgaaacaaaaatctcatgtttttcttacaaattgggttgttggggtggtgtggtgtttaagattccagattccttgtcttgttagagttttgttggtgaaggagttgaagctgaatttgttatagattgatgtgaggggctaagctaaagccctcttgtttgtgttgtttgaagtgtgtgataatctctcatattggtttgggtgagaagaggaggaatgttctaataccatgcatttctcact

SEQ ID NO: 17884 - DNA, 284 bp, Glycine max
  Clone ID: PAT_MRT3847_116153C.1
gggcaagtgaaagacatcctccaagtcagcaaagaccatgaattccttacgaagttcaatgattgctgttatctttgccatgacattgatcttttcatatgaagtgattatgtcccaagctagggctcactcttcttcatccttagtttcaaaaatgtcacaatcttctcaatctcattcacattcattttttcacaaagaagagcaaaaaccaactcaggagcctgcggttgccactagccttagaaggataccacctagcagaccaaatcctacacagaaca

SEQ ID NO: 17885 - DNA, 548 bp, Glycine max
  Clone ID: PAT_MRT3847_116154C.1
gtgctttcaagaacaaatttatggaagacctaaattgaatggagtggaatttctttcattttccaatgaggacaatgcaatgctcatacaagactttgaggtggaagaaataaaaaaagtgatttaggattgtgaaagttctaaatctccagggccagatggttattcactccttctcattaagattttttgggaggtgataaaggaggaggtaattaattttttcaaagagtttcacaagttcgactttcttcctagaggtacaaataggtcattcattgctttgattgcaaaatgtgataatccactagatataggccaatattgtcctatatctctagtgggttgtctttataaaattgtataaaaaaatcatagcaaatagaatgagtattgtcctagggaagttgatagatggatgccaaaatgctttcataggtgatagggaactcttacaaagtgtaatgattgcaaatgagattgtagatgagggcaagaggaggaaaaaacaatgcattttttttaaggtggattttgaaaaggcctac

SEQ ID NO: 17886 - DNA, 272 bp, Glycine max
  Clone ID: PAT_MRT3847_116155C.1
tttggctcgagctcgtccgtttgatgatgttgagaccctcatggttccatgtcggatcttaccttgtctcgatctacaattggcattcccgaatacacagttgctggaaccattctgcgtagtgacctattggcaaattttttgacagagggcaattttagcgccagtgttgatttgcagcgcactcatcgtatcgaaggaatgattaaaatggtggccacagctggtattcctgaggatacaggtatagcattggcctgttgtatgaatag

SEQ ID NO: 17887 - DNA, 743 bp, Glycine max
  Clone ID: PAT_MRT3847_116156C.1
acggctgcgagaagacgacagaagggatcgaataagaaaaacaattaaaaaaatacttggtgttgaatatatgggtggattaatgaaaaagagaagtggggggtggtctcatgtatagcattttctgaccaagcccagcttcatgttgtgacatcttctgcagtggaatctgagttcatttaagtgaagcatgttaattttgcttcatttaatgatgtggcatgtgtatagatttttcctaacatgagtagctttgtgacacacggtgccactatctcctgcaggtttcaatgaaatcgcattcattgaagtgagaacgaacaatgtgttttacttgatgtttgatgtagtggtgatgctgaagaagggcatatggtggtgcttgcagtggatcttttatcttctgttcattgcgtcaaggaaaatgttgccattgttggttagtgtgctattctgcttacaataaatcatctcagagagaagctacattgtcgagcacagtggtctggcttgtctggggttctaggagaataattgaaggtttttctgcagctgtgtaataatggctgaagcaataagttcaaccattctacgatatgatcatacgcaataagccagcctgattcaatgaagaaagattcccctccaataaaaataaataaatgtaccttttccccagttgagtcaatgtaaatactggtctcaggaaattgagacaatgtcacattatccttgttgctaga

SEQ ID NO: 17888 - DNA, 1800 bp, Glycine max
  Clone ID: PAT_MRT3847_116157C.1
cttatttataatctctctttctatcatatcataaatcctgtaatacttatatttatttttctttcttgcaccacttgtctaatagtaatatttttagtgtccatttatccttttcctataatttaaaaggaggtccaaattctattatacatatgagaaactagaccaaaatttattatcaaagtaattaaaaataacattatatgaaatataaatatatttgttattaaacatgttattacatatttaataatttttttgtcatataaattagaataataataatgatacatttattatattcattactactatagttaatttttcataatatttgtagacacttattttattatgatttgataagaagatattttgcgtgagtcttgattcttgaatatgttttagcatatgccctgcattaattggtatgccaacagagatcacgattggagttccgtgcgaaactcgagattggtgcaattattttaaaatgcacatgtccaactaactccctttcttctatttattgccttcgcagacacaaaaatcgccatcggaaaccaacaatgcctcctttgactttgtggctggtgctgccttttctcgtgttgctagcggcggcaacaacgtctccaacacgcgccacgacggtcgcctcgtcgttccacggtcaacgagagtttgactatttcgctttcgcgttgcaatggcccggtacttactgcaaacgcacccgcagttgctgccccaccaacggttgctgcagaggctccaattttccaacagtgttcaccatacatggactctggcctgactataatgatggaacctggccgtcctgttgctctggatctagtttcgatccaaaagagatattgacattgactaatagtttagagcaatattggccatcattgagctgtagcaagccatcattatgccatggtgggaaaggaacattttgggctcatgagtgggagaaacatggcacatgctcttatcctgtgtttcgaaatgaatatgattattttgtggcagttctgaatctctatttcaaatataatgttacgagcgttctaaatgatgctggatatgttccgtctaatactgaaaagtatccccttggaggcatcatctctgccattgagaatgcttttcacgcatctcctcaaatagtttgctcgaaagattctgttgaggaacttcgcctatgcttttataaggacttccagccacgagattgtgctcttggatctgacattaaaatcaacatggttacttctaaaaaatcttgtcccaaatatgttagcttgccggagccggtatcagtgagtaagacaggcacaatggacttcaaagttggggctatgatgatgtagctctttaaggttatggtactgtacttctatttgtaaatttctgtaccttgcgaatgaacaaagccgcatgaataaatttgctaggatgttgtaccatttatcaatttggagataaatgaatagagtgacgagctggacatctggattgggatctagacctgctaatgtttaggcagaaaaaatgaagtgatggtcgaaagtattatttgggagttgggagctgtctcaagtctggtgccatgtatttggagtctgggttttatcattttctttattattggaagaatgtacaactgtataatggaatatgttgttgtatcatgtggaattatgaatatatgtactttcccttaatatcatcttatatatactttgccccacatctcccatttctgtaaaaaaaaaaaaaaaaaaagaa

SEQ ID NO: 17889 - DNA, 472 bp, Glycine max
  unsure (1)..(472): unsure at all n locations
  Clone ID: PAT_MRT3847_116158C.1
ttcggcncggggaaaagtgcagaacatctcaaaatttcaagtagcagtatacctcctacctaccttttgtgtctgctctttaatgattctatctccttttctcatagactaatcatgttgaaatatatcacactggctagctacactacttaaattgtatttgatgtaaagattcagcaaatacattttgaatttcaatattctctgattgcttcttgtgtccctgaatgtctcattgaggatgacctggttttgtctctgtttattaattgtgcatctttcttttgttagataaaaagataattcagatgattagttaattagttctatcactagttagtggtagttataacagaattagaagaataatcatatatagcttgccgtagtactgtgtaaaaatacagaaaaactgagtatgagaacaagaatctgatttctttgaatttgtataaaaaaaactctttttttt

SEQ ID NO: 17890 - DNA, 286 bp, Glycine max
  Clone ID: PAT_MRT3847_116159C.1
cctcgagcgaatcggctcgagtggagctccttccaacttgtaaaacccttcaaactgcaaacggttttcgcttttccgagtcggaatgtccgctctcacatctctctcactctctcttcgcacactctccctccgtcccaaaccaaccactctttccgcttcactctctgcaatcccaggaagtagcgatggatctaaaaccaaggtacctccccgcaaaagcagaacgggcagaatagaaggccctagataaagcatggcagattctgttcaacgcaagatggag

SEQ ID NO: 17891 - DNA, 2002 bp, Glycine max
  Clone ID: PAT_MRT3847_11615C.1
gatggagggtggtgttgtgattgggatgattcgctcatgagttgtttttgtgaggttggaggacgaagggtaatgagctatgaactttgaacactctgttttgttgagtttaattgcaaagctacttttctctgtttggggataaataaaatgggttgcttttcatgtttcgattcgagttccaaggaggatcactatctccgtcctcagcaccatcccaatcaacctctcccttctcagatttccagattgctctctggagcagacaagttacggtccagaagtaatggaggttccaaaagagaactgcaacagcctcctcccaccgtccaaattgctgctcaaacatttactttccgtgaacttgccgctgcaactaaaaactttagcccagagtcctttgttggggaaggtggttttggaagggtctacaaaggcaggcttgaaaccactgctcagattgttgctgtcaaacagttagacaaaaatggtcttcagggtaatcgggaattccttgtagaggttctcatgctcagtcttctacatcaccctaaccttgtcaatctcattggatactgtgcggatggggatcaacgcctcctcgtttatgaatttatgcctttgggatcattggaagatcaccttcatgatcttccccctgataaggaaccactagattggaacactagaatgaaaattgctgctggtgctgcaaaaggattagaataccttcacgataaggcaaatcctcctgtcatctacagagacttcaaatcatctaacatattacttgatgaaggataccacccaaaactttctgactttggtcttgcgaagcttggtcctgttggtgacaaatcacatgtttctacccgtgtcatgggaacttatggttactgtgctccagagtatgctatgactggacagctgactgtgaagtctgatgtatatagttttggggtagtcttcttggagctgattactggccgtaaagccattgacagcactcgaccccatggagaacaaaaccttgtcacatgggcacgtccactgttcaatgaccgcaggaaggtttccaaagttagcagatccacagcctgcagggacggtatcccatgcggggtctttaccaggctctagctgtggcatcaatgtgcattcaagaataggctgcaacacgtcctctaattggggatgtggtgacagccctttcttttctggccaaccaggcatatgaccccaatggttatagggggtgctggtgatgataaaaagaacagggatgataaaggtggaagaatattgaaaaatgatgtagctggaggatctggacgcagatgggatttggaaggatctgagaaagatgactccccacgtgaaactgcaaggatgttaaacagggatcttgatagagaacgtgccgtggctgaagccaagatatggggagagaattggagagaaaaaagacgacaaagtgcgcagggcagttttgatggttctagtcgattgacaattcccataatgtgccgagctcatctttctgccttgaataaagctggtgtagggaaacaagtctaaaaggccgttttggccatttactaggttctgttttgtttagaatttgtcttgtggccatttcttgcagtggctgcaaccaaacataatgaaccgggtaccaaaatcttttctacatcagccttttatgcacttagttttcttttatttattttcatttaccgagtgtaaattatttgctagaactaggaggtcaaggttatgaggaccgacgctttctgaaaatgctgcaaatgacaaaaatgactaatttaggttttttttagctaaaatgcgactatccaacattctttgtaattttttcgtcgtaatcttagctgttagcaagaaactttaacataactgaaatgcaattgtattcaattcgattgcttgacaggaaaatttatttaaaacgaggtaataataattgctgtgttattccttt

SEQ ID NO: 17892 - DNA, 312 bp, Glycine max
  unsure (1)..(312): unsure at all n locations
  Clone ID: PAT_MRT3847_116160C.1
aattcngatanacngtccanggnttngnttcaaacntntcaaacgtccantncnacanttntncnggntacgcgtngtacnccaannaacgtagtaanttncccaattcaaactctncttctccacatcaattcttcaacacncgtttntnttcttcgttaaccaatttcgtttgcgcagtgcaagntcgaatcaatggccagcgctcagctcacagcaatagcgtcatcgatctctacggcgtcgtttgaagggctcgaccttncgctgttcaattncttccagggcagattagattggcaatctctcccc

SEQ ID NO: 17893 - DNA, 261 bp, Glycine max
  Clone ID: PAT_MRT3847_116161C.1
catatccaattaactactccacttttttttcatcttttttcaatatctcccttaaggagctcctttcaaaagattgcggcgttattaaaacttcacactccctcttatataaaattatcaggtccttataaacacctctatacattttatcctgaatcaaatccacaataatattactcctatcctactccaaaaacaaaatattttaattttgttcccttacaacattgctatcaatacatcataaataccatatgttat

SEQ ID NO: 17894 - DNA, 365 bp, Glycine max
  unsure (1)..(365): unsure at all n locations
  Clone ID: PAT_MRT3847_116162C.1
acaactgaagaagccgacttcatggttcagttgtttggtggtaacacttcagtcactgaaaagcacagtggaaataccacttttggcttttggcctgaccatgaatccacaatantggccataactgacactaataacaactcataccttcctccaaattttacaaatactaattttttgtgtttctcacaagggagtanctccancactgataatagtggtaataatatcttttccactacaagtaatggaacctactcctgtgatccanaaacaaactttaattctatgcccatggttttgtgccttgaaaataccaaatttantccccatanttttcaatgtaatgactacttaanccaaca

SEQ ID NO: 17895 - DNA, 360 bp, Glycine max
  Clone ID: PAT_MRT3847_116163C.1
ttgggggctgtatacatagtgagcactgggtcacttcttatgaacaaaaccagttacaatctggcgatgccggcggctcatccgggacatccaccgacgggccggccaggattggctcagaacggggcggatgaaagtcgattagacggagggacgggcctcaaggggaacgtacggcagtatgatgaacacgggcacacaatagtacagggcgatgaggcaccagcgaagtggaggttgatgtgcgcttgagatgtaagggagcccagtgcttgactgccgaaaagggcttatgtgggcccactctgagtacgtttatcaccaacaaaaccgcttggcatacagagatggcggagacaa

SEQ ID NO: 17896 - DNA, 394 bp, Glycine max
  Clone ID: PAT_MRT3847_116164C.1
cccacgcgttcgctgaaaatgagttccaaggttttgcttgttctacttatgttcttggccactagacttctgatctcctctgaggttgcacccgatgatgcatacgagaattttgacaaaatagatgggaagcctagtgcagatggggtagatgaaagcaagtattggcgtggcggctatggcggcggtcgtggtggcaggcgtggtggctatggtcctaatgaacataacgaggctggggttgatgctaaccctcacaactaagaaggcaactttctaaagcttatatatgggtttaagttatcgcaataaataaaacttcatgagaaagttagttgtaatagaagtggaaaactttgtaaaggaataatacctttcatgaatttgcttatct

SEQ ID NO: 17897 - DNA, 493 bp, Glycine max
  Clone ID: PAT_MRT3847_116165C.1
gttctgaaaatgagttccaaggttttgcttgttctacttatgttcttggccactatacttctgatctcctctgaggttgcacccgatgatgcatacgagaattttgacaaaatagatgggaagcctagtgcagatggggtagatgaaagcaagtattggcgtggcggctatggtggcggctatggtggtggttatggaggtgggcgtggtggctatggcggcgggcgtggtggcgggcgtggtggctatggtcctaatgaacataacgaggctggggttgatgctaaccctcacaactaagaaggcaactttctaaagcttatatatgggtttaagttatcgcaataaataaaacttcatgagaaggttagttgtaatagaagtggaaaactttgtaaaggaataatacctttcatgaatttccttatctatgtgttgtctctggttctgttttgctaaactcaaataaataaaattgtataatagtgtctaa

SEQ ID NO: 17898 - DNA, 767 bp, Glycine max
  Clone ID: PAT_MRT3847_116166C.1
cccacgcgtccgcccacgcgtccgcccacgcgtccgtctgactctacttcacttgcctataaatagggaacactcagtcacttccttcaaatcgacatatatacacttgtactgttctattagttcatactaagttctgaaaatgagttccaaggttttgcttgttctacttatgttcttggccactatacttctgatctcctctgaggttgcacccgatgatgcatacgagaattttgacaaaatagatgggaagcctagtgcagatggggtagatgaaagcaagtattggcgtggcggctatggtggcggctatggtggtggttatggaggtgggcgtggaggctatggaggtgggcgtggaggctatggagggggacgtggtggatatggcggcggacgaggtggctatggtggcgggcgtggtggctatggcggcgggcgtggtggcgggcgtggtggctatggtcctaatgaacataacgaggctggggttgatgctaaccctcacaactaagaaggcaactttctaaagcttatatatgggtttaagttatcgcaataaataaaacttcatgagaaggttagttgtaatagaagtggaaaactttgtaaaggaataatacctttcatgaatttccttatctttgtgttgtctctggttctgttttgctaaactcaaataaataaaattgtataatattgtctaaaaaaaaaaaaaaaaaaaaaaaaaaaaagattaccccaagggcggccgctctagagga

SEQ ID NO: 17899 - DNA, 118 bp, Glycine max
  Clone ID: PAT_MRT3847_116167C.1
ctctaaaaaaatgctggcttttacaagaatgaagcgagtcactgacccgttcgaccaccaggcccgagctcgactcgtcggtactgatcaccggcaaatcacctccgccgcccaaggt

SEQ ID NO: 17900 - DNA, 109 bp, Glycine max
  Clone ID: PAT_MRT3847_116168C.1
aacactaaagtactaacttctgatgtggggattgaacgtacatatatagcataatagtaccaaaagcagatgagatcatgtatctagtcattgtacatatcttgtaaac

SEQ ID NO: 17901 - DNA, 1281 bp, Glycine max
  Clone ID: PAT_MRT3847_116169C.1
cttcggcgaaagctttggtcggggttgggggtcccgagccactgctccaacggattccctctcttctgtctttcttcatttcctcgggtccctctctctctctctctcacacacacacacacacacacgcgcacacacacacacgcacacgcttgtgttttccaatttcaactttttattggtaattgttaaaatttgacaactgttatttgatctggggttgccaagtttcgactgaattttaatgggtttgtgctgtttttagtttttttttttcttttgttcatgccttctgggtatttttttttgtcactttagagtttattaatggtcgtttatgtttttattgatcattctgattgaaatttgttgttaggaatctaatccgttcattttttttttgtttaattattttgtggggatttgctagaatctgttttcagtcttttatgaaatttaaagctgggggagctcaaaactttaattatattaactttttgatctaattcagaagtaattacttggtgtatacatagttttttttttttgtttaccttaattagcgatttagctatttcgcaatagaagtctcattttctttgtttttgaagataaactgatttgggaaggggagaagtgttcttggctaagtcaatttttcgctttttctgtcttttacttgtcaaattcatggtattctgtgcctaacagctgtagtaaatgtctttatcgaatatttatcaaccaagttaagttccttctgggattttgacctgaagtgaggtttcggtgaatggcggtgtaaacaagatcaaatttggtattggtgtttagtaatcttattttgtcaaagtgatcatccctatctcccaaaccagatctttctgaaagagattttttagggtaaacatattctactgatttttgtgggcgtggtggcgggcgtggtggctatggtcctaatgaacataacgaggctggggttgatgctaaccctcacaactaagaaggcaactttctaaagcttatatatgggtttaagttatcgcaataaataaaacttcatgagaagggtagttgtaatagaagtggaaaactttgtaaaggaataatacctttcatgaatttccttaaaaaaaaaaaaaaaaaaaaaaaaaaaaaaaaaaaaaaaaaaaaaaaaaaaaaaaaaaaaaaaaaaaaaaaaaaaaaaaaaaaaaaaaaaataaaaaaaaaaaaaaaaaaaaaaaaaaaaaaaaaaatacaaaaaaaaaaaacaaatac

SEQ ID NO: 17902 - DNA, 1479 bp, Glycine max
  Clone ID: PAT_MRT3847_11616C.1
agctcgttatttttttcgagaaaactttctgactttggtcttgcgaagcttggtcctgttggtgacaaatcacatgtttctacccgtgtcatgggaacttatggttactgtgctcctgagtatgctatgactggacagctgactgtgaagtctgatgtatatagttttggggtggtcttcttagagctgattactggccgtaaagcaattgacagcacccagccgcagggagaacagaaccttgtcacatgggttttcctctattctttctcttgtcattttaattagtttggcaagcataaactaactgcagttttatatgtatgtttgtgcaggcacgtccactttttaatgaccgcaggaagttttcaaagttggctgatcccaggctgcaggggcgatttcccatgcggggtctttaccaggctcttgctgtggcatcaatgtgcattcaagaatcagctgcaacgcgtcctctaattggagatgtggtgacagccctctcttatctggccaaccaggcatatgaccccaatggttatagggggtctagtgatgataaaaggaacagagatgataaaggtggaagaatatccaaaaatgatgaagctgggggatctggacgcagatgggacttggaaggatccgagaaagatgactccccacgagaaactgcaaggattttaaacagagatctagatagagaacgagctgtggctgaagccaagatgtggggagagaacttgagacaaaaaagaaaacaaagtttgcagcagggcagtcttgatgcttaattttctgccttgaggctatggaagatggaagaaaatatggggagcttatctagagaaacaactcaaacagccagccatttaggccatatactattactaggttctgatttccttagaatctgcctagtagccatttcttgcaatggctgcacatgaatgaacctcgtaacaaaatctttctaacataaccttttaggcactttgttttcccttgtttctttactgtactttctgcctcctgaactgaactcgagcataatggagaccgtacattatgtcataatcgctgcagtaaacatgcatgggcaaaattcttctcccatgtgtttatggtaataatgagccgggtaccaaaatcttttctacatcaaccttttatgcgcttagttttctttcatttattttcatttaccgagtgtaaattatttgctagaactaggaggtcaaggttatgaggaccgacgctttctgaaaatgctgcaaatgacaaaaatgactaatttaggttttttttagctaaaatgcgactatccaacattctttgtaattttttcgtcgtaatcttagctgttagcaagaaactttaacataactgaaatgcaattgtattcaattcgattgcttgacaggaaaatttatttccaacgagtaataataattgctgtgttattcaaataagagtatt

SEQ ID NO: 17903 - DNA, 752 bp, Glycine max
  Clone ID: PAT_MRT3847_116170C.1
ccccacgccgtccgcagtgttggttactttttttctcgcacagaaaagaagggttttcgttcgcacagtgctcactcgcttcgttctgttcctactctcgctgatcatcatccatggctgaaccacgcgccgcctccgacacttcatttggaatcgctagagactggcgcctcaacctctccgtcgcaccgccattgcagatctccaaagatgtccaaggatctgacaatcccattccactctcaccacagtggcttctgccaaagccaggggagagtaaacctggatcgggatctgtggagaaccatgtggtctcaaactcaccatttggcaatcgctcagagactgttaagacatctggaaagggagaggatgttcatgatgcccataagaaaaaggatgtctttaggccatccatgtttgactcagaaagtggacgtcgtgaccgctggcgtgatgaggagagagacactaagtcctctgtccggaaggatcgttggagggatggagacatagacctaggtgattctcgaagagtggatcgatggacagataatttgtccacaaagaactttgcagaagtacgccgtgggccatctgataatcatagatggaatgattcaggaaatcgagaaactaactttgatcagcggcgtgagagtaagtggaacacacgctggggtcctgatgacaaggagccagaaggcatttcgggaaaatggagtgactctggcaaagaatgggatatacat

SEQ ID NO: 17904 - DNA, 1371 bp, Glycine max
  Clone ID: PAT_MRT3847_116171C.1
ttcggctgcgagaagacgacagaaagggacgaccgctctcccgttagcttcaatttataagaatggcactttctcctattcgttcttcttctttctcttcatcagctattgttgcattggctgtgttactgcttcttacagggacctcttcagctaacctctcaaagaacttctattccaagacatgtcccaacgttttcaacactgtaaaatctgtagttaaatctgctgttgtcagagaacctcgcattggggcatctattgttcgtctcttcttccatgactgctttgttcaaggctgtgatgggtcaatactacttgatgacactccaaccttccagggggagaaaactgcagctgctaacaacaattcagtgagaggctttgaagtaattgatgctatcaagtctgaggtcgagaaaatatgccctggtgtggtctcatgtgctgatatcttggacattgcttctcgtgactctgttgttcttcttggagggccattttggaaagttagacttggaagaagggattccagaactgccaactttactgctgctaacactggtgttattccacctcccacatctaacctcaccaaccttatcacaaggtttcgagatcaaggactctctgctagggacatggttgctttatctggagctcacacatttggcaaagcaaggtgtactagtttcagagatcgcatatacaatcaaaccaacattgatagaacatttgcattggccaggcagaggaggtgtcctaggactaatggcacaggtgacaacaatctagcaaatctagacttcagaactccaaatcattttgacaacaactacttcaaaaaccttctcatcaaaaggggactcctgaattctgatcaagtgcttttcaatggtggatccactgattcactggtaagaacttacagccagaataacaaggcatttgatactgactttgttaaagcaatgattaggatgggagatatcaaacccttaactgggtcacaaggtgagattaggaagaactgcaggagagtgaattaattagaagtgacacataaatttgtttgttgtaaactttgtacccttcaaaagggggaagttgtttggtcttttttgttgtttaagtgatttctcttgggttgggaaattgtgaattgtttgtttagttcaatttaaattgtacttgtgtaaccttataattttaatatggaataaattatatggcattttgccttttgtagcaggtggaataatgcatataacttcaatcaattatgctacactgtatttctcttttttcttctttatcttatttttccccatctttgatctctcccttccattatatgaacaattactcctt

SEQ ID NO: 17905 - DNA, 2218 bp, Glycine max
  Clone ID: PAT_MRT3847_116172C.1
ctcttacttaatttaccccctttgtctctctctgcccccgatctccctctctctaacgacgccgtttcgatcctctccttccgcttcgtagtaacagagttcaaaccataccatggatgagacttcagctctcatcgaagccattctccgagagcaagaggaagaagaagaagaagctcacagaagaagaaggaaccacaccacaatcaaaaataacaacaacaacaacaacgaatggcaaacggtgtcgtatacaaagcgcaaccgcaaccgcaacaataataggaagcctctcgccgacgacaatttcgccgccgatccttcttcctccgacgtcttcagctccgtccagcgccattccgaggaccgccgcctccggctactcaagtctcagatcgccgccgctgaagcggctgctgcggaagccacaccgagcagatcgaagcggcattccgacaacgaggaggacggcgatgccgagcctgaagctgaggtgaagaaggcgaagcagtagaagccgaagaagccgaaggtgacggtggccgaagctgcttctagaatcagcgccgatgatctcgacgcgtttctcgctgagattaccgcttcgtatgaatcgcagcaagatattatgctgatgcgatttgctgactacttcggtcgcgcattctcgtcggtgagtgcagctcaattcccgtggctgaagacgttcaaagagtccaccgttgcgaagattgttgatatccctcttttgcatatatctgaggatatttacaaaatatcaacggattggatcagtcatcgatcatatgaagcacttggttcctttgtgctatggtcgttggacagcattctttcagaccttgccagtcatcagggagttaagaaggcagtccagcaatcatcatcgaaatctcaggttgccatgtttgtggttttaacaatggtgcttcgacgaaaacctgatgtcttgattagcttattaccaatattaaaggagaataaaaaatatcaaggacaggataaactccctgtcattgtttgggtgataactcaggcttctcaaggagatctagttatggggttgtacttgtgggtatatcttctcttgccgatgctgagtgtgaagtctggttgcaatccacagtcaagagacttgatattacagttggttgagagaattatcacatctcctaaagctcgttctatcttgctaaatggggctgtcagaaggggggagcgtgttgtgcccccatgggcacttgattctctattgagagttactttccctcttccttcagcccgggtcaaggccactgaaagatttgaagctgtttatccaacattaagagaagttgcccttgccagttcccctggaagcaaagcaataaagcatcttgcacaacagatactaagctttgcaattaaagctgcaggagaagctaattctgacctatcaaaggaggcaagtgacatttttatttggtgtttgactcagaaccctgaatgttacaagcaatgggattttctttatatggataaccttgaagcaagtgttgttgtattgagaaaactttctggtgaatggaaggaatactttgtcaaacatcctactcttgatcctttgagggaaaatcttaagagcttcagtcaaaagaatgaaaaggcattggctaaggtggatgatggtgctcgccatgcattattgaaggatgcagacaagtactgcaaagtccttttgggacaattgtcacaaggccatggatgcttgaagagcatgatagttctttctgttgtacttgctgttggtgccgttttcatgtcccagaacttgcatttatgggattatagtcaactgacagaaatgttgaatctctcctaggatgagagttatcctgtgatttgctcggtgcttatgcccagtgtggatcacttcagtcaatagtgaggtgtgatgaggaatatttaatttattttagtcttcaacatagcgaaattaaacaaaaataggaggaacaaacaaagccatggaagcttgtgctggccatttatataggtgttgatgtgtgttctcaaattttaggtcaacttgaaaatttcttgcataaattttttttatagtggcttgttatatattgattttctgataaagcgccaaatggctatagagaaatgaaaatgaaggtgaaatgaagttgtgcatgaatgcaaattttgaagc

SEQ ID NO: 17906 - DNA, 656 bp, Glycine max
  Clone ID: PAT_MRT3847_116173C.1
acgagatcaaaccgaatgttttgattgataatttccaataaaaagtaggcataaattaatacagttttggtggatggaattcggctcgaggaaaagtagtaaagtggtacatggtaaaatatttgaggatcctccgaaagcagagctagagtcgaaggaggcgcttacaggctttgaggatcttattggcgcctcctctctgcttcttcttagaggcaatagaaggtgatgttgttattggcgtgtcctcctggtcgtggatcctgcggtatctttctgaaaccgatgaagatcttgtcattgagaaagccctctgaaactgagatgaagaagacactgaagcactccttcccagtatgactccaaatctctctccctcatgatccatggatctccggctgctgctgtcatcatcgccgctaatcctcgaatacccattcattgggaaggtaggtagcagctataattaattcatatgtgactatagataatagagctggatttcgattcattcattgtgagaagccagaagccagaagccagaggaattttttattgtctacctacgggtttttactggaagtcattcatcagagactcacatgtcatgtgttagagacattcaattcatgtcgcttccccacaccactccaccc

SEQ ID NO: 17907 - DNA, 284 bp, Glycine max
  Clone ID: PAT_MRT3847_116174C.1
ggagagcggatgctcgagcgtgcaagcacgaggggcaacttttacttttcattcacttggagatgaatgccgggttgggactccacgttggtgatgaacacaatatggcagggctgaatacatccaccaccctgatgccatttgacccgggacccacgtacctcctggacggcggtactctatgactatcaagctaaagatgcacttaacttctgacagagttgcatttttacacttcagggtttggtacgacttatatctcttctaaatcataatttgtttaa

SEQ ID NO: 17908 - DNA, 294 bp, Glycine max
  Clone ID: PAT_MRT3847_116175C.1
gggttatcagtctaatggaacagtatcaccgtttctcttccacttacgcaaatatggtgcagtcattgtcagtcttctcgtctactttcttcttcgctgattcacaattttttcgcgcaatctacagtaacccttgtgccaatcgttaactattacttgaggtattgatcatgctttctgactagttgattacatattgtatttcataatttggaaatttgcattgaattgcatctccggtaacgttcgactgaaacatgatttggaacctactcattctgcgtcttaatcttc

SEQ ID NO: 17909 - DNA, 395 bp, Glycine max
  Clone ID: PAT_MRT3847_116176C.1
ggctcgagggcaaaaatggcaggtggaggattttctgatgctggaacactcaagagggctcatctttaccagtacaagattactggatatttcatcttttcttgcattgttggagctcttggtggcgctctatttggctatgatcttggtgtttcaggtggagttacctacatggatgatttcctcatacaattcttcccaaaggtgtgtgaaaagaagcatgcacatcttgcggagacagattattgtaaatatgatgatcagatattgacactctttacttcatctctatactttgctgcccttgtgtccacgtttggtgcttccagtgtaacaaacaccaaaggcaggaaagctagcatcttagctggatccgtaagctactttataggagc

SEQ ID NO: 17910 - DNA, 451 bp, Glycine max
  unsure (1)..(451): unsure at all n locations
  Clone ID: PAT_MRT3847_116177C.1
ggcanacaaaaggagccacaacactaaaaaaaaataagaaatttatggttttgtatccagctctacagaatctgtgacaatcacaaaagggggcggcgccaactaacaataaaaccatacaaatactaaaaggacttacaaaacactcttaaatccaccacaagctccggtatacanattatgctctcctagccgctgctcatctgtcacaccaatatattagaaatcgattttattctcaacaagctatatattaaatagataaatcaggttcttgaatccggcttcaacatgcccaactacctgaagaagcaagagaactctacaagtagttcatgcagattgtgaaggacaaagaataatttgttctcaatcaatactatgaaaaggctggatagctaatagacacataaatttatcttaacgcccagatatctgcacttatacaaaa

SEQ ID NO: 17911 - DNA, 338 bp, Glycine max
  Clone ID: PAT_MRT3847_116178C.1
ttttggtaaatttttttttttttttttttcagggcgcgacttaaaagtgagagcactaaatatcttattaaaaccactttacaggagattatggcggtgaacttttatgtagtgcgttagaataaaacatgtggggataaaagagggcaatcctaatttagagggagatacattttggaaatagagtttgcgaaaaaaactctcccttttctggtatttgaaactaagtttaaagacaaaatggaggcgaaactcggtttacggtggaatccaactgaaaataaaacacgagcttttttaatagacgcgggaggggtctcaactgaaaaccaaactta

SEQ ID NO: 17912 - DNA, 406 bp, Glycine max
  Clone ID: PAT_MRT3847_116179C.1
cccacgcgtccgattttattaaaggcagaaagatacttggatttggactgctaaaaaaaaaaaaaaaaaaaaaaaaaaaaaaaaaaaaaaaaaaaaaaaaaaaaaaaaaaaaaaaggaagaacaacaaaaaaaaaaccaaacaaaaagggggggccattctaaagaaaacaacattaatagcgggacctaaatacaaaaaactttccaatattgaaaaacaaattaactgaaaaaaccctggtttaacacaattgaacgggaaaaaccatatgccacttaaaaaaaccggctaaaaaaaaaaaagccctccaccaattacccttttaaaaaaaagagcaccctgaatggacattgcaaaaagctctaaaacctaaaaggaaaaaggaactcccctttgtttacccc

SEQ ID NO: 17913 - DNA, 780 bp, Glycine max
  Clone ID: PAT_MRT3847_11617C.1
gttgaagacaaaactaatgagcttggaacattcaagtctctgtatggttaagaaaaagcttacttttgtataaattgtgatggtgaagatacaaaattgttggaggaggaaaatatggagatggagggtggtgttgtgattgggatgattcgctcatgagttgtttttggtattgggtttcattattattagtggagtttggtggagaagaatctaatctgtttgtcctgtccactccattccactccaccatggctatctatctttccctttgtttgtgtttctttctaaatataattgaataaatagtaactctaatctaacacgctttctctgctgtgtctttgcagtgagtttcattgcaaagctacttttctctgtttggggataaataaaatgggttgcttttcatgtttcgattcgagttccaaggaggatcacaatctccgtcctcagcaccaacccaatcaacctctcccttctcagatttccagattgccctctggagcagacaagttacggtccagaagtaatggaggttccaaaagagaactgcaacagcctcctcccaccgtccaaattgctgctcaaacatttactttccgtgaacttgccgctgcaactaaaaactttagaccagagtcctttgttggggaaggtggttttggaagggtctacaaaggcaggcttgaaaccactgctcagattgttgctgtcaaacagttagacaaaaatggtcttcagggtaatcgggaattccttgtagaggttctcatgctc

SEQ ID NO: 17914 - DNA, 244 bp, Glycine max
  Clone ID: PAT_MRT3847_116180C.1
tttttagagagaaaaaaaaagtaagtacaatggggagaagaagaagcaacattcttgtcaatgtcttccattacctacctaagggtttttctttcacataaacccaacacttaaagaaaaaaattttaaaaaaaaagagtctaaaaactcggaatttacatgagaaaatccttaaaaaaaactaaagggggggggaattctagcccaagagcaaatctttctttcatgggttcaaccccgattt

SEQ ID NO: 17915 - DNA, 474 bp, Glycine max
  Clone ID: PAT_MRT3847_116181C.1
ttttgatggcattttactttttttttggaaaccgatttatgaggagatccctattccctatgacccaattttagaggattttgggaattacattttacaaaaccatcgcccgaactaaaactggatttaccttaggtactatttataaaatcagttgcaattctgggggggaaacccgcttacaatgctaaacaggaatttcggtctggaagactggcatacatgggttgagcactctttggtttggccaccctgcccagataaatatcaatgggggggagggaaggatcaccttttatgcgcgaattggcctctcatcctgggggaaacttttttttcttccaaaaaaactcccagggatgcacctttaatgagagtggaatgggaaaacatgccaaaccctttgtcaaccagaaaaatatttgcttttaacactctcccaaaagggcctgttgttggccttcaacccgaagc

SEQ ID NO: 17916 - DNA, 143 bp, Glycine max
  Clone ID: PAT_MRT3847_116182C.1
ttgtttgacatcacatgcttactcataaagagtatactaaaggaaccagtcttgacgtatagaaaagaggactgaatgtacagcaactgggccgcatatggacagtccaagctcgccaacattttacatgcaaatgaacttac

SEQ ID NO: 17917 - DNA, 393 bp, Glycine max
  Clone ID: PAT_MRT3847_116183C.1
gaagcaccacccttaaaaaacaatcttttaattgttttttaaggggaacacaaaaatttccttctccatccttcggattaaaaaaaaacagttttcccttaatgggacgtaaacaagtttttttggccagaaaaaaaaaatccctggccccaaccctcataaatgctttcctcccccggatttaaaatgggggaattgaaaaaaaaaaaaaaaaggggggagttgggtgtacaagggaaaaacagtttttacgaggttaaaatgtttctttaaaaacaaagggcaaaggttgtccccaaaaattaaccacctaatagcaaaggccacaaaagcaaaaaagggccacccaattgaacccctccccatctttgggaaatcattttttccccaatt

SEQ ID NO: 17918 - DNA, 486 bp, Glycine max
  Clone ID: PAT_MRT3847_116184C.1
aaatgaaaaaagtaccatattaagtcattattacagatgcaaacaaccaactgagcaaaatttcagcgaccacgtaaaaagaacacaaaaactggatcccagtctgaaacaactaagggacccggcaaaaccaagcagagactcccatgggggatccctcattgccccccctttgattttccgcaagaattaaattccacagcactacgaaaccctaaaaaggattcggcggctggaaaaatgcccttcagggcttgacggtggcgcagatggtggaggggctaatcttgtaagggatgttgaccccacattggccagggaccaacgccgccatggcggcattcaaactcggtcccagattaacggcaaggtttttcaggcaacggaccgccccctgggatccagcggtggccttcgccgcgccgcgtgaaggacttcaccccggtgcagcaggctctggacggttctccgccgcgtcgaagataa

SEQ ID NO: 17919 - DNA, 763 bp, Glycine max
  unsure (1)..(763): unsure at all n locations
  Clone ID: PAT_MRT3847_116185C.1
tcgacccggcgtccgngagcttaagggtatcaccgccgacacagggtttgcttgcgctgcgctaatgccgccaccgttatgctcaacggcgaggccaagagatactgccaacagtgtggaaagtgcgatttttttgtttaagtctcttctctcttttccatcaattgattgattcaattaccacttcgctgcttagttagttctgttgttcgatatgttcttcaattatgcgactccgtttaactctattccgtcacttgattctattacttctctgcttagttagttctattgtttgagatgtgcttcaattgaatgttattatgtgattgtgttgttgaattgacggttaactctgcgaatttcttcgcaggtttcacgttttgtcggatttcgacgagggtaaacggagctgtagaaggaagttagagcggcataacaccagaaggagaagaaagcctacggcggattctggaggggctactcatagtgaactacttcaacctgttgccgaaaacgaggaaaacaattatgatgtggaagctggaaaagaatgctcactggctgagtatgaatcgtacagattgttcgaatttgagtaccgatatcaacgacgttggagtgtctctggatcttgaagatgaaccggctcccattccgagctcggctcctgaagcccagaatattaatagtgatagtgttgtgtctttggctgtttctggtgaaacgcgagtgaatagtgggaacacttccaattcgcctt

SEQ ID NO: 17920 - DNA, 263 bp, Glycine max
  Clone ID: PAT_MRT3847_116186C.1
ctcataacacaaagcacaaagcaaagctcatcttgagttaaaaaaggcagcagctcttcatggctcttcatccccatctggctggcaaggccggaagctggcccatcagcccagaaggggaaggggagcatgagaagaccgcaccaacagctctcagagcccaggtcggccaaccgagtaagtactggcccatcttgcgagccccgcctaccaaccggagtccaggcactacgctggcactgtgggcttcccaaccaaaacct

SEQ ID NO: 17921 - DNA, 517 bp, Glycine max
  Clone ID: PAT_MRT3847_116187C.1
gttttccgtccacgctttgacaaatcgccattccctatatattccttctcatcctcttcctcaaactgtttttgttttccctcttcacacccacaaaactcataactcaccaacacaccatcaaagaggaaaaaaaagaagcttcaaaatttcaatgcaatttgctgagaaaaatgcaacctttgaaaaagggggttccgggagtacatcgaacctttgaaggaaaaaaaggaaaaaaatccaagttttccttaaaaaccttcctttgtcattaaaccttgtcacacaaccaattgaggcgtgtaaacagcaattgtgtgaaacggttgcgaagtacaatttaaatgcccaatcggagtgttcggaccaaacatcaacggatggacctgtttttgaggagttcattattcctataaaaaaaaaggcatctcaaccatctgttgaagaaaatgatgataaagaacattctcttaaacacacaaaaaccaccactgataaaaagaaatcagattggctc

SEQ ID NO: 17922 - DNA, 221 bp, Glycine max
  Clone ID: PAT_MRT3847_116188C.1
gatagagcgatgaattccttgtcactcatctttgcgaacaacagtatgcagctaactgtgagtggaaggggaaatgatctatacggctcaataacttcaaacatttaacgatggagtgtacttaacccataacttgttgacgcctgctgagactgatgatcagacaactacacatgcttaaggaggcactaattaatcaggaatcatttcctctggctgac

SEQ ID NO: 17923 - DNA, 811 bp, Glycine max
  Clone ID: PAT_MRT3847_116189C.1
ggagaattgctgccctttctgacccttttaaggcaatgctttatggtggctttgctgagtccaagatgaggaagattgatttcagcaaaaatggtataagctcaaagggtatgagggcagtggagttgtacagcagggctaagaggttggactttttctgtgccatgactgttttggagcttctttcctttgccaatagtttctgttgtgaggagatgaaggctgcttgtgatgctcatttggcttcatttgttggaagtgttgatgatgcattgatacttattgactatggattgggcgagagagcaccccttcttgtaggggcttgcttacaagtgttgcttagggagcttccaaattctctatataatccaaaggtggcaaaaatattttgtagttttgaggcaaaggaaaggttggccaatgtggggtgtgattctttcttgctatactacttcctgagtcaggtggcaatggaggaaagcatggtatctaaaaccacaatgatgttgctggagagaatgggggagtgtgctgcagaaagatggcagaaagcccttgcattccatcaattggggtgtgtgcttcttgaaaggaatgaatacaaagaagctcagcattgttttgaggtagcagctgaagcaggtcatgtttattctttggctggtgtggccagaaccaagtacaagcagggtcaaccatattcagcctataagttaattagttctctcatatttgagtataaaccagcagggtggatgtatcaagagcgtgcactgtataacatgggaaaggaaaagagttttgattt

SEQ ID NO: 17924 - DNA, 379 bp, Glycine max
  unsure (1)..(379): unsure at all n locations
  Clone ID: PAT_MRT3847_11618C.1
ggagaanagaggaggatcanggaaggatgttttacgtggctgataacgataatcagacggaagagaaagaggcgggggggggaaatctttccttggataataaatctcgctctagatcggaaaaagtggcctctacaaaagcacaatttgttagtggaaaaaccttcaaatatgatataagtggtgctggataccattctacacaagattgtccgggaaaggaagatcaagaaagacccaaacagattgatgccagattgagacaaagaatagatcctcacaacaatgagggtgaagctcatatggaaacaaatgggggtaaactggcccttgatgatgacgaaaccttctaaaggaaccatggtaggatcttaaaaat

SEQ ID NO: 17925 - DNA, 254 bp, Glycine max
  Clone ID: PAT_MRT3847_116190C.1
gccaactcttactaccactcatccgcgcatttaaaactcacccaaccaattcctgcaactttataactctgaaggcaccttctacataaactacaaaccccacactgatctaccttctgttctggaaaactacattaatggcgaatttaaactggagaaattcatcactcacacagttccattctcaaatattaacaccgctttttatttcatgctcaaaagtgaatccatcatatacatcattcttatggaat

SEQ ID NO: 17926 - DNA, 376 bp, Glycine max
  Clone ID: PAT_MRT3847_116191C.1
ctggtttctttcgtcatgctctcagtattctcttgctctttaacttgatcttggtcttcttcggactagtatttattgcttacgatttggaatagtgacaagtaaagacaaatcacaactcagggtcatccaattccaagaatagagttagagaagattgattcaccaaaaaaaatggttagaggagaatgatgacaaagagagttgacggagatgaacaaatcaagtggcccagtgcctagagaaaaaataaatttaccaacttggctttgaccaatttgcacgctcatttgactcttacgaattttcattttaaaaacttgatgttgtgactttgtaatgtcattcatattaggaaaatcatcctcttgcatac

SEQ ID NO: 17927 - DNA, 1137 bp, Glycine max
  unsure (1)..(1137): unsure at all n locations
  Clone ID: PAT_MRT3847_116192C.1
agtaaaattaaaaatatcattattaataaaactaataaatatttcaatatcaatattatggaagaagtactcaaagaaaatataatcattcttccaatcttctataatgatatctattttgtcagttcttctttaatgatttaataatatataatttcgctataaaaagtattatataagtaaataatagttaataaaaaaattgtacacactgaaaaagaaaagcaaaattaaatccatgatattatttatacatacattattattctcaaataaacgtttaaaatataatattaaatctttttttaagtaaataataataataatatatgattttagttcttataaaaaaatcagttttcatctctacaaagttgttttactatttattcgctcttttatcttatttgttggtttaataaattttgtcttttatcttttcaaaagttaatttaattttttatcttatttttttgttggatttgctcttttatctttttaaaaattttatttgattcattattttattttttttgttcagtttgttcttttatatttattttaatttgattcttccatctatttaagatcaagtttgttaattatttaaaataaacatctttcagttcaatttttttttgtttccctctactttgtttttaacaaaaaataatgatcatttttaaattattaacaacattcttaaatggatagaagaataaaactaaatcaaaaaataaaataaatgactaaaattaactttttaagggataaaagatcaaatagaattaaaatataagataaatgattaaattgaactttttaaaatataaataatcaaattaaaccaaaatataagataaaggctaaataggttatttgatttatctagaattattttaatttcttataaaattataattttttcactttttatcaccataatattcatgtgaagtattaattaatttttctaataatatctgtcaaaaaaccttgattaataatctttaataaaattntctcttttaatgatattttttattcataaaactcaaataaaaactagaagatcaaactcatcattaattaaaaaaaattcatttaagtccttcttattaactaagagacattaaa

SEQ ID NO: 17928 - DNA, 840 bp, Glycine max
  Clone ID: PAT_MRT3847_116193C.1
tacggctgcgtgcgggccacagcagctagggtctcctgttatttatgcagaagaaaagttggggtcaatccgcgatctcgtaatttttcatcatataatagcaaagatgagctaaccattgaggaagaagctgagagaaaagtcggatggctattgaagacgatattttttgtgactgcaggggtagcaggataccatttctttccttatatgggagataatttgatgcaacagtctgtttcacttttgcgtgtcaaggatcccttgttcaaaaggatgggagcttcttttttggctcgttttgcggtagatgggaaaggaggggagagattaggtgggctcggcgggccgtaggtgctcttaaatatgttaagcactgctaaagatgtccgtacacggaaagatgcattgcacgctctaaattcattgacacatatagatgaagctcttgcatccttgcatcatgccggggccatttcagtaattaggtctgcaccaaattcacttgaggatgcagaagttgagagattcaagttgagcttgatgaaaaggtttcaagatctcagatacgatgatgtgtcatcatgagttgaggtgcatgcctatttgtttgtttttttttggggtggttggagcatgaaatatcatgatatgagagattaagctggcaaccaaagtatttttggggaagagtattggaaattgcagtgtatcctttgactaggtctaatgaaagactatagttctattgtcattttgtttttctcacttgtcaaatgcgatttgtcgctcattgttatgtcaatcataaatacaatggaaaagacttatgtgcgtgtc

SEQ ID NO: 17929 - DNA, 367 bp, Glycine max
  Clone ID: PAT_MRT3847_116194C.1
gggtattagagtacgtttatttgggggacacacctgatttcaacatattcatacttaatctcaaggggcattttcccaaaagaaataaaaatcttggttccacacacggggtgggagcacttcaagattacaccaccagtttaactcccatcatggggaccggtgtccatgtgcaaggcttaaaaagtgggggtctggtaaaaaccgagggttctttctcaataggggtatttggcaaaaaaactttttctgtccttttctacgggggatcattctcataaccccttcctttgaaaaacccactgcaaaaattctaaacatcgtcaacttggggggcaaaattttaagacattggattttttgggaa

SEQ ID NO: 17930 - DNA, 254 bp, Glycine max
  Clone ID: PAT_MRT3847_116195C.1
aaatccctgatgagaaggcagataagcttgtttgctgtgctgatgttgcaaaatacatagcagaggtcgatcagaaaaatgtgcaaaagccctgacttcttagttttgtttttcggatgtacattccagtttttgtggctgtgctacatggatctctcttaagtaagcttagtagcattatgcatattaggatagtttgcttggttggggtagttattaatgcatatgaaccccatgatgtccatgttgaattt

SEQ ID NO: 17931 - DNA, 300 bp, Glycine max
  Clone ID: PAT_MRT3847_116196C.1
atacttttcttcttcaccacttaacttttccgcaagattttattaaaaaagtgaattccatcttacaactcctttttccactttacatttcaataccattttaaactattcttcaattctcaaatcacattcttaatcaaaatctaaaatctactctaatatttcataccttcactattttcacaaaacatatttttattatatttcttcattcaacatttttcttattaaatttaacattatttcaactccatctattaaatctacaatcctaccttacattactctcacaattataat

SEQ ID NO: 17932 - DNA, 274 bp, Glycine max
  unsure (1)..(274): unsure at all n locations
  Clone ID: PAT_MRT3847_116197C.1
cgctcttcattntaagttacgattttcaggatggttttgtttacagntctggttgtnttanggnnncatgangtatcattgntntgtattatttaattgtagtagacgcaaaatctataatatttagaagagcagtctcaagatgttgattgtgtgcttgtnaatcccttggcatttgtatggaaatgttaatccaaaatgtaacatagttttgtattaagccaaggattagtggggcattggctcaaactctaattgtccttagggtggaaga

SEQ ID NO: 17933 - DNA, 454 bp, Glycine max
  Clone ID: PAT_MRT3847_116198C.1
actgcccaggcgtacggggccacagccggcagtcgtgagaatacaggcatctcatgggcctgtgctatgaatagttattatcgggggcgagccagttctgatatatacaccatctgctattaagactgagaattatggagtcctgcttgcacaaaagcaatgactatgtgattgaatgcaaaatcgtgttctgatgcatggagtggggcatgatggaagcgtaccggatagcattgggaaatcaatagcggcactggatggactgacaccccagtgcaagatgattaggttacaagtgagagctatataaactctcaggaatgggttcccaggacctatcgggatcaaaattcacaaaatgcttttgggtgaaacaggtggttggggaaactgaattgcccccagggcactttccgaagtgcttaaagaaggcctcaggctatagggggaggag

SEQ ID NO: 17934 - DNA, 329 bp, Glycine max
  Clone ID: PAT_MRT3847_116199C.1
aagtacacaacactgggggacgtacttcctctacatcccacacggaaacccaagctcagtaagagtaatcgtgtttcgatcttcacttcctcaatctctctctcttccactacaatcatcagtactgctcacattggcatctgtcgcatcaccaacggaacagaacccatgacggccgtcatcattatcaatatcctcagtcacactcgtaacgaagtgaccgtcccttcctccacgttgaacctcccagtcaagtatctgcagcgatttcacatcaacaccaacggcatcatctacgacatcacgttcatcgccattaaactcctcac

SEQ ID NO: 17935 - DNA, 194 bp, Glycine max
  Clone ID: PAT_MRT3847_11619C.1
gtcgcgctgtcaatagcgccttgtggcgcctttttgcagccgtaccctagtggcgcctttttgcagccgtaccctagtggcgcccttttggagccgtaccctagtggcgcctttttgcagccgtaccctactggcaccctctcgtttttttttcctagcggcacctttttgcagccgtacggacgccgggcgga

SEQ ID NO: 17936 - DNA, 323 bp, Glycine max
  Clone ID: PAT_MRT3847_1161C.1
acactccatgcccaccattaaagctctatgggcacgctacgtgcccgagggacacgctcaaacttggtgccatgtttaatattataatatggttggttcacacgggaaagagaaaacttgtttcaaaccaccgctgacaaaagcttgattgactagaaaaaaaccaagctggggagaaaaaattcacctctctaaaaatgaaggttgttaacctcaacattgacgtcccacttgttttttataaaaatgtgacttgtggcaaaaaatacaactactggttacacgtgctccctctaaaccagtggaaaggattgacgaatata

SEQ ID NO: 17937 - DNA, 390 bp, Glycine max
  Clone ID: PAT_MRT3847_116200C.1
cactttcgtggccacagcaccagtaacagtggcaggctcactacaagctgcaggtaccttgatgctacccaccaaggagcacatggacactctgaccctgaaatgtacacatttgcataatgtaacagctgtttgacttggaacccgctgcagctgaactcagtcgctcccttaagctcgatctcaaagatcacgctaaaaaatgcgtcgacaccatcaatgttgcatgattcgaccttgccacctaatatatccatggttatgaagctagtgcagactgcgttccaaagaagctaaccgttgactaaatccacagcaagacatacttgcaagtgaagggaactggaactgctaatcagagcccaaccattgaatgtagagtggactcat

SEQ ID NO: 17938 - DNA, 724 bp, Glycine max
  unsure (1)..(724): unsure at all n locations
  Clone ID: PAT_MRT3847_116201C.1
aattgtaaaaacaagaatgatttggtatgataagaacatcacctattatctccaaaacaaacttaatctgcaaaactcggaaaccaactaatgtcacgactctaatacaaaaagcgggagtattcaacccgagttcgaaaatggtgagcatgtatcagctgtttgagttcgaacatcacctagcttccttacttattcaaagaataaatggaatcgaaacaaatttttcctatgtgaaatataggatcaaggagctctgccacattgccaatgcaaaagactctggaatcagatgctacttgagtcccttccaaaaataaaacgtcttgtccagtctgaaactactaacgctctagtacgccagcttacttgcttgcttgcatagacagaataccacagccattgactgctatggccaattgaaacccaatctccaggaagctgggcagctgtctgctctcctcccaaaggagcaaattgacctaaatgcttgtacctaaagggtttgaaccgatggtgaccttctcccctgaacctgagaggaccctcaggatttttttcacactcttccatccgattaaaacacttngccaggtaagtgccttgctgagatgcaacctgtgctgtagcangaagaaatttcatttgagaatccactttggaaagtgcagttttgagttcttcatattcagttcaattgattctttttatcatctcccttggc

SEQ ID NO: 17939 - DNA, 319 bp, Glycine max
  Clone ID: PAT_MRT3847_116202C.1
gccccccgcacaccactactcctatccatgacattctttaaaataagggcattggattcatataattaatatcacggttcagacattcaacccaaagttacatttcgtatggcaaaaatgaaactccatttaaagcttcaggcctacccccccaccttcctagacaaggttcctgcccaactccacctaccaaaaatactcctgattctgcaaaagccaaagattccacaaacccagtccttggcacactaccccgagatctaaagtctttggtatcactctcaaattcccatcatcgaacagaaccattgccagcccc

SEQ ID NO: 17940 - DNA, 145 bp, Glycine max
  Clone ID: PAT_MRT3847_116203C.1
tcaaatatataacatacactcacttacaacatttgattttctagaaataatcactatactcctacattgtaattatgacaaactctaccctacatcacaaatttcttcgatctttctttaaatctcatcagaactattttaaata

SEQ ID NO: 17941 - DNA, 388 bp, Glycine max
  Clone ID: PAT_MRT3847_116204C.1
tttattttttttttttcttaattaaactcatgctcattttttggctaatattgattattttaatcccaatgttactcttctcctaattttcttcagacaaaatcaaaaatcttttttccttaccctttaaaaaaatgtggcggtggaaaatattgtaaacacataaaaaatgaaacctttttctgggataaataaaccgccgccaaccttagggggtttatttcacacccagccctttctaaaaaactttggaaaaagggttttaagaacgggggggcgcacccccctcaaaaaaacacggtgataaaaaaaaacggtacagaaccttgagcataattgtttcccccccaaaaatctgtggggagcccaaaccttttttttttaaggc

SEQ ID NO: 17942 - DNA, 1394 bp, Glycine max
  unsure (1)..(1394): unsure at all n locations
  Clone ID: PAT_MRT3847_116205C.1
catgggattgtggatctctctcactttggaatattatatgaaggcatatattcacattgttgtactatatccttattggaatcgctcatcaggaacggactacgtctggtctttttcatgggataaaggtgcatgcccatgctcctaaccgggttgaggtttgttttgaggtctcttgagaggcggaagacaccgttctgcttcaacgggaatttaggacctgcgtaccctcatggaagacctgaagatacgtatagcatgggtatcagacagaagctggcagaagagtttgggtcaagccctaacaaggatggaaaacttgggaaacagcatgccaaagacgtcattgtgacaccggagcgttctgaagactatcacatggatctagcaagctctgttttctgtggagtgtttcctggggatggatggagtggtcgcatggaggacagtatattgcaaggatgcattcctgtggtcattcaggatgggattttcctgccatatgagaatgtgctcaactatgacagctttgctgttcgaatacctgaagcggaaattccgaacttgataaagacccttcggggattcaatgacacagaaattgaattcaagctggcaaatgttcagaaaatatggcaaagattcttgtatcgtgattctgttttgcttgaagctgaaaggcagaaaactgctattggacatgttgatgattgggcagttgaattcttaaagctgacagaggatgatgcctttgccactttaatacagattttgcattacaagttacataatgacccttggaggaaacaagttcgccacaacaaacagtttggattacctcaccagtgtctggtaagcaccagctgaggagcatggttaatgtgaagactacaaaagacccagttactctcagaggagtagggggaaaggataacctttctgctacattttgggagtcaagatgaaaaacattatgtatgagtaatttgtaaaaggacaagttccttgtagttaccatctccaatgcagtaaatcattcaaccaaggtggacgtacaacattctttttcccttctcacataaatatgtgcatggaaaatgcatttacagtttttattttttcagaggtttattctgtcaggtttattcacaagaggtttttatggagaaaaacaaagagagagaaaaaaaggttacatatttattttacttgtttcatttttgttccctggatattgttaggcaatacagatctttgaattgggttaacaaagtggtgctatgccgcactcagcaattatttgataaataagcgatattgatactgcatacatatttataaaattttttgttttaccacacttttttttntttaaaaaaaaattgatgtataaa

SEQ ID NO: 17943 - DNA, 331 bp, Glycine max
  Clone ID: PAT_MRT3847_116206C.1
ggccgggcggaaacctataataacatttatataatattttttgattcctcttacttaaaccacttaatactacttcttccaaccagaaaaaatcccccatttattgcctttaaaaaaccacaatgaaaaaggtccgaaaataaattatctaaatctctttctcatatcccacaaacttcatgatgaccctctaaccatcccggtgtctccaacgcactaaatccatttaatacatgttttccccctcactaaatatcatccatcatgcttacaacacaccctctccttaataaaatcttcctacactttttattcctgtgaatacttaaaa

SEQ ID NO: 17944 - DNA, 347 bp, Glycine max
  Clone ID: PAT_MRT3847_116207C.1
ctggagctgaattataccattcaacacttccttttctccttgcctctgtcctgacccgtactttggttctcggtgcattctcagaaagttgtatacatcaaaaacaagacataaacccatatgagttcatcttcggcctttgttcaatgcgggattcataaatcctgtgataattctaccattatatgccttctagagtttagtgcaattgatccttccacggactctacctgcaagcatgactttcatctgcactgcattcattatttgtgtcagataagctaccactgtactatatgttttcatcctattagctcgaaagatcctactatatacgaattgtttga

SEQ ID NO: 17945 - DNA, 398 bp, Glycine max
  Clone ID: PAT_MRT3847_116208C.1
aaagctggagcgtctgtatgtacctgttcagcaaacaatttttggtttgatgagctaattttttttcggccgcccttcttttttattcctaagtaagcaaattacaaaggttcagtatgtatattgaaaacatattcatggagaaatttcagaatagttttagaggggaaaagctcactaagcaatttttttatccagccactagaatctaaagatactcaatatagataaacatacaatatatgtgtttatattgcctggatgtatccagttgaaatttactaataaaaatttggtagactattaatgtacataaactgagacactgaatgacaaggtttttgatttccgaacagaatcataaacttaaacgccccttgttaaacctttatattgct

SEQ ID NO: 17946 - DNA, 271 bp, Glycine max
  Clone ID: PAT_MRT3847_116209C.1
ggggctggagcaagatatttcaaaccagatcgtcattatgtatagggaaaaaaaattgggtaactgtccaagctatttggggcctcatgttcaatgcaaacaactatttgttttacagttttaggaacaactacagttttaggtggctccagcaaattcaacaatttgatgtaaccatttactggggaagaatttgttaagtctattacctctcttttgaacgcaaagaattcttttttaaacagaaaggttctacctattttgttatggg

SEQ ID NO: 17947 - DNA, 382 bp, Glycine max
  unsure (1)..(382): unsure at all n locations
  Clone ID: PAT_MRT3847_11620C.1
gagctccctcgacggcggccgcccttaaataaaaagggggggaatttttaagagngcccccgggacccccccccnaagaaagaaagnaaaaaaannccccccacaaagggacagggaaaacaccccaaaaaccgggaaaccgagcgagagcacccaaaaacagacaaaccgccaaaaaaaaccaaagacaaggaggggccattttattcaaaagcccaatagaaaagcaaaccccccccacattttaaagggagaaaccggggggaaatcctttgaaaccaaacccttcctcacttgaacgaaggaacaaagggtatggaaactgaaccggcccaaggcgggtttaaaaaccgggaacaatggccccctgggggaaatttcc

SEQ ID NO: 17948 - DNA, 439 bp, Glycine max
  unsure (1)..(439): unsure at all n locations
  Clone ID: PAT_MRT3847_116210C.1
acccggctcaggcccttataaacaacannttaaaaacccagangcaggccnaccaaaagggaagntgaccaaaagcatacaggactgaccacgccctcaaaaaatcaaagtgcagcgagaccacaaagagcgagcacgaggaaaagctacataatacacacgacaaaaaggaccaccagaagagcgaaagaccgaagaaagaatagaacacaaatgtctaaagacctggaagaacaaaacgatttgaaaaagctccccagacaccattggaaataagcagaagaccctgaaacaagggccgccagaaaagaccgaaaaaagaagcagccaaaaaagaccacgaaaagcaaggcgagaacacgacacacacaaagaaagaacccgcccaacaacaagcccacacaaaaaggaaaaacaaccgaacgggggccccccacga

SEQ ID NO: 17949 - DNA, 628 bp, Glycine max
  Clone ID: PAT_MRT3847_116211C.1
ccacgcgtccgctcaaatccagcgcctctcgcttcgtgcttcggccactccgagccagaaggctcggttcgtcgctcgccgcaaggagtccctttcggttcggcaactgcaacgccccctaagtaatgttagagcgatattaattatttatttaattaattaatgctttcctttttcttttaattaattgattcagttgcttgtacaatgtttacgttttagttcctacatccaaaaactaattgttagtccttgcagttgcacatacacttttaactcgtttagtcctacacatccccctttttgggtctatttggatgaaaatctccataagatttctaggagaagaaaacaaaaaaggaaaaatgaaataagcttctccgcatgctaaaattagtttgtgctaagttaaaaaacaacttttagagaagctaatatgagagaactttttctataaatttgcttatccataagttaattttagcttatagagaagttcatttatttttattttaaatttattttcttctcctaaaagtacttgtagagagggttatccaaacaaacccttaatctgtcttgggctctgcatttttggatggcatggactaaaacagattaaaggggg

SEQ ID NO: 17950 - DNA, 1182 bp, Glycine max
  Clone ID: PAT_MRT3847_116212C.1
ctcgagccgttttgacacagttcaaccctggtctttctgcctgtgattctcccttcttctccttcgatctccgcactttcccaatagccacagcaacacactcagttactcaccagtcaccaccgacatcatgtccgattcgaaggtcgaaaccatcgccagattagcccaatggaaaatcgacaacttcggaccctgctcctacaagaaatcagaccctttcaagctcggaatttggaactggttcatgtccatagagaggaacaggtacctctacatacacatctttccggagccttctcggcttactaaggaacagccacccgtggcacgcttcatcctgcgagtctccaacaactctggccctacccgcaaattttacatttcccctgttcatgaaagggtgcttaggacatgtgaagactttgtctggcctgttgatactgcattccttggtcgcttcgttattgatattgaatttcttgacctgaggacctgccccgtgaatggtgaaaccagatctgtatggccatctgatggaaaactgcaaactgttgcagctcaaagcactcttcgatgcttgtcccgtatgcttgatgaggctatacatgctgacctcaccattatcactgcagatggtaccctgagggctcataaggcagttgtatctgcaagttctactgtgttccatagcttgtatcttcacaatggtgatgagaaagagacatctacaatccacatagaagatatgtctcaagaatcctgcatggcccttctgagttacttgtacggcactataaagcaacaagatttctggaagcacaggcttgcattgcttggagcagccaataaatatgagattggtgatctcaaagatgccagtgaggaaagcctactggaagatcttaactcgggaaatgttctggataggttaaatgatgcttggctttaccagttgcaagcgttaaagaaaggatgtttctcatacttattttattatggtaagatttatgatgttagagacgaaatggatacctttttccgacatgcagatagggagctaatgctggagatgtttcaggaagtgcttacaatttcgaaataggttgccatgaaactcttagcacccttgtatcttgcaaatgatggatccttttgtgcaatcatgtttttttactttcc

SEQ ID NO: 17951 - DNA, 464 bp, Glycine max
  Clone ID: PAT_MRT3847_116213C.1
tttggggttttttttttttttttttttttgaacggacaaatagaaacatttttactccgttagtccttattccggttcatataactaacacctttttacagataaaaactaacacttttttacattacttctttattttcatggccccccctttttcactgagaaggcaaacaaaattgagctcgatacctagtaaaactttaccaatttgcgcgaaagggggcgatggatatttttaaaaaatacgtatcgattaaaatcaactcccgccaggtaatgacaaaatctaaactcgaactaaatagcatttttcataaataaagaccaaaaatgttaagccaactttttcagaattccaatctcctttgaacgggtaaagaaggaacgctttaagtacacttaaaacaaaaatagaggtcctatctcagctatgggcaaaacttactctttaaatttgaaagggg

SEQ ID NO: 17952 - DNA, 417 bp, Glycine max
  Clone ID: PAT_MRT3847_116214C.1
ggggaaaaaaaaaaaaaaacaccccgggaaaatttttcgggtaatcaaacaaattcccccaccatttaatttaaaaccgggccccaaaaaacaaaaaaaggggaaggaaatcttttcctggggaaaccaacctggaaggtagggggggctgcccctcactaattaaaaacaagctcaatccccccccaaatttataaccttaaaaaaaaaaataccccggggaattaatttaacccaggcccttcactttttttttaaaattttttaaaacctgtgggttgaatcccaaaagcccttaccttttcttttgtaaagggagattctttaaaaaaaaaaaaaaaaggggggaaaaaaatataaaaaggggggagaacatttttaggggagaagaaaaaaaaaaaaaaaaaatgggggggg

SEQ ID NO: 17953 - DNA, 951 bp, Glycine max
  Clone ID: PAT_MRT3847_116215C.1
ccacgcgtccgatttgaggggcttccttcaatcaagcatcccttccatcaaaatttctctattcacttcactccacactctcaatttttggcttcccgctttcttctctctctctttacaacagggagggagtgtgtgtgtacgcccaaccctttcaaacacaacaccctaccctctgcttcgttcccatgtcgtagtcgccgtgcaagtgaaaatgttgcactgcctttgggtggtggacttctgaataggcaggagttgtttccctgtctatgtattgtcacgagattgagagatctgctgtgattaggttttgatttcaactcactgatggagtgcaacaaggatgaggctataagggctaggcagattgctgaaaataagatgcaagctggtgactttgaaggggggctgaaatttgctacgaaagcccaaaggctgtttcctgagattcagaacattcttcagatccttgctgtttgtgaggttcactgtgctgcacagaagaaacactctgggtctgacatggactggtatggaattcttaagattgaaaagtccgccgatgaagcaaccataaagaaacagtataggaagcttgcactgctacttcatcctgacaaaaataaatctgatggtgcagaggctgctttcaagttgattggtgaagctaacagagtgttgagtgaccaaacaaagcgtgctttgtatgacttaaagtttggagttcctgtgggaaatacagcagctaaggttccacctcgtcacccaaatggaaatgcttccgggatgggatgtgatggcactgcaagaaattatcagaacagttttttttcacaataccaagcttggaattcatatcatcggactgataatcagacattctggacatgttgccctcattgtaatactagatatcaatatgtcataaccattttaaatcataccata

SEQ ID NO: 17954 - DNA, 771 bp, Glycine max
  Clone ID: PAT_MRT3847_116216C.1
gagaaagaataatcaagcaagctctcgtcctttccgttccatcaaaacttgccactttcttctctccctccctctacaacagggagggagtgtgtacggtcaactcttccataccaacaccctctccttcgttcccatgtcgtagtcgcggtgcaactcttgaatggataaagacaaactcctcgttgagtgcttatggaggaagaaaataagaagcaaaaatgaattacacttttcccatacactcaaactagcttatgcgtgaaaatgttgcaccgcgtctgggtggtggatttgtgaataggcaggagttgtttccctgtctatgtattgtcactagattgagagaactgctgtgattgggttttgatttcaactcactgatggagtgcaacaaggatgaggctttgagggctaggcagattgctgaaaataagatgcaagctggtgattttgaaggggggctgaaatttgctacaaaagcccaaaggctgtttcctgagattcagaacattcttcagatccttgctgtttgtgaggttcactgtgctgcacagaagacatactctgggtcagacatggactggtatggaattcttaagactgaaaagtccgccgatgaagcaaccataaagaaacagtataggaagcttgcactgctacttcatcctgacaaaataaatctgctggtgcagaggctgctttcaagttgattggtgaagctaacagagtgttgagtgaccaaacgaagcgtgctttgtatgacttaaa

SEQ ID NO: 17955 - DNA, 495 bp, Glycine max
  Clone ID: PAT_MRT3847_116217C.1
cgatctttttttttgcaaattttttaggcagacaaaaatgcagctccagcaccattaggggtaactcccggattacatatctttcttaagaaccaatactgctaccaaacagccactagtggtgaagaaaacatataagagtgtcctgccatgggtgtgccaacctgatggccacgtatctaaccctaaaataaaagggtctatcacttaaatccttcactaatccctggcggtattgctcagctcatgccaagaccattcattcttggcttgatagggaggacactctataggcgcgcatcctctgatgcctaaatgatgaaaagacaatgttcaccactgtgccaaaatcatagctgccatacaaatcaccgtgcttacaagatgctggccaccaaactgcaccacctggactaactcaccctcacaataaccatcagactctcatgctcatagccattcttgcatccagagtgatccaacttggacaaccat

SEQ ID NO: 17956 - DNA, 2116 bp, Glycine max
  Clone ID: PAT_MRT3847_116218C.1
aaaatctcttccctcccctcacctctggttgcagtggcagcgagaagagaacagggaaaacaaagaagcagtgttgtcttcagcgtcgactacaaccgcttcattggcgtcctcctccgccactcccgcctccacctcgcccaccacttctaccgccgccacgtcatcccccgcggcttctccctcctccccttcacctactcccgcttcatctccgccctctgctccgcccccaacaacattaacctccccctcatccacaggctcctgctcgacatggacgccctcggcttcgtccccgacatttgggccttcaacacttacctcaacctcttatgccgccaaaatcgcttagaaaccgccctcgaactcttccactccatgccctccaagggaagagaccccgacgtcgtttcctacacaattattatcgacgcgctgtgcagagctaaacgctttgacgaggctgctagggtttggcgtcgtttgattgacagagggttgaaccctgattataaagcctgtgttgctcttgttgtcgggttgtgcggtggggggcgcgttgatttggcttatgagcttgttgttggtgtgatcaagggtggggtgaaggttaatagcttagtttacaatgctttgattgatgggttttgtaggatggggagggttgataaggccatgaagatcaaggcgtttatgagccggaacgggtgtgtgctggatttggttacttataacacactgttgaattactgttgtgatgaggggatggtggatgaggccgtgaggttggtggagaccatggagaggagtggggtggagccggatttgtatagctataatgagctgttgaagggtttttgcaaggcaaatatggtggatagggcttatttgatgatggtggagaggatgcagaccaaagggatgtgtgatgttgtttcgtataatactgtgatcacggcgttctgtaaggcacgccagactaggaggggctatgagttgtttgaggaaatgtgcgggaaggggattaggccggacatggtgacatttaatgtacttatagatgcatttctgagggaaggaagtacccatgtggttaagaagctgcttgatgaaatgacaaggatgtgtgttcttcccgattgtatattctatacggcagtagttgatcatctgtgcaagaatgggaaggttgatgtggctcatagtgttttttgtgacatggttgagaatggggtaaatccagatgtcatctcttacaatgcacttgtaaatgggttttgtaaggcttctagagttatggatgccatgtgcctatttgatgaactgcagagcaaaggtttgtaccctgatggggtaacttacaagttgatagttggagggcttataaggggaaaaaagatttcactggcctgtagggtctgggatcagatgatggagagaggttttacacttgacagacatctctctgagactctagtcattgccattcaatcaagtgatggcacaacatgacactagtttgtgttttgatcctctcaaattcatcacacctttctttcaaatgggaaacctgacttaaaaagttttctctggatacaatacaccaaggcttagcaaacctgacctgacctgacctgaaatgttatctgcagcatggaacttcaagcttttccaaagaaatgtcaccatgatcattacatttatccgaagactagctgaaggacaactacaaccagcacaactagcaatttgcagattggtttgatggaaaattggagaagaaataaaaagaacaaaggagggcaaagagaatgtacagatgaaggatatacgcctggattcttgatgatttccaaatagaaatgaatcatctagggtccaccatccaagcaacttctggagtatgacagaaaaaatggaaatagttaagaaaatgccatgttggtggctaaatgtcagcaaatgtggcgtgtattaggaaactagtttcaaactgctacattttagaattagtttggaaactgggttgacaaatcttttcttcattcattcactcactctcttccattgtgtatttctcaaagattttcatttcaataacaaatctttctct

SEQ ID NO: 17957 - DNA, 401 bp, Glycine max
  Clone ID: PAT_MRT3847_116219C.1
ttttttttttttttttttttttttttttttttttttttttttttttttttttttttttttttttttttttttttgggggaaagaaaaacaatttccccagggcccttaaaaaaaaaaaaaaattttcccagccccccgggggcctttgggggccgggttcttcattttctaaaaccgggggggcggggggtagctttttttaacaggggcccccaccttttggtaaggggcgcccccttttggctttttatattgggccctttgccggggtaatccccggagggcaaaaacggggggcgaacccctttcccctttgggcccatccggggtaatgggttctttcccaaagggggggggggaacaggtaacttgggcttttcccctataaccccaccttgggt

SEQ ID NO: 17958 - DNA, 238 bp, Glycine max
  Clone ID: PAT_MRT3847_11621C.1
agaaaagaaaaaatttgtcttataactttgcaacttatggttcacttcttcttcttcgacttctgcattatcgtggtgctttgatattattctattgagtcaaaaaatgggagttccatagagggaccctctcgcactattgagcttgcctcctgggcttagggtctaccccacagatgaggagcttctggtgcagtaccgtttctgtatagtatcttgccatcattgctctcttcca

SEQ ID NO: 17959 - DNA, 146 bp, Glycine max
  Clone ID: PAT_MRT3847_116220C.1
gcaccgattattgtttatatttgcagcaagccaacggaagagaccacttagttgaatttatcgcccgtactactccaaagttatacaatgggagaatataggccataattatgttttaattacagacactatcgaattatgactag

SEQ ID NO: 17960 - DNA, 572 bp, Glycine max
  Clone ID: PAT_MRT3847_116221C.1
tcatatattactttggacagtaaaaaaaattgttatgcctaattaataaaaaaacaatttacaaggatgagaaataaaaaagcactaaactacttatttgtttgccatcttttgcctatgatttctgcgtatgcttcaaaatgtgcttcttttttaactattatttttttgtactattggtaacatatacggtaattttttttatggccttttgaaggaaatataaattttatttgattttagtaaattttaattctaagtgcttctagaaaattattataaaaaaactttaaataatagtatgaactacattttagttcatactaatatggaggaatgagagttatagtatagaagatcaatattatggaggaatgaaatctctgtcagagaaggtagatgcactttcccagaatcttgtgagggaaacgtctgtactaaataataaagaagacactttgaggagtgaagaagccaacaaagcaaatcttgttaaaaatattgaagagttgaagcattctgtaaaagagaagtcctctgctgttaaaaaggctgaagagggggcagcagat

SEQ ID NO: 17961 - DNA, 522 bp, Glycine max
  Clone ID: PAT_MRT3847_116222C.1
aaaaaaaaaaaaaccctttttttttttccttttcaaaatggagggaatttttactcatctacccaaactaaattttgcctataaaaaaaagggaacgccccgggaatgaaactggaagatatcccacagagttaaattttgtttttaacagggggttggggggccccccatttttttatgcggtttggggcactcttaaaggggccaacccagttttggggggcaccaaggggtttattccaaccctttttgaaaatttcaaattcccatggcgatggcctttttatttcagttcgcacataaattcctaccccaccttgtttctgcataggtggcctttggagtttcaaaacctttggcattctgggacccctcccccccaaagtttggattcccttgggaaaaacattttcgctggcaacaacccccacctttttagttcgatctccctgggcacaatatcctagcttaatatcaactccccatccatggacaagggtattctgtttaaaaggccagggg

SEQ ID NO: 17962 - DNA, 341 bp, Glycine max
  Clone ID: PAT_MRT3847_116223C.1
tttctttgcgtgcgctctttggtcactgctggaattaaatttaagcggaatttgagtaatgttcatatttgcggcttatattacgacggctgatacaaattctggactaaacacgagagaaattttgctttgacagaagaggaaaagatggaggcgattagaaatagaggcattcctgctgatgttcttgcaaagcgagctgatgaatttgaaaaacactactgctcatgaaagccttaaggatcaaataactgctgctgacaggttaggttctactaaggtgtattagtgtggacagatcatgaatcttcaacacagcgtcgttggtgatctcaaacttg

SEQ ID NO: 17963 - DNA, 211 bp, Glycine max
  Clone ID: PAT_MRT3847_116224C.1
gctggccatgggggcacatggctctcgtatccgtacaagctctactcgcactgctttgctcagagaacttgagcaaatatggaacgatcttgtggagaccgtgctggacaaagatctaatggtgatggagctggagagggaatgcttagacgtatacaggagaacggtcgatgaggttgcttacaccacagtacgctctcatcaaacagtg

SEQ ID NO: 17964 - DNA, 263 bp, Glycine max
  unsure (1)..(263): unsure at all n locations
  Clone ID: PAT_MRT3847_116225C.1
ctagantcttcagtttctcctcgntgttcttcgctttcctgttntcaatttcnattctttcgttaattnaataagatgtttggnagggcaccgaagaagagcgataatacgaggtactacgaaatcctcggcgtctccaagaacgcttcgcaggatgatctgaaganggcttacaagaaagccgccattaagaatcancccgacaagggcggtgatcccgagangtttaaagagctggcgcaacttatgaggntcagngttnc

SEQ ID NO: 17965 - DNA, 644 bp, Glycine max
  Clone ID: PAT_MRT3847_116226C.1
ccacgcgtccggccaaatcccctgtttccactttctgttctgtttttttggatatttctcaactcaaccaaaccaaagaagcattttactattttgtttcctagtttcctcgcatacccttcttctctggtcagttttccttcttttccacctttttcagtttccctcaaacaaaacgaacacgccaacacgggtttctgttacaagagtttaaacaaaagaaaaaaagatttttttttaagtattccctggttttctttccccatgtttgtctttcgtttcttttagttttagcgtgtctttgtttctggccttcgttgtgtcggtttaaggttaaagcgtcagcgtgttgtctttccttgaatgtcgaacaaagcagggttggcattagtttttttcaagacttagtttatcaaagaaagaaagaaagaaagaaagaaagaaagagatagattaaaagagagagagagagagagaaaaaaaaagagttgccattgtttgtttttgtttatgtgtaactatgtgttgaattggaaacattattgttaaaaacagagaaattgttgtccaggagataaaaataagacagctagattgagagttttgcggggaaaaaattgcaaaaaaaaataaataaaaaatca

SEQ ID NO: 17966 - DNA, 579 bp, Glycine max
  Clone ID: PAT_MRT3847_116227C.1
cgaagcccctgccaatgggggaggccattgcgtttggaaagacggttacggaccacatgctccgcgtcacgtggacggcggagagcgggtgggacactccccgcataacgccgtacggccccattgttctggatcccgttgccagcgggctgcattacggcttcgagtgcttcgaggggatgaaggcataccgcgacgcggcgggacgtctccgacttttccggcctgagctcaatgccgcacggctgaataggtctgcggcgcgcatctctctgccgacattcgacgaggccgagttcgtgaagttggtgcgcatgttcgtgaagattgaagggcggtgggtcggaaacggcccccctcactcgctctacatccgacccgttctcgtgtccactacggcctcactcggcgtctccgcgcccacgtccgcactcctttacgtcgtcgccagcccggcaacatcctacttctctgcctccgccacggcgctctccctgtacgcgatgccgccgtcccgcttcgtgcgcgcctgtcccggcggcccgggcgcgtcgaaaatcggcggcaactacgcgccga

SEQ ID NO: 17967 - DNA, 406 bp, Glycine max
  Clone ID: PAT_MRT3847_116228C.1
aattcggctcgaggtttaatgttaatgtcatgtattttgatcattttgcacgagggcttatcataagtaatactaaactccatgctgaattcaatagatagacatcatgtgacaagacagtatactgcaaacaattattaaagcagaaaaacaagagataattagtgcttcaaaataattaaatatcctaggctagctaaaagatatgaggtcattttacattgagacgggggaaaaaagtgtagaattagtgtgtacttttgaattcattcatcaaacaaacatagctacagcaagtccaatgtttatttaatcttgtcatataaagcatcgaatcaaggtgcgcacaaaccataaaagcatacactaaatgggagtccgcatacatataatattattgaccagc

SEQ ID NO: 17968 - DNA, 323 bp, Glycine max
  Clone ID: PAT_MRT3847_116229C.1
gcaataactcatttttcgggcttttggagacccttgttcacaaggggctttattattcattttacatttttcaatattacaaagacaaagtagacgcacaaaacataaatggcatggggtattgcccctaaggcacttggaaagtaacaacaaccaaaccaacactaagaaaacaaagtatagtcacggcctacatatccaagccagttgattctccagcacacaaatcaccggttggagaccaacactataaaacacacataggactttgaaccatcgacaacttcacctttttttcctacaaactggaaaaaaccccatac

SEQ ID NO: 17969 - DNA, 517 bp, Glycine max
  Clone ID: PAT_MRT3847_11622C.1
gtcgccctttttttttttttttttagaacacaacagtttctcaccattacaaacgtgcgccttgtttctgggattgaacaaggaaagctgtatgagcatttcataaatgccgtgagatcagcagggacacagctgagaataaggcgtctcccacaatacaagtctggaaacaaacctggttgcgtgaacacactcatttatcctactttcacaagacggaacactcgttaagagttaagaacgtacaatgctctttacaaccatgccctctgtcattgacagtaatctccattggtggaaaattgcaaatgaaaccctcaaaaaagaaagaaaggactttggcttcacacagacatctacctcatcatatcctcaaatgtggcgtaaccgccatctaaaatgtacttgctaagataaaatcatgggcgacatacattgttaaaagagagctgagaggacaaaaccatggtttacgataccactgagcataaaatttgatggaccatcatcccataca

SEQ ID NO: 17970 - DNA, 190 bp, Glycine max
  Clone ID: PAT_MRT3847_116230C.1
tttttttttttttctttttttaaataagaaaaatgttgatttgtatcctttttgccaaattaatagcgtgacacgaaacacacagagatttagaaaagacggcaaaacatttgagaacttcatcattcgcgcaccggttttaaaggggggaatatcagacatcaccgatctccatgaatagacaatggtc

SEQ ID NO: 17971 - DNA, 314 bp, Glycine max
  Clone ID: PAT_MRT3847_116231C.1
aaatgggaatttcgcaaaaaaaaaacgatatacccggataggtacttgagtgacagattacacaagggtactatttcattacccggtattttatcctaaacaaagggaagaaaaacctttgccgtttaatgccctcttatttattgatacgcgcactaactttggcccaaaaggaccatttgttggctgaacatgcacatagggcttttaaggctaactttcctcaagagactccttatgtgaaaccattaaaaaacaagggaagcggttgttgacccccttggactgcaagctccttaattaaaaagggtttt

SEQ ID NO: 17972 - DNA, 242 bp, Glycine max
  Clone ID: PAT_MRT3847_116232C.1
cttcttcctttttttttaaaaagtatttttttcttttcattaaagagaaaaaaagagggggatggggatggttaatcagtgttaattttatcacacggctaaagcccgaaaaacccctgaatatgaatctttttacacaaggtcttacaattttctcccagacttaaagaacctaaccttgttttataatataaacctggatagatttaacaatcaacttgaaaaaaactcctttctaactt

SEQ ID NO: 17973 - DNA, 267 bp, Glycine max
  unsure (1)..(267): unsure at all n locations
  Clone ID: PAT_MRT3847_116233C.1
gcttngctcnnctcctttgaagnnacaaattagaagagtgtgttgtgttgtgttgaagtagcaatcctagcanannngtttngcatcttaggaggcaataaggngcacaagatcnagggtactntngtgtngatgagcaagaatgtgtnnggttcaacgaaatagtgtccnntactcagggtggttgggntggtgttgcnancggcatcttcggtgctgnnacnggtantgttaggtngattttcgaggtgntagtgcnatcttnag

SEQ ID NO: 17974 - DNA, 360 bp, Glycine max
  Clone ID: PAT_MRT3847_116234C.1
gacaggctttgagagtgtccggattcttgtttatggatgaatgggcacgagtaatttctggggaagaacaaggcatctcttcttgggttgctgtaaattatgctcttggaaacttgggacgtgagcctcaagaaacaactggaatagttgaacttggtggggcttctttgcaggttacatcagctaaacttaatgcagatatagctcaatctttgcacactataagattgtctggggttatgtacaacctttacactcggagtttgccacaactgggtcaggatatggtatggaaatcattagaggagcaactgaaatatagagagttgaagctttcttcaaaatctagcaaaggaaata

SEQ ID NO: 17975 - DNA, 456 bp, Glycine max
  Clone ID: PAT_MRT3847_116235C.1
ctcgagccgatcaaaactgaagagaagtgtattttccactttttgtattctaatcctgaggattaccttgaattttaagaagatggtgctggtaggaggtaggacaacagaagggaagggaaaaatagtaagggattagaagaattaattagataaatagtgggaagaactgaagaaggcattcagagaatgagcagatttgaaagaaaggggaaaccattggaggaaaagtttttctccttgttctcttcaatttcattcaatcagaaaaaaaaaaagacgctttttttatttatgtccattttgggaacactgactgccacctgatctaacctgcatatagatacattcggtcagtcaggtcggtcagaaagaaaaagtcaattgttgattgtgggagcaaaattgagtatggtagcttgcatatagcttggtttgtctatcgacctaaatgta

SEQ ID NO: 17976 - DNA, 988 bp, Glycine max
  Clone ID: PAT_MRT3847_116236C.1
ttcctccccctcaataatagggaataatatatatgaagggattctaacacttacaactctcttttattcaacatataaaaaataaaataaaatgattttacatgacaaagacaaagtaaaagttgaaaaccaaaaaactttcagcagacatcataaaatttcccggtaacataagttacatatacctgaactcttattctttcaataccagtgtgttaaatgacatggaatgccttgttttagaaattgtattatgaccaactaccacatgtttttaagttaaattaaagtatggtacatctattaatcccaagagattcaaaaagtcttctgccagaaggccaaaagagtgagaaccaacccgttcgttgtgcctcaggtggagcttcatgtgagtcctctgaatttgttccatcagagtccccatgtacttcatcgtccttctggctttcacttgtgatctgatctccatctacatcagctttagcttctgaaatctctcccggcttcttgtcaaatagccctttaaattgtttcctagctttcttctcaacatcctgttccttctgcttcagtttttgaagagctgcagttgcatctgattcagttgacttgtcgactttcatcatcactttgaaatcagccctcgcttcttcaaaatctccagcagccatgtaggccattccacgacgataaagacccttgacatgtgcaggatttgcttccaaaaccttattgcaagtctcaatggactttttgcattctcccaattttagatggcatgcagcaacattcaggtgcagcaaattccgcgtgtctgcgagtgattgtccgtctgcgtcatcttgtcgattttcatgtctaccttcccggcgcacctttgctttctttgcctccgctcgttcatattctccgtctgtgaccagcctgctcccccgcgtgcggctgctttcaccttccctccttggtcttcttgtgtccaatccag

SEQ ID NO: 17977 - DNA, 217 bp, Glycine max
  Clone ID: PAT_MRT3847_116237C.1
aacgaaatccaaacacaaataactttttttaaaaagaatttcattggtacatgaactttataattttaaacggggtaagaactcattgggaccttgaatgaaataaaaaaaatgaccttatgcatttttttgcaaataaaaagctttagtcctatcactttccaatgctttttgtctgtcaaaagggttaaaccaacgcctatacttaaggggttta

SEQ ID NO: 17978 - DNA, 417 bp, Glycine max
  Clone ID: PAT_MRT3847_116238C.1
attgatcaagtgcaaatcagaaactatacagtgtgatatggcctggagaaacattatctaaacctcgtgggtgggtcttcccaaacaatggtagacaattgagaattggtgtgcctatccgagtcagttaccgtgaatttgtggcaccggtgcagggaacagagatgtttaaaggtttctgtgttgatgtattcacagcagctgtaaacttgttgccttatgctgttccttaccgttttgtcccatttggagatggccacaaaaatccaagctacacacagcttgtcaacttaatcacaactggttactttgatggtgccattggtgacattgctattgtcacaaatcggaccaggattgtagattttacacagccatatgctgcatctggacttgttgtggtggcccctttcaaga

SEQ ID NO: 17979 - DNA, 393 bp, Glycine max
  Clone ID: PAT_MRT3847_116239C.1
attgggacaaaccaaaacaccaaaaacagtatccatggctatataccagtgacaagaggcccttatccttgtggaaaccccaaattttacaagtgctaaagcaatcttatacaaattacaaaattcttgagttaaatcctttaaagattacaccctgtctatgaaaaaacagaactacttctagagacaggcaacaaaacctgataaccttcaaacaattaatcatttaagcatcgacggaagcagctacaggatgataatgtatgatcttattacaaaacattttcctaatcatgggttctccccaccgtacctttatgccgagactgatgggaacctgatcatgaggggcgcacctttgatcatataggctagccatatacaggagatgga

SEQ ID NO: 17980 - DNA, 657 bp, Glycine max
  unsure (1)..(657): unsure at all n locations
  Clone ID: PAT_MRT3847_11623C.1
acaaaatcaatatcttgttttagtgcaacttgtgcttgcaagttataacttacaactagtggcaatgcaaaagtaatatcatgattgtctttaggatgcacatgagagtcatattgccagagaatctcatttatttctcagaactcacagacatctgacattatctgttcccaacttttcccgggacttcaatgactaattaactagttatctttttagaacaataattcatcattttgaggatgctcacacacaaatttgaacaagtctatctctatccatgtaaagtagccattaacttgcttaaaatacaatgaccagacaattaattaacatcacttcgcaaagagggtgagcagcattgaactattgaagtatatctctctgcctctatgggaactgtcatgaccttttacacctgcattgtcagctccaccattcctcagatggtcatttgatagaaaagctgaatcatcgccagacgtggagnccaatcaactcgaatgaatattccccaatccacccgcaactgaatcttgactactctctgntagacctactcgtgcaacaccagnctggaaaaacctncgggagaatcttttgacatacgaagcagtttttttcacgcaaagtgctcgatgaaacccagtactcccc

SEQ ID NO: 17981 - DNA, 1640 bp, Glycine max
  Clone ID: PAT_MRT3847_116240C.1
cccacgcgtccgcccacgcgtccgacggctgcgaaagaccagagaaggggggtctctctctctttatctcactgcgactcactctagtgagagaaagaagaagcgaagaaaaaaaacacacacacacaaacacaagcacagttgaaaatggctctgcttaccctctcttcgctgcaatgaagaaacgtttgtttttcttctccgaagaagaaaaatggctctcggcgacgatgcgcagcaccactctccctcgttcctcgatgcccttctctgcgaagagcgagaaaccttcgaggaagactttgatgagaacggttatgagcgtgagaccgaaaacaacgaaccctctgtgataaagtcgcaatctttgcccttggttttgcacgataatgacctgttctgggaagacgaagagctcgtgtcgttaatcgcgaaagagggagagacccatttgtgttttcatggtgtcgttgctaatggggccttggaagggcctcgtgttgaggctgtgaactggatttcgaaagtttgtgggcactatgggttctccgctttgacaactgttctcgctgttaactactttgataggttcatcacaagtttgaagtttcagaacgataagccgtggatgacacagctcactgctgttgcttgtttgtcccttgctgtgaaaacggaagagacccatgtgccactcctcttggaccttcaagtggaggagtcaaggtttgtgtttgaggcaaagactattcagagaatggagctgctggtgctgtcaactcttaagtggaggatgcatccggtgaccccaatttccttctttgaacacattgtgagaaggcttggtttgaaaagtcgcttgcattgggagtttctatggcgttgtgagcgtgttcttctcaatgtcattgccgattcaagggttatgagttatcttccttctacattggctgctgcgacaatgatccgtgttattaaagagattgaatcatttaatgcgaccgagtacattgatcagcttctgggtttactaaagattagtgaggaacaagtgaaccagtgctacaaaatcatacagaaactattaggttgctatgaaggcatttacagccttcaccagaaacgcaagcgactatctgaaccgggtagcccaggtgctgtcactgatgcatctttcagttgtgatagctcaaatgattcatggaccgtgtcatcatcagtctcactttcactggagccgctgttgaagaggagaaaatctcaggaccagcaaatgcgactgccttctgtcaattgtgtgtcaattgatgttcttaatagccctcgctaataatgaacttagtatttacttcaaatgtggtagctttctttcatataaatctggcagttatgttattgaaatgctactaaattatgttcttagttatagacatttctagccataatttgaaaattaatgaggcagagactgagatacccttctccactttgtggtttaaggtggaaaagggatctggtactgagtagaaatataagttataaacttgtaattctacctgagttatactttcagtgcagtttttactcatcttacactgatatttgacaatatgtgcaatcatgaggttttctttgcatat

SEQ ID NO: 17982 - DNA, 1548 bp, Glycine max
  Clone ID: PAT_MRT3847_116241C.1
ccggaataccccgtcgaccccgcgtccgcgcgtccgctttgtttgattaccgcattggtctctctctctctctctcattatctcactgcgattcactctagtgagagaaagaagagaaggaaacacacgcagagtttaaaatggctctgcgcaccctctcttcgctgcaatgaagaaacgttttttttttcttctccgaagaagaaaaatggctctcggcgacgatgcgcagcaccactctcactctccctcgttcctcgattcccttctctgcgaagagcgagaaacgttcgaggaagactttgacgcgaacggtgacgagtgcgagaccgaaaacaacgacccctctgtgataaagtcgcaacctttgcccttggttttgtacgacaatgacctgttctgggaagacgacgagctcgtgtcgttaatcgcgaaagagggagagacccatttgcgttctttttctgatggggccctggaagggcctcgtgttgaagctgtgaactgggtttcgaaagtttctgggcactatgggttctctgctttgaccactgttcttgctgttaactacttcgataggttcatcacaagtttgaagtttcagagggacaagccgtggatgacacagctcgctgctgttgcttgtttgtcccttgctgcgaaaacagaagagacccatgtgccactcctcttggaccttcaagtggaggagtcaaggtttgtgtttgaggcaaagactattcagagaatggagctgctggtgctgtcaactcttaagtggaggatgcttccggtgaccccaatttccttctttgaacacattgtgagaaggcttggtttgaaaagtcgcttgcattgggagtttctgtggcgttgtgagcgggttcttctcaatatcattgcggattcaagggttatgagttatcttccttctacattggctgctgcgacaatgatccatgttattaaagaaattgaatcatttaatgcgactgagtacattgatcagcttctgggtttactaaagattagcgaggaacaagtgaacaagtgctacagaatcatacagaaactattaggttgccatgaaggcatttacggccttccccagaaatgcaagcgactatctgaattgggtagcccgagtgctgttactgatgcatctttcagttgtgatagctcaaatgattcatgggccgtgtcatcatcagtctcactttcactggagccgcagttgaagaggagaagatctcaggaccagcaaatgcgattgccttctgttagtcgtgtgtcaattgatgttcttaatagccctcattaataatgatcttagtatttacttcaaatgtggtagctttctttcatatcaatctggcagttatgttattgaaatgcaactaaattatgttcttagttatagacatttctagccaaaatttgaaaattaatgaggcagagacttagatacccttctccacttgtaagtctacctgagttatactttcagtgcagtttttactcatctaacataataaaatcataattttt

SEQ ID NO: 17983 - DNA, 154 bp, Glycine max
  Clone ID: PAT_MRT3847_116242C.1
agaatattggcccattattttggttaccaatcaccatacctggtgttagtaaccaaaataatgggccaatattctggttactaacaccaggtatggtgattggtaattctttttttttttttggttttgaatagtttatccagatttcacctca

SEQ ID NO: 17984 - DNA, 304 bp, Glycine max
  Clone ID: PAT_MRT3847_116243C.1
acgtacatcatcacaacagcacgaaaatgtcatcacaagacgctcaagtcgaggtcgacgtcgaggacaagaaagagtccaaaaagggaggagcagcagctaagaaagaagctgttatctattatggtccaactaaattacgtgaaggagaaaatgtatctcggagtatgtcatatctatgcttcattcaacgatacattcgtccatgtaactgatctttccggaaaggaaaccatcgcaaaagtcacgggaggcatgaaagagaaggacgatcgcgacgaatcccccccctatgctgctatgt

SEQ ID NO: 17985 - DNA, 529 bp, Glycine max
  Clone ID: PAT_MRT3847_116244C.1
aagggaaaacagaaaaaaaaaaccgggaccccttttttggaggggtccaaatccccaaggaaaaaataacccggggggggggaccccaccaaaaaaaaaaaattaaaaaaaaaccggccccccagggggggggaaccggaaaaaaaaaaaggggggtaaaaaaaaaaaaaaaaaacacctttttaaaaaacccccaaaaattaagggaaaccctttttttttggccggaaaaaacctggcaaagggccccccaattttcccggggactttggaaacaaaaaatttgggaaaaacccccatgggtaaaagggcccccccccccacaaaaagggggggcccccccaggggggaaggaaaaagggaccccccccctttgttaaaaaacccccccaaggggggggttttttttgggggaaggggggggccctcccggaaaggggcccaaggccttttaaaattggggtaaaaagggggggacccaatccctttttttaaaaatggggccccaaaggccctccagtttgggggg

SEQ ID NO: 17986 - DNA, 300 bp, Glycine max
  unsure (1)..(300): unsure at all n locations
  Clone ID: PAT_MRT3847_116245C.1
gcgactcgtatcatcttcaataatggggtggcagacgcagtttccggtgcatctcatcgtctccgaaagtgaacgacgcacatgtctcgaagcttatccagcngatggtgcggttcatccgccaggaagctgtggatacggtcaacgtagatctctgtctccgccgtagatgagttcgctctcgctatgctgctgttggccgcngccggctgatgcagatcaggcccgacttcgaacgctgagagcgccacgttgctcttcgcgtgacgattgagtgctcagtgctcgtgcctgcttcct

SEQ ID NO: 17987 - DNA, 507 bp, Glycine max
  Clone ID: PAT_MRT3847_116246C.1
cacagggagaaagattctgttgtgttcattggagttttctaggttattctgctccatatcctttgcacccgtatctgattctagcattataatctcatctactggagaggcagaaactacatcagaaacaggtttctgcggttctgacatttcagatgctacactaggaatttcttctgtaggttctgacttttcactgctacccaaaaatgaatggaaaggaagactgacagaagatctaatctgctctagcttgatctcttccttgcccttaccaggaccaagcttcctctttgaagcagaactccccaggagtgccccaaaagcaccagtgaacacagggagaaagattctgttgtgtccacttcgggaaaagaggatgaagatgagccagtatcactgtcagaattgtcatcgaatttaaaaaaatgctttcattcaaatgatcaaaataataaaatcagacagcccaagaaaactgaacagcccagtggcttattgcagctg

SEQ ID NO: 17988 - DNA, 2876 bp, Glycine max
  Clone ID: PAT_MRT3847_116247C.1
atggcatactccgagttgtggccctcattattggaaaatcatttggtggtcgccatacccgggaaggtcttccaaccaccataccccaagtggtacaactcgaatgccaagtgtgcataccatagtggagcccccggacacgacattgactcctgcctaccgttcaaatataaggtgcaacacctaataaatgtcggttggctatcattccaagaggagggccccaacgttaaaaccaatccactagcccgtcatggaggggctagcgtaaacaccatcgaagaggatgggcctcgctgcaagcggcatgcatggtctctcgtggtggagacgaaagggacgaatgtttgtttcatctcagggagtcacatgacatggaaacctgtcccgtggtggaagagttgcttcaacggctcatggactagggacagcttgaagtgtcccaaggagcgcccaagccaacaccgtttgcatatcaaagcaataaggccgttccgtggagaaagagttgcaaccaaagttgactccttgtcagccaaggtgaccaatatcaccagccttagtggcgtaacccgcattggccgggtgttcgttccccctcactcggcggaattgccctccaaggggaaagcacccatgatccaagagcccacagacgtagccaccccctcaaaagaagtggatcctccgggggtaaaagaagctgaaaagaaagaaggtcttcaaggaaaggcggtgactttggaagaggctcatgagttccttcgtctcatccaacaaatccatgataagatgcataaggaaatagaggtctacgtagatgacatgattgccaagtctcggattgagaccgaacaccttgtcaatctgcgtaagctgtttggaaggttgcagaaataccaattaaaactcaacccaaccaaatgcacttttggggtgaagtcggggaagctgctaggatttatcgtaagtcagaaagggatagagatagatcccgagaaagtaaaggccatcatggctctacatgtgttcgtcagatgtatggaccatgtcgtcgctaaggtactcatcgacaatggttcaagtttaaatgtgatgccaaagaccaccttggagaagcttcctgttagtgcgtcacgtctaaaaccaagttcgatggtggtacgagcctttgacggtagtcggcgggaagtgatgggggaaatcgacatccccattcagataggcccccacacttgcaatgtgttgcctcttggggagaccctggattcatgcgctaggagtggtcccttcgacgcttcaccagaaattgaagttcacggttggtggacttttggtgatagtgtcaggcgaagaggatatgttgaagcagcggaagaatcattggaaacaactttccaatccttcgaggtggtgagttgtgcctctgtggaaacgagttcgttgctaccttctctctctaatgcggccataatggtggcacgggttatgctcaagcacggttatgagcccggaatgggcatgggcaaggacggcctcgggaatgccgatgtggtcgacattaggggaaacccgtacaaatatgggttggggtatgaacccgggatgccgggaaggaggaatgcaccgtcaagactccaagcagatagggcatggcccggccatgttagccagtgtttcaccagtgccggaataatgttcgaggaagaggtggcagcaataggagaggagttcccacaagacccgccaaattttgtgcggccatgccatccagattcccaagtggggaactggcgcgtgatgagccagtcagaggtctataccgctgattctagatatgagggtcgattctttgaggatcctaacaatgagggtttgacaatcgatttcgaccgagatgtaagccaaacgataaatgaagaagaggaagaggacgtcctttcaccagagttggagaggttgatcgctcaggaagaacgtgaaatgaagcctcaccaagaagaaaccgaactggtaaacttagggaccagggaggaaaagaaagaagtaaaagtgggaaccggtatgaccgcacctatccgccaaggcttgataacccttcttgaagaatatcaagacgtctttgcgtggtcgtaccaagacatgcctggtctggactccgacattgtgcagcataagttgcctttgaatcctgggtcttccccggttaagcaaaagctacgaagaatgaaacccgagatgtctttaaaaattaaagaagaagtaaggaagcagtttgatgcaggattcctagctgtggcgcggtacccggaatgggtggccaatattgtcccagtcccgaaaaaggacggcaaagttcgaatgtgtgtagactaccgggacttgaaccgagccagtcctaaagacaattttcccctgccacacattgatatattggtagataatacagccaaattcgcccttttctcatttatggatggtttctcggggtataattagataaagatggcacccgaagatgtagagaagaccactttcgtcaccctatgggggacattctgctataaagtgatggccttcaggctgaaaaatgctggggctacctatcaacgtgccatggtggcgttgttccatgataggatgcataaggaaatagaggtctacgtagatgacatgattgccaagtctcggactgaggccgaacaccttgtcaatctgcgtaagctttttggaaggttgcggaaataccaattaaaactgaacccaaccaaatgcacctttggggtgaagtcggggaagctgctaggatttatcgtaagtcagaaagggatagagatagatcctgagaaagtaaaggccatccttgaaatgcccta

SEQ ID NO: 17989 - DNA, 257 bp, Glycine max
  Clone ID: PAT_MRT3847_116248C.1
ttggggctcaagccgattgggttggggcactttttttttaataattggtggcttttaacaaggccggcgaatccttaattctaataatccttctttggttttttccaaattcggattttttcgacagaatccgggaaaccaacccaaccaaaccttgggccacccaatcctggagcttgggttaagggggacccagggccgtggttctaaggaccttaaaatggttgaggaacttggacctggtggaaaagggattg

SEQ ID NO: 17990 - DNA, 1304 bp, Glycine max
  Clone ID: PAT_MRT3847_116249C.1
atgcccccagtttcaacttcatgcttcagtgaatttctctgtgatttttccccaaaattttttctctcgcgctcgccgtatgagagcacttcaattttctctcccataagactattcgttctttcccttctcaacttccggcgagttctcccaatcttcgattttgttctgtaacttttattgcttccagaatccagatctggatggacatgtttcatcgttcgcatttggtgcaaccttgatttgggttttgaagtgctttatggaaacttgggtctctaaatttttaaatttttgtctaatgacgatgtggcgtgcctagatttgagtaactgggtcgctgctacagttgtggaagtttgagaattgggcttcgatttgtttgtcgaaaagttggtcgggtcggcgtcatgttctatggagcgggaggatgggacccttggcttattcttttgcttctattgtgtcttcaatgtatgtactatatcacacctagtcaatagctctttgctacttctgagcacacttgtgtccctttcgagtcttgtgtatttctagaaatgaaatacacataaccagacgagagttcctaatatgtcaggaattgctgcatgtctgcttgtaattttttcataggctgtatatgtgtttttttcctttgaaatttcaaagaaatgcttggatttttcagccacagtctacattgtccatctttttatatgcattgtgtatgggggttggccctcatctataacatggtggattgtgaatggtactggaattgcagtgatggctttgctcggtgaacgtctgtgcatgaagcgtgaactccaggagatatcattgacacgatttcggtcaaatgtttgattggtagaaggtacttttgaatacaagaaacaagtgctgcaggatggcaactacttttgcttctatatattggatgatcatgatcttcaagatgaagcccacgaagtgaatagttctattctgccattgaaagacctgcatttattttctattctttagttggaatagaattgaaacatatataaccagacgagactaagtatataattttacaggaatttccggaagtcttattgtaattttattctttttacccttttgtgagttttcggatctgtttacaatctcatatgttacctctttctatcccattacttttaatgaggttgttatatcaggtagcagaatgaacctcttagtcagatttgttttgttaatttctttattgattgataaatttgcacaaaaaaaaaaaaaaaaaaaaaaactcgaga

SEQ ID NO: 17991 - DNA, 547 bp, Glycine max
  Clone ID: PAT_MRT3847_11624C.1
ttttcttttctactttctttttggttcattatagaattgaaatggtagatattaaagagattgttacgttatcgaataaatttaagagttttggtataatcatttttaagttagtagttacatgagtttgggtacatcaagagaaagcgagggagaattaaagagtttctaacagtaccaaactcttaaattttttagggaagcatagaatttcttgtagattaattatgttttaaaacaaaaaaatgtaagttcttaaaatatgttttttaaataatgtttttgaagtacttaatttttgtaagatttgaatttacatctccaatgagattttaaagttaattaaaaaccactgttaattttatatattctaacaactcgccatcagaataattgacgtgacagaaaagttatttacacaagcaatttaagagttgtgaataatcatatatgtatagaatgtactttaagtttttaagaattatattacttttaaagagaaagttttaaaaaaattatattctatgaaatataatatttattgaaa

SEQ ID NO: 17992 - DNA, 332 bp, Glycine max
  Clone ID: PAT_MRT3847_116250C.1
gccagcggcattggtggaaaacttgaatacgttcggaagaacagcttaaaatcttaagctctgatgcaccgctttccctaaaccaggatgccagaatgctaaaagtatgaccgtttgaccattttaaaatgtttacatgcctaccgacacaaatgagcacacgggctctaggtctataaagctctgaagccattaataattaaatttttattctccgtatctacgagtacaccagttggcttcttagctgcggtcctttggttttttgggttcaggcggactggacgaccaagggctagagggctggacagtgaggagcttatgtgcttctg

SEQ ID NO: 17993 - DNA, 483 bp, Glycine max
  unsure (1)..(483): unsure at all n locations
  Clone ID: PAT_MRT3847_116251C.1
ggcttgtgtgcttgtccttacaacactcgtcaacacggtcttatatgctctgctaaagcttcttttntagtaagtgatttgtttatatgggtgtggggatcgaattctctaaactattgctagggtgttctgtgagctgatgacttgatttgggttgccaagtgcacgcaaaatcggttggcaggtttttgactcgatgcggtaatttaactgtggacaaaatgatgtttgtgctgtgtaatcatgttttgtgttgtgacattaatgttgcttgatttgcggttttaaggtttgtagctggcgttttcagtcttactctatgcggggttcaaaggtaccgagggcggaatgattgggttcgcttattgcttctcacttttatatcctttaccttagtttgcaaatgttcacgagaatattcaatcgccacttgacgagatatatatttttcgactgtgcaaagggtgcaacatagtcattttt

SEQ ID NO: 17994 - DNA, 273 bp, Glycine max
  Clone ID: PAT_MRT3847_116252C.1
ataaaagggggcgaaccacgcacccagaggtctgattcaagcggataatatatctagacgcatgaaattgaacaagacggggggtgggggacttaaaacggtgatcactttccaatgcacaagacccacccatgctcataatgctatcgggacgcaactaatgctactaccgtcacacctgtgataagaaacactcacatattattaattagttgaattaacctgacttctttcattgtgttttgactggccaagcacaccgtgctttcactc

SEQ ID NO: 17995 - DNA, 378 bp, Glycine max
  Clone ID: PAT_MRT3847_116253C.1
tttttagttttctacataatctcatcttcattcactgtatattgccaaaggggaagagcttggcctaatcttattacaatgacaacaagctattatgctgaaaaatcctttttgcagcaaaagccatgaaaaacggcatccgctttacttgctgccatactccagggtgctgctctctgacataagatgactcttgacgagaaaaaaggcctaacaaaacctgtagtgcgcaggaatgtctttggtgagttacttaagaggcaaattataggagccgaaacaaatgagctatgaagcatgctaggagaggctctcttgactgtgaacacaaatacaatgcgcaatgaaatcaaaactgaggcattattatctggactt

SEQ ID NO: 17996 - DNA, 227 bp, Glycine max
  Clone ID: PAT_MRT3847_116254C.1
agatgagtgatctaggtcaaggttacaacatcctgagactttctcagggaaaatttcttggtagaggagctgtggaattttgtgatggacccaccttaggaggtttatgttgttctctcacgaattatccaacgttgtttggatcaacgttgggagagtcgagttgtttttttcttcttcattaggtgcgtccggatctgtcattgtgcattggaaaatactttcca

SEQ ID NO: 17997 - DNA, 287 bp, Glycine max
  Clone ID: PAT_MRT3847_116255C.1
tttttgagcttttaatgaaaagatatcactatgaaggggcaactgtttaaaacatgcatactctacacaaactattaactgacatttttctcaaacaaatactaagttctttcaacaatgaaattacacgctccactttacaaagggaaactcttaatgatatgacaaccgatatctgtatattaacctttactccataatccactgaaattaccagttacaataaacattattgtacaaaatatttaaacacatacgacactaacaacttctatcatattttctat

SEQ ID NO: 17998 - DNA, 518 bp, Glycine max
  Clone ID: PAT_MRT3847_116256C.1
ctcacgcgtcttttgtttgaggtatactgggccatggtggaaatggattgggacaggcaatgggcggtacccctacaatgttgcatcctcagtcaatgatgaatcatgtgctcgatcctgcattagggggacccatgggcagaatggttctgtatagacgctgacctggcgcttccgcgccttcgttttagcatattttgccttcattccctgttgattgaagtggtggtttgcctggagtgctaccttaagatgaagccagcgctacaacgcaagagggatgccgcattcacgtgtatgtcagattatgcaccgattcattgcatggaatgcctctaatatagggatgtgggaggaaccatgtaatgactcataacgtgtccataaacaagtcccaggcttatgcccttgagaagcatgctgctgccaactgcaaggatctcgatgttgctaacgcagcaaacaccaatgcattgatcttgaaagaatttgcttcatctattcccggaaaaaaacat

SEQ ID NO: 17999 - DNA, 447 bp, Glycine max
  unsure (1)..(447): unsure at all n locations
  Clone ID: PAT_MRT3847_116257C.1
ctgaggagagtcgatcgtcaaaaatcaacctggcccctcaacttctctattgttctctccgtctccctagccttctttttggtggctacttaaccaagggcacaactccganccgataacncgttttccttctacaacctttgcanancaaagtttgcaaagcncccaagnttcccaaaacnccaaaaancnatnttaattgggcttccncaaaaanacaagnaattggccttaaggttaattttgtncccattgccccttcccttggggggggggttnggtnttaaanccaaaaacnttgcccaacccccaaaaaaaaggtttttggggggcccaagggcccaaaaaaccgggggnccnggtttgggnccnccccaaaaccccctttnncgggggggggaaaattncccttgccctttcccgggggnttttncccggttttggnnc

SEQ ID NO: 18000 - DNA, 306 bp, Glycine max
  Clone ID: PAT_MRT3847_116258C.1
aaacgaaccacgttccttctgaatgtccattctgaggttccgaacaccggtttagtaaaacattaatcttccagatgaattttccgaacgaaatagccaaaccacctattcaaatcgtctcttaaattaggagccaaactaagggctcagcgttaccgctctccaccgccaagtttgacaccttaggtgcgtaacatcctgacatacatcgcttagacatattgcttttcgctactggtaagcaccacttgcaagctaagcctgcttcccaagctttgttttcatgatccgctccttagatccact

SEQ ID NO: 18001 - DNA, 598 bp, Glycine max
  Clone ID: PAT_MRT3847_116259C.1
ttccggaaaaaacaaaaagattaaaacaccatctaaggagaggaggggggtcaacacctttgcttagtcgaatttgggtggatccatgagctcttggttgattcactacaacaagagagtcataataagcatctcattagcgtttatgctaaggctttttgggtttaaatcaaccatgttcatggtggtgctgaccatagcaatcttggttctaccactgatgctaccacctctacctccaccaccaatgattcttatgttggtgcctcttgtgataatgctgcttctggtgaaattggctttgtattccaaacatggccctgcagatgtcatttatcagtgtaattttacttggtagttagttacctacgcaattctctcttcatatgcacacagaaacatgcttgtctctgtgatccatttttctcttgcatcaatgttgcatgcatgcttagagataactgataaaagtgtgtgtgtgaattcggaatagtcccttcttttgatgttttttctttctttcattcgtcgacctttaacccagaaatcatagcaatgtagataaatttatccagaaagaatacaatatttgtttcag

SEQ ID NO: 18002 - DNA, 285 bp, Glycine max
  Clone ID: PAT_MRT3847_11625C.1
gttctagatcgcgagcggcgccctttttttttttttttgctttcttctccatgatcatgcatcaccatgcatgatggcctattaatacactaccctatgcaccaacaccccaaagatctcttcctcttcaaactacatggaaccccgctcgacctccctcagacgaagatacagcacttcctgcacgagctggtaaattgactattgtggcattcctagaggcccccgaggatgccgatgttcggcacctgacggtgacgatggccaaggaagcctcatatgact

SEQ ID NO: 18003 - DNA, 485 bp, Glycine max
  Clone ID: PAT_MRT3847_116260C.1
aaaagctacgatgttaaagaacatgttgaaaaactaacgcctaatgggggttttacacccttaaaacttaagggaccttaaatcataactattttcaaaactatgacacattacccagaagattatgttttaatgatacgcaaccaatacagattcgacacaaaaggagtcaaaattggccgggaagacctaacaccattacactgtagaaagaaattcattcttggagactcacgacgaaaactactgaagcgctctatcaaaactctctttacctgaggacacccgatgaaccaaaacttgctctgggtgataaagcttcaactgactaaatgatactttacaaggcttgtcgagatgaacaccgcatacctctaaattgggtaaagctgatggatgcctatcattcttggtaacagctatcaccgaaaggatgtctttttagtcaaaaacgtccaagaggatgcggtacactatctgggcat

SEQ ID NO: 18004 - DNA, 218 bp, Glycine max
  Clone ID: PAT_MRT3847_116261C.1
agagcttaactattaacacttcattagttcaatatggtgaagggattcactcctggtctacctcacctctcatgaatcgttttgatacgagacatccttgttctcaagctcatacagtatcagccagggcttacccaacaccctcatcactttgtaacctgaccaccgtttcaagccctaacgtggattgattcaaacctataactctcaacaacctg

SEQ ID NO: 18005 - DNA, 570 bp, Glycine max
  unsure (1)..(570): unsure at all n locations
  Clone ID: PAT_MRT3847_116262C.1
cttgaaaaagaagtctctttggtccagaactttggaagagatagttgaaaagcttgtagatattggtacctatatacatcaagcaatttatgagttcggtggaaatcatggcaggtacagctgcaaccaagcacagtgagggtcctgaaagactaggggaagctggtcttgcactgcactatgctaacatcatcaatcagataaatatgattgcatctcgcccaactgctcttcctccaaacaccagagacacattgtatcatggtttgcccaacaatattaaggctgctcttccatcccagttgcaaaccattggtgacatgaaagagctctccatcactcggatcaaagctgaaatggataagattcttcagtggcttgcaccacttgccacaaatacagtcaaagcacatcaagggttcggatgggtaggtgaatgggccaacacaaagttagccggaaacctggagtattctctcatcatatactanatgtgttacatgtgcaattggaaggaaacccaatgataaacttttttctgatattgcaataatgactctggcgataaca

SEQ ID NO: 18006 - DNA, 762 bp, Glycine max
  Clone ID: PAT_MRT3847_116263C.1
gcacgagtcttggacaaattgaccatggacatgaaggatgctggttataagccatgcaacaattcaaatttaaataggattttggaatctagtgactgaaatgcatgtattataacaaattttatcaaagtgagctgttggctgctctgcagtgggcagctttcaaaaaattgagtttggttcgttgttacagcagtcacagggttggttataaccaatgatagtttcatgaccagtgcacacatacatgacccgaactgctattggtcattcatttgaaacagttctttcagtgatgaacaacacattcaattcatgtacaataccattgtgcagttgaatagtgacacaagtttgatcctaccttttacccctgatacaagaaatggtgtgatgattactgttatattgagcaccgggatgaaaggagagggctacgagaaatattcctgcgtgggtacccgtcggagagaaaaggtgggattgccctctacagattgacactaaacacgacacggtaataattgtgatgaagacaatacgctagattcaatttgttattgaacttagctcgccggaaaagactctactacatgacatagttgcatattttattaatcaattatcagattgaattgataaatatttacttttcattgaattaggtattagtcaatgtgatgtaattaatcacttgtttagctgaatttcactttagatgtcacaatcacttactaacattcataccagttaacagtgtat

SEQ ID NO: 18007 - DNA, 366 bp, Glycine max
  Clone ID: PAT_MRT3847_116264C.1
ttatggtcaaaaacttccacaagaagggaaaaagcttttagttacaagggacaacaataaaatgccgtatttttcttcctcataggataaaagggtttacagtgacagtaaatcaaatttaaccccttctcatttatctttatcttcttccttccccttttgcagctgccttaactcattctccgaaggatcttttgcaatggagaactgcttcatatattgagctttcagaatcacaagagtagcgccaatcattatcagaaaaggctacactaatttctcggggaagtagcagggttgaatagtatctcctattgttcacagcctcacttctcttagcaacagtatcaatactaggtttgtgaa

SEQ ID NO: 18008 - DNA, 314 bp, Glycine max
  Clone ID: PAT_MRT3847_116265C.1
aactattctcagaggtccacaccaacttaaccggcttgttccagctaccgcttggaacaaggcacatctggtctacagatggtctatggtggctgaacagtgactagttcatagacatgcacggcccttgagcacaattgactggaggaatgtctatagaaatggccagtcaacaaataaagactgatgctatttaccatggacagcggtaagcaaactataataaccttcttcggatcgaagagtaacttgtgagctgacgatatcctggtaaaactctcagaccaccttagagtgaactcattagatccata

SEQ ID NO: 18009 - DNA, 601 bp, Glycine max
  Clone ID: PAT_MRT3847_116266C.1
taaaaacaataaactccaatttatattattgacttccaaggtcgatcggttacaacatttcactttgaaattcctaaacatttctactaaaaattattttttgctggcaatatgatgtcattttttggtaacattagataccactagatatacttatgacacatgtagaagaaaatgcacgcgacaaatggtgttgatttctgatcataagtagtactgcactctgcaacctggttaacatttaggaagatcagctggtggtggagggactgaagttgaaggagttggtccgttctcaacctcaaaaatcatggctagtccccacggaacatggtcttccatatggcaatgcacaagccaaacccctggattgtttgcttggaacctgatgacagtccatcctcccataggcacaccaacagtgttgcgtaattgcggattcaccaaattaaacttagccctatccttcctgttgaaattcccgaacccttgagccaaaacatggaagctatacccatgaatgtgcatggggtggttttggcccccaagaagtgctgtattctgaaacacaacctccaccgttgaattgaacctgaacttc

SEQ ID NO: 18010 - DNA, 342 bp, Glycine max
  Clone ID: PAT_MRT3847_116267C.1
acgcgtccgatttatctcgtgaccatttcatccgggattcatcatgtcttccccgacatcttcactgagtgcaggtgcaacattggcatgtttggggctgtgctgacgttccatattttcttccacaagctgaacgagattgctatcctgagtgctttcaatttttgcgtggctatcaccatcactgtggtggtgtgctactagtcagatgtttggaggaaccccaacgcacatactgatatcatcaacatcatccatgaccagtatacctaatacatcttgattgcgttccccaacattgcatttgcgttctgcatgccagtacattcttccaccaattta

SEQ ID NO: 18011 - DNA, 503 bp, Glycine max
  Clone ID: PAT_MRT3847_116268C.1
ctcgagccgtcggagcagaggaagccacggcgcgtttgttgcctttcctatcctttcatttgcagcggcgacggtggcggcggagcctccgtcattggcggctctgcccccgggcccgccgcgactgaaagacgaaattcgccgtcggaaccctgcaatgaagactgcccgcggtcagagcccctttctctgtttcacattgcttggggcagtgatggccacgcgggctcaacaaatttatcattccctactgtttattttttctttttgtgaattgtcggtgccgtgttgtttagtcgagctttgatgttttgtgcatttcttttgtttgttaattaatgccagttttctgtttttggatataattatgctatattttttcttatgaagtttgatttaactatttgtttaattgtttgttctttttttaaaatgtatattgttcacatctctaatttttggaggctgatctctgtttaagatgtttgcaaattaggagtgta

SEQ ID NO: 18012 - DNA, 243 bp, Glycine max
  Clone ID: PAT_MRT3847_116269C.1
cgaagacatcatggttcagcacttcaattttcttttctagggggagcatgatagtcttccaacacacattatacaaagccatatcaccccaactaacaatgccacttcacatcacaacaaactatcattcaatccatcactattaaaaacccactcttgacaacctcaccctccagcactacacatccctttaataccaaaaccctggctacacctgatctcttaaccatcctcaacccaata

SEQ ID NO: 18013 - DNA, 339 bp, Glycine max
  Clone ID: PAT_MRT3847_11626C.1
aaaaaaaatataaaaaaaaaataaaaatttaaaaaaaatttaataaaaaaaaaaaaaaaagagaaaatagataaatatgtataatattttaaacctcccttatttaaagggccctttcttcttacgtcttaccttcttatttgggccctcttttttttaaattcaatattttttttttttccccccctttaatttaactatctcttttcttacccctacttatcttctttagcccgttttttacaaaatctacttttttaaaactgcttgcgtcttcaaatattcgcctttaataaaatttcccatttataaatgccctttaataatatatatgcccct

SEQ ID NO: 18014 - DNA, 448 bp, Glycine max
  unsure (1)..(448): unsure at all n locations
  Clone ID: PAT_MRT3847_116270C.1
gttaagagaacccctctctttgacactactaccgaagataagcttatttggccccttgaaaagaatggtgtttattctgttaaatctccctataaacggcttatgcaaaatttcactacccaatttgatctgcatgtccctggtaactggcgccttctatggtttcatcaaagttcttcccacccgcatcaaactccactccaaaggtattaattgttcccattcttttgaaaattgttccgcatcccanttctgtcaattggggtttgtgcatcaagaatgaagctggttttttcatcatagctcgcacagcttggtcgaatcaacctctntatgtttctgaaggtgaagccatgggtcacctcctcgctatacagtggcttcaggagcttgttgtttcccatgttatcattgacatggattgtaagattgttgttgacaagctcag

SEQ ID NO: 18015 - DNA, 219 bp, Glycine max
  Clone ID: PAT_MRT3847_116271C.1
aggggtgactgaatgcacctgcgtcgcatgagtgggtgctccttgcttgaatcgcacaccgcgtaggttcctagtccccggaatactaattctaactcgatgacttctcagctgcaaccggaagtgcctccatactctgatggctagtgagccgagctagatctatcaattagggatggggagaggtagccacgagtcacccctacagtcctgcttatg

SEQ ID NO: 18016 - DNA, 243 bp, Glycine max
  Clone ID: PAT_MRT3847_116272C.1
gatggaaccccgcataaagacccggaaggagggaaaaatttagatcactttgggggtttttcaccgccacgcttttcgtgaccggatctgtatggatatgatccagatctacacgccgatgggggtgtaggccggggctcacatagatctggggcggagagggtcaaatctacgggaccgcggtgcaacagagaatcgttgacacgaacacacatccgacggtagagccagatcggttcccct

SEQ ID NO: 18017 - DNA, 276 bp, Glycine max
  Clone ID: PAT_MRT3847_116273C.1
taagccatacccaaaaacacactcaatgtaaatttcaaaattagagaataacctcaatcacattgcctcatatcgtggtcaacataaaattctgccactaaaacacacatcaattcatctacgacaacctctacttatgctacgcaatcaatcctgtcaaacaccatgatccgaaattacagcgtgtctacgctaaaccaattctgcagaactgcatagcacatgaaaatgaatgccttccccagagtcagtaccatgactaaagaagaacaacca

SEQ ID NO: 18018 - DNA, 2338 bp, Glycine max
  Clone ID: PAT_MRT3847_116274C.1
gaaaactacatgattgatatcatacgttctctacggagtattccaccatcatcgagctaattatgaacatctctactagtacaagaaaagtttaaacatcgtaagaatgtaaaacttattttcatacagcaaaatattgtacacttacactacaatctctcctcaccagagcaacatgttcatcagatatagtaccaaaattgggccacgcaacacagcaaagtctcagtatttcacctatttttcttctaaatcacaacatctggaaatatttatctctagaaattaaagggatctcaaccattattgaaccgaaaatgctcgcacagtctggcttaatccccacatatccttcctgtgaatttgattgtcatactccactgtggttttatatttagtttttatcccattacatttggaccctccaattatctgatagtttttcctccatataacttttttttttctttttctttttcactttagcaatctctatgaattcattgcttcatattggcttcatctttttgtgctgcttaggcatatcacaagaatccacaattaggcagtcctcgcgccatcacaatctctacagatggatggacttttatcaagtttgcaccaagcaatgaacacagaaattaaggctcagttttagccaaaagcaggaaagacatgtcgtcttatgcagttcatctatggtatgtgccatgtgatttaaagaactgaaaatccgggtgatgaacctgaactagccttaaccagttatcggcagcctgcaagagggaactcacttgttgagattcactaactccttttttcatccaaatagacccctttaacttataggaagccattgcaaaagtaggcatagaaatctttggtacaacatccatctgactgggataaaccagtgttggagcatgagtacgaccacttcctgtcaagggtgtatggagtgtatggtacgttagaaagcacccatctaaatctttttatatttcattcttcacttgagcgaagctcatttttcgtgctgtttatgcaatgagtaacatgaattcaatctaggaatcccaactccataatcagtctatatggatgatatgatggatacaaagactataccaagtttcgagagagctatgaacatcgctaatagtacaagaacatttattaacatcgttgtagtgtaaaacttattttgaaacagcaaaatattgtacacttacactacaatctctcctcaccagagcaacaacatgttcatcagatatagtaccaaaattgggccacgcaacacagcaaagtctctgtaattcacccattttcttctaaatcacaagatccgtaaatattttatctctagaaattaacgtgatctcaaccattactgaactgaaaatgctcgtacagtctggcttaatccccacatatccttcctgtgaacttgtttgccatactccactctggttttatatttagtttttctctcatttcactaggaccctccaattatctgatagatattcctccaactaaatcatatactctttctgatcactcattgtaaagtaagactgatactacacattgcaaaacttccatcctctcatcgtggtctgctaagacaactgaccaggatctgacggtatggtaaactcgagtcatctctagatcttactgagagtctgttcttacggagtaagcgctagtttcagagcatggttgtgattgctatcgctcatgctttagatgttgctactgttctggctattttcagagacatcgactttgttcttcgaagctaaatccgcgttttcaggttcgttgttcttggctctgtgactctgtttccgctgattctggttcttcctcgccttcaccggaatgtaaaaccgatcctcgccgcgaacgccgctgaattgcagtgcagttcccagcattttccaatcgttttcagaactgcgttcttctcctccgtttggtcgccgaggaaacggagaaaatgggaaaattcgtgatcgcagagaggatcaataaaaaaggaagaagaagaaagagtagcgaatcggaatcggtgatagaagacgaagaaaagaaaacgaggttgaagacaagacagaggaagaagaaaagaaaaggcttcaacagtcttctgaaccatggacttaaatagccgacaaatacggaacataatattgcacaacagattgtctttgatcaagtaccaaagggactcctgctccatacgcactccactccttaaacgattcccacagatcatcaagagcaaagtaagattgatactccacatcacaagtcttccaacctctca

SEQ ID NO: 18019 - DNA, 291 bp, Glycine max
  Clone ID: PAT_MRT3847_116275C.1
ttgttgaaaatactaggtgacaagcaaaaccctcgcaagtataataagacccagcctggaagcttcctacgactaaagcgttaatacaatttcagctggggcctaatgaattcatatcggactacaggggcttattttcaaaggactatatcagagaatgcttctcgcacagctgcgaaaatgtgagaaaatattaggggcttaattgaaagggactattcgcttgctgtatatataaagcttgtctaaaaactcggcaagaggaaacatgtgatcctggtaccatttgct

SEQ ID NO: 18020 - DNA, 223 bp, Glycine max
  Clone ID: PAT_MRT3847_116276C.1
cgacttcaggatccacgagatcgcgcgggatcgcgggttcgggacagactgacatctaatatgctaaacgggttcaatcatattaacaagtagaagagccttctggatgatgtatagactgatctgcttgaattggaggcatggactggttgtgacatattgaaggctgaaggcggcctattcgatcagtttacacttgtacacgatatgatttatttagtta

SEQ ID NO: 18021 - DNA, 340 bp, Glycine max
  Clone ID: PAT_MRT3847_116277C.1
cttaaaagttcatattactgaacttcacgtgctcccaaaaaaacacaggatataatactcatactaatgttatttttctttaattgaaaccgtgactgaaaatgtactctgtctgctagttagaatggagctactattgctgttgtccatgtgtatcccttctgtaacattattactatgttcttgttttatagggtgacaaaaaggatgctgttgctacaaatcggaccctggatttgacatctggttttgaagttggtcctgcaacaactgctggtgcagatgcatcatcaagtcaaaacactcgatcggtgttgactatttgctttcaattcccttt

SEQ ID NO: 18022 - DNA, 303 bp, Glycine max
  Clone ID: PAT_MRT3847_116278C.1
ggacaaaccatgcgccaaggaatatgagcaattgtctatggaatccattgacagcatcattatgctaatcttcaggggaacatttgccaaagcgggcaagcctatctatctaaacccaacttcagaaacagacccggaccacgactacaggaacctcacccagtatgtcattgcatgccatgcattctacaccaacaccggattcctcaagtccatctaagggatcgacacctggctcaaccatgccagccccactgaaaaaagaatgaccatgtcaactcctaaggacagatcctataatgc

SEQ ID NO: 18023 - DNA, 287 bp, Glycine max
  Clone ID: PAT_MRT3847_116279C.1
accgaagggggggtttcttaatttggaagcctaaaaaaaaaaaataatcctcaccccaaagggggaaacccccccctaaacttttaaaaagggccaatttcctttttgttttggggaccaaatgataaagggtaaataatttacccttttcaagcggggcctttttattttcatcatcggggaatgcgggaaaatgtaaatccccaaaagagaaaaccccttttttgcccataaaggccaaggcaattttttttccacaatttttttaaggggggggaccaatcccc

SEQ ID NO: 18024 - DNA, 358 bp, Glycine max
  Clone ID: PAT_MRT3847_11627C.1
cccacgcgtccggcttcacgtaatcactggcttagtgcggtcaggggcggagactcctaactcacatgacacaacacatccattcttaagccagcaccaccttctcatatcttacaatgatcttccaatcgtgatatatgatgtctgcaactctgctattatttgatatagcgcattgcgtgcatggtagactatcaactgtcacacgctgataagataagcattttgccagggcaggcatcattcaaattgcattgatatgctggttacattaccatggaggactagcagaagagagtcttgtactactactttgttgaagcttacgtggaaccagcttcatagccactagttctat

SEQ ID NO: 18025 - DNA, 133 bp, Glycine max
  Clone ID: PAT_MRT3847_116280C.1
ttttgttctgcagaacgccgggatccgcgtttgttgatcactccattccacctctagtcttaatctcctcataaaccttctcctctcttcgtgtttacattacctcacacttagtctacccttattatttata

SEQ ID NO: 18026 - DNA, 435 bp, Glycine max
  Clone ID: PAT_MRT3847_116281C.1
gtctccttccattcaagttttcttcatatataagagttcacagtttgaatccttgattacttatttaagggacttaagctcaacattctttctatgaatacaatttaagagaataaattgattatttactttaaaattattcattttataataattattttaaaactttcatttatattatttttaatgaattaaaaaaaataaatttataataaaataaataaattttatttttatagcatttatttcttttcaccacatgaactattttatctcacacatttttatatcttttttataataaaaaaaattgtactaatataatttatgtagtgcgattatatggctgcctgaagatgatgattaccgttgtggccaagaacgatgaaaacaaagtccacattattatttggtttgtcgcgtataatacctttt

SEQ ID NO: 18027 - DNA, 496 bp, Glycine max
  Clone ID: PAT_MRT3847_116282C.1
attcagaatgttaacattcaattatgtattgtaaaataattaaacaagcatgagtatcacagccactactacacaggaagtttcaacttaagtttgtttaatgttgtgatttagaggttattttgtttacatagttttttatgcatatgtatatattagtatagttttgcattttaggtagtaggatcttatgattcgagttatgagcattcaccgctcccaatcctaggtagaatctcgagtttaacaacattgactatgactgattacatctttagtttaatgatatcacattagctgaacataaatcctactatgttcctaaatggaagcactttctctgcctgttttctcttctccggcatctggcttctctctgcccctgttttctcagaatagcggctttcctataacatttttggggctggccattatgtggtgcgattaaaaatactgtatagattcacgtcagaaaaacaatcgccggacgcgtggg

SEQ ID NO: 18028 - DNA, 250 bp, Glycine max
  Clone ID: PAT_MRT3847_116283C.1
ccaaatgggagaaaacaaaaagcccctttttatgagtgccgaaaataaaattaccggcagaaggacattaaaaaattgggctagccctacctgatttggaggccagttgtccacagctacctgttttaaagggcactgagaaccatatagagaagagggtaccgcgcctactccaaaccttggtctgctccaatcttttccctaaaggtctttctgaggccttgaaactctggctattaacgggctttgg

SEQ ID NO: 18029 - DNA, 173 bp, Glycine max
  Clone ID: PAT_MRT3847_116284C.1
taaagaagtaaagcactcctcttcaaccttttgtttatctgttcttgcttgcttcatcttccaatctttgctgcccattgtggtttcacaccttctatgtgaagagagagagagagagagcgatttagtgttttgcagtgtggagggaatactgcagaagctgagttgagttc

SEQ ID NO: 18030 - DNA, 409 bp, Glycine max
  Clone ID: PAT_MRT3847_116285C.1
tggcttggaacctttgggctgatttatgtgcttgtttatgtgcttgtttatgtgcttgcatggtcgtgagaagatgatagaaggggggattagagaagtgctccaacaaatgtcaattctcgcattacctcctcctccaaaaacgagagagcgtacccttacttataccggttaggttggtacctaggctggaaacgtccgtcgggagtcccaccgttctgagtacgttacctaggtcgacgggtagacgttgagcgacaagattacaggcggcggcgatgacgtccccaatattcctcctagtgagattggcgttggaaagtatgcgttctgcgtagcccctgcggactctgagtttatcgctaccgacgaaactagaatcggtatacaattgtaaccggcctacctg

SEQ ID NO: 18031 - DNA, 910 bp, Glycine max
  Clone ID: PAT_MRT3847_116286C.1
ccggattcccggtcgaccccggctcccgcattaatttacatccttaaacaaaccttcccctacttctctcaaattctcctctctcttcataaacccttctcattattttcagcttaatttcctcactagtcattaatggcaaaccaccaccttgcagcgatgctgctgctagtgtttctgtttctgacatcatcatctgctaggcccttgaatgatgaaaataactatttcagccttgcagccactgagccttctttgaacctcgcgcttcccagcgacagggtggtggtgccggaggagccagcaccccgacacgtgtcaggatgtggccacacgagggtcgccggaattctggcgttgccgggaacgagactcgccggagggaaatacgggccaatgatcctgaacatgcttccgaaggggccggttccaccatctggaccaagcaaaggaaccaacaaccttaacaactagtttttgttgaatgtttctgtatcgggatcgaacccagtccgtgtgaccaaactataagacaattatcatcggatcctgatacaacctcaacagctagtcattcatgattaatcaaagatagtggatacatcacatatacgtcaattgcagccgcaacccattcactcaccgccatctcgttcagtcgttgcttatttcaatttctttttaattccagagtttcttcttctttattattttgtttcttcaatttgtaaatattttttatttatgtcattctcatacagtgttgcaggattatactttttatgtatacaaagctggatgctctttcatactgtacatgtattcaggttttgctgcagtgcagtgttatgaaattaagaaattagaaagaaaaaaaccatcataaagtccattaattttttactaaaaa

SEQ ID NO: 18032 - DNA, 404 bp, Glycine max
  Clone ID: PAT_MRT3847_116287C.1
agacgttatcgtcaaaggacgcaactctggcgatcaagccaccaagctctttccatactcaacactagacgagctacactagcttaggccttgaatagctataatgcgtgaagcgccacttacagctgcattcactacactaaacgggttatcaattggctctggatgactaaataggggaacgctccattggcccaagccgcatcagacaaatgaatcgctttggctggacgatgtcctcgagatgcaaactcgactacacaattgagccgatactaccaaagcacggtgcagaatccgaacacgccggtgacctttatatatctcattcaaaccacgtagtgtgctaagagcgacaacagcactcggttctagcaagaacacctggggaattcttggctaaa

SEQ ID NO: 18033 - DNA, 257 bp, Glycine max
  Clone ID: PAT_MRT3847_116288C.1
gatagcccaggctctgggaacgcgaggcctaacaacccagactggggcacatttgaagaggtgtcaggaaatgtaagtccagggacaaggagagagtaccacacagaaaaactggtcacttctaaaggagataaagagctcaggactggtaaagagaaggtcacctctggtagcacaaccaccacgcgtcgttcatgctctaaaaccgttactaagactgttattggtcctgatggtcacaaagaagttaccaaaga

SEQ ID NO: 18034 - DNA, 543 bp, Glycine max
  Clone ID: PAT_MRT3847_116289C.1
ggatttccccacgaggatttcatcatgaaccctttggatccccaagaatttaggaggcaagggcacatgatcattgacttccttgctgattattaccagaatatagccaactatccagtgttgagtcaagtagaacctggttatcttagagaactcatgccatattttgcccctctcaaccctgaaccaattgaaaccatccttcaatatttgcagcaacacatagtccctggcattactcactggcaaagccctaattactttgcatactttccctccagtggtagcacagcagggtttctaggtgagatgctgagcacagggttcaacttggtagggttcaattgggtgtcttcaccagctgcaactgagctagaaagcactgtcatggactggctaggtcaggttctgaagctcccaaaggcttttctcttttcaggtagtggtggaggtgtgttgttaggtacaacttgtgaggccattttggtcacactagttgctgctagggataaagtacttggccaaattggtagagaaaatatt

SEQ ID NO: 18035 - DNA, 167 bp, Glycine max
  Clone ID: PAT_MRT3847_11628C.1
gttgctgcccatgggttttgactaaccccaaagacttggtgggacaacaagcctctggtttgatctggttgcgccccaaaactctaagttcccaggtaatgaattttttatggggaaaaaatttataggacttattcttccttcaaaaagatcgtgccctggggggg

SEQ ID NO: 18036 - DNA, 513 bp, Glycine max
  Clone ID: PAT_MRT3847_116290C.1
ccacgcgtccggtgaaacgagagggaccatagctggaggcaaggagttgtcttcctctgagaaggactttgtgtcgtgctgtgggagcactaacttcgcgaaggaaaaggctccagcctttcctttctgttcgttgcgggacgctggctctgttgccagacacgtttggatcaacggcgttgatgtgcacccgttgtgttagggccttttttttgcaccctctgattggacaaaggcacgctccctctgttggctatgaagccacagctcaatggtgtaagggataacagtctactgccttaacaactggtactgtttcgagcttacaggaactatatgaatggattgctccggacagggaaaagttagcgtttgtatttcttattagtgcagctgggagaaagcctgctgttatactagctgaactggaaatacgttatacagacaggccaagtgttgcatttgacattgccgctcggcagcaaatgaacattacagaacttcgccttgcgt

SEQ ID NO: 18037 - DNA, 1925 bp, Glycine max
  Clone ID: PAT_MRT3847_116291C.1
tatgttactgactttgtaaatggtgtacctatcttattgctctttcttgtcccattttctctcctgtgtaacgtctacaacatcacttcaactcttttaccttttgaaatcatcaaaatcttctatgtggtcacttcataagattttaatctcttgttgactttttatatctgcatttcaaatgatcttcagattgtaagccagtatgtatcttagttagtatgttagaacacccatgacccagccaacagttggtgcaattgactgagttcagtgagttgtccctttaaattgtgctcacagtggactatttaaagcctactgcctctcacattcttcatctatttaattggattaggaacgttttactaatattctttggtatcatttatagagagtgatgccatttatgcatcattacttctatcacaaataaaattatgatttcgttcctgatattttttaagagcattaattttttcccctatcaactttttgaggcaaatttcatttggtattcctttcttttcaactttgtgaggcagtacaccacttagtattttactttcagactgacatctgaattatgctaatgctatactaactggacatgttgcatgaatgtgtaaaacggccgccctttttattctctgctccgtgcaggatttcttgaggtgactgatccaattgggggctctcctttgggggccctgttcacccctgtggtcggccgtgtggcccccatggctgcctgggtggtctcgttcggaccctgcgcttgcgtcgatgacaggtttgcgttttgtttgttcttgctggctgtggacatgggtctgtttaccccgggaaaggctggtcttggtgcgcctgctggtcgctactctggaattggggtccccttcggtgcagctcctcagggtgtctggctgatcctagcgatgccggcttttgtgtgccgcgtctcccgtatggtgctccgtgctttggcagctgtgctgcttctcacggcccctcctttggcctccccaagtgcccttcaaaaggctgaggagctcctgagggagacacctgatgcttttatgcctcatcaatttgaaaatcctgcaaacccaaagattcactatgaaaccactggccctgagatatggacagattctggaggtaaagttgatgcccttgtagcaggtataggaactggtggtacaataacaggtgcagggaaattcctcaaggagagaaacccaaaaatcaaggtttatggagtggaaccagttgaaagtgcagtcttgagtggaggccagccaggagggcatctgattcagggaattggtgctggtattgttcctgctgtgctggatgtgaatctgcttgatgaaattcttcaggtatcaagtgaggaagctatagaaactgctaagctgttagccctgaaagaaggtttgctggtagggatttcatctggagcagcagcagcagcagcaattaaactgggaaagaggccagaaaatgctgacaaactcatcgttgtggtgttccctagttctggagagcgctacctctcttctccattgtttgagtccattagacaagaggcagaacagatgacatttgattagagaactgtcactagccctgtttctggttaagagattttgattcacttgtgagttttatttacgaaattcaagtaataaagaattgtgctgataactcatttttcatccgtactgtgtagaactgtaaagtagggactagctctgttcatatattggcacataggacatttcaaaatcatggctaagttggttgcatgaggtgatttcttattaatcaaaatatttgtcgcattagctaagtttacaaagagatcatgattatgtaatggtcctggttaaagtccttttgcttaaacaaattatgttgtc

SEQ ID NO: 18038 - DNA, 124 bp, Glycine max
  unsure (1)..(124): unsure at all n locations
  Clone ID: PAT_MRT3847_116292C.1
ttctttgacaaccaaaagtataacttagtgacaaaagcaatacgtatgtggtacttaaagataaaatacctgtnnaaatgagtcagaaaataatgtgctacaggaaaaacctattggacaacaa

SEQ ID NO: 18039 - DNA, 497 bp, Glycine max
  Clone ID: PAT_MRT3847_116293C.1
aaaaaaaaaaaaaaggcaaaaaactgtttcagggaaccagggggaatggccgggggaaattccctaaccttttttccgggggaaatttaatcctaaaaaacaaaaaccaaattaaaattttaaactgggcaaaaaatttatggcccctccaccaaggaagttaatttttccttaccccactgcctttggggtttccccccaaaggcggaaaacaccccctttttttggggttccccattgggggtcccaccccccccttaaattgcaaacccaaaatccatcccttggacaaccttgccaaacaccccattttttccattaaaccaaccggttttaattggggaaaaaaaaaactgggaccctttgaaatcgggccctgaattccccataaaaaccccccccgcgtgggaatgttttatcttaaaattctcataagaaaagggccccccaaaaaaaaattcgaatcccctaccatcaggagaaacaatttccccccc

SEQ ID NO: 18040 - DNA, 211 bp, Glycine max
  Clone ID: PAT_MRT3847_116294C.1
atcaaaacttattctctcagaataaaaagtagctctcatcattatccggatacggaggacacaggaatagaattgagaggggcagctataaggatccaacacagttgataaggcacttaaccaagagaaacaaatgctgagcaatatagaacaggaacctcctccaatcaacgtttcagattcctatgttcagaatgtgcattcaatatat

SEQ ID NO: 18041 - DNA, 233 bp, Glycine max
  Clone ID: PAT_MRT3847_116295C.1
accgaacaatctatattgaggggaaaaaaataagagtccgaggatcctggaaaatgtaacaatacataggtctgagaaggaaaaaaaagggtaactatatctcacataaacggagcatctttattttttttttaaacaaaaataaaacatgctttagttactccattaacaaaattgacatgaagagaccaccttaacatctgacaaaatttttgccaacaataatttttttg

SEQ ID NO: 18042 - DNA, 429 bp, Glycine max
  Clone ID: PAT_MRT3847_116296C.1
cgccggccggcccggcccggaattccggtcggacacacccgtccggttttggtttttaacggtggactttgcggtttttaatctttccgccatttccgatctttgcaatgtccttgataacatcttcctcaaccttttcctgagaatattgaaggctggaaggctgcctgagaaggttctgggccttttaatggcacctggtagggatgaagccttttaattggttcaggccctcattatccaccatttttggaccccggtgcttccaaccaggggttttggggcaaaataagactttaagttggtaggatggttgtgcccttggaggaggtctaaggcggtattcaccgtaattgaaggggtcattgtatttggggccctgatttctgtctctacacctttaatgaaggattggtggccaatattttc

SEQ ID NO: 18043 - DNA, 288 bp, Glycine max
  unsure (1)..(288): unsure at all n locations
  Clone ID: PAT_MRT3847_116297C.1
ggctcgagctcgagccgncaaaatcttccaatttttatctttgcacaaacacttccaaatattttgaacctttaaataaataacggtgaaatttccaaaattgccataatcaaccatatcttaacataataagtcagtaaccattttcgtgagctaatatccatattaatacagttacaaatttcaataacacactcattttggttatctaaattttatcccatcatcaataacaattgtattttttctatctattctctaacatccatattacttttaccctttttt

SEQ ID NO: 18044 - DNA, 943 bp, Glycine max
  Clone ID: PAT_MRT3847_116298C.1
aacctcaccacgccatcgccgttttccctcgacacaaccgaagcgctcttccatcgacacctccaacacctccaacactctcttgaacagcagcaatcatggccaactacctcgcctccatcttcggtaccgagcaggacaaggtcaattgctccttctactacaagattggcgcctgccgtcacggcgaccgctgctccagaaaacacgtcaagccgtcgtactcgcagactatcctgctgcccaacctctaccagaacccggcgtacgaccccaagaacaagatgaacccgcagcagatgcagatgcactttgatgcattttacgaggacatctggtgcgagctgtgccagtatggacttgctgaagagttggttgtttgcgacaacaacaatgaccatctcatcggcaatgtctacgtccgattcaagtacgaagaagacgcgcaaaaagcctgcgacgccctcaactcgcgctggtatgctggtcgtcccatctactgcgaactctcgcccgtgaccgatttccgcgaagcctgttgtcgtctgaacagtggcgaaggctgcgtccgcggcggcttctgcaactttattcatcgcaaggaaccaacggccgagctggacagagagctggacatgtgcacgcgcaagtggttgaaggagcgtggcagggacgcgaggagtatgtcaaggagtcctacaccgcctgcgacgaagaacaggttctagggtagatatagagtgggaagcgtgagacacgggctgaatacgaagggcgttttggtgttatacatgctcgcacagtttgggacatgttggttgatacctcgatatccgtagcgggcatggcgttgcaaattggcatttgtaaattagctttggtaaaatagtgaagtgtggataataggctagactaggctacgcaaaagcgatcatgtcagttc

SEQ ID NO: 18045 - DNA, 694 bp, Glycine max
  unsure (1)..(694): unsure at all n locations
  Clone ID: PAT_MRT3847_116299C.1
gcttaaaaagaaattttaccttttggtgattttaactattccacaatattttgtcttgagtttattatggtgataaagaattgtctatagggttttgccctttaacgggaataccaaacacttatgcagctatgtttatcaagttatgtgcttctggttgctgataaaaaaaaatgtgcttctggttattattttccatgttttgcctctatacagtatatgattatagccgttaagaattcttgattttgccatttcactgttgtgaaagtttcttctgtcacaaggaagctatacaattctggacaactgggtggtccgatcttgatttgagcaagcagcttgctcaataaatcatctgcagcactgattgagatcatttcttgtgttttttctcattaatctgtgcttattaatggaaaatgatgcagcagtttaagaggctgctataaaaataaaattgaattttacttttaagtcttaatataacttggtagcttttgttgtttcatattctgttactctctctctctctctctctctctctctctctctctctccgtgccttgattttttccatctgatttttatctagtgaagtaggaggtctgtgtaaaattaaaatttactttatttcttgtgcttatggagccaggctttttgatannnaaaactaaatatcagttcagtctga

SEQ ID NO: 18046 - DNA, 273 bp, Glycine max
  Clone ID: PAT_MRT3847_11629C.1
ccactcgtacgttctgttcgagatttctatttattgggacacaagcgagtttgttgatcgggataactagaaacagggcggtgaaaatgaaggtccttgttttcttcgttgctacaattttggtagcatggcaatgccatgcgtacgatatgttccctctacgaatgaacactgactatggtgcccgaactcctgaggtgaattgctcaagttgcaagcttgctagtgaatcacacagcatctttggctttgagaccatctcttgagagtgcg

SEQ ID NO: 18047 - DNA, 1782 bp, Glycine max
  Clone ID: PAT_MRT3847_1162C.1
tttccattcgtccgcccacgcgtccgctcactagttcagctgccgctattggcaacttcctcgtggttaccctccttctcgtcgccaggtggtcctccaaccccaacgtccgcaagatctccggggatgaagtagttcaacaatgtgctaagttagtagttcgacaatggcggagttagggtttcaggaacgaagctcgtggagaaagagagaaaaaaaggctaaagttcaagatgatgaagatagggatgctgatattcaagaacccgtggagttggattctgccagaaactctttctctttagccctcaaagaatgtcaagacaagagatcaaaatttgaagccttgttgaagaaggctgcttctttggatctgaacaatgactttggctctggctcatcgcggcgccttcaaacattgaaaaaaagttccatttcttctcgaaggtctgggtactgccactttccctattcctggtacacccaattttcacattgcaatgtacaagggatggagctccgagcaagttcccttgtatgcaggtgctacccagaagcacgtttttccgttcaacaatgggaaaacattgccgtcaaagtgggaagatgctgagaggtggattatcagccctgtttcggcagatacagagtcagtcatcatcaatgcccctccaagaggacaagtttggtgggttcaaagacgttggcaccaatgtgtcccgtgctgctttaaggagggacatggtgacccagatgatcccacagggtagctcatgctcctctcctaatctgaggccttctttctctgcctccaccctatcaaccttgcctgtcacagaattgcagactgttggttcctctattagggatatgcaggtagatgaacacgttactgtgacaagatggtccaagaaacatagggccctattcactggaagaggctcagagcaagccaaagttggaaaaaaggagaactaagtactcaatcgtcaacttgggatgtttctgaaacgtcaaagcctgcctcaaagacaagaggtgaggaacccaaaatctctgcatgggagaacttgcaaaaggcaaaagcggaagcagcaatacggaagctagagttgatttaagttactgagacaaaagcaatggtgactgagatgaaacgtcgattttgattagagtatgatacggagaatatctaaggtgcaggctgtattattactcttgggagcacaagaaatgacaaatagtgcccccacctgacttttttttgcagcaaaactatcatgacattatagtatttctttaggaattgcttttctctttgatatattttatcaataattgctattttgacatattattaagtgttctaaaacttgttattgtatgccaggaaataaatgatcattccaaagttcaaagatttcacgaagatttgcatcacttgttaggtttcttgaaaaacgaaaagagagatgttttgagaagaaaatttgtgtcaacctgaagattattaatagcatgcactgtctttctgctcagagaaaagctcaggaaatgagaagttcagttccacacaaccaaactgatcgggttgtaagaacttcacacaaggcttcatgatttcttagaaccagccagatgcgttctttgagtggttgtttgacttgccatgccttttaagcattctttcatgtttgagtgatgtttggattgtccaatacttatttgttatattgaactgtccttttctattatgaagcttccacctaatatgtttcctgg

SEQ ID NO: 18048 - DNA, 817 bp, Glycine max
  Clone ID: PAT_MRT3847_116300C.1
gctctttttcggctcgagtgcaaacgctctttcttacaaaataaaactgtcaacttcaattttttcttcaaaagcttcctctgtgggggaatttattgttccttgcaatatagataggaaacaccaccatagtttttgtgtaacttaaacgtagaaaatattatcaagttgttgcacaaatcattatgggtactctcatgcttctcaagaagttcaccctcctctttctcctcatttctggatcacttttatcaacttcctttgcaggtagagtacgatccaactctatcaagaacttcgctaaagatgtgaatgcaatcgaagagggaacaccaaggaaaccactgaataaggaagaagtaagaaccatccatgagaggcttcttagggctaacacaaaagattatggacgatatgatccatccccatctctttcaaagcctcctttcaagctcatacccaattaacgtaacgttcaatatgtgaatctgggaagttggtattggcataaagtaccataaataatcggctgtttatcttaatcttgtaatatagtatgtcaaatatagaaaaagaaatacgggccatgtttggaaccctaataagttagtagcataattatatagatattagaagatgtacgtgtgttttacaaattactgctagttcaagttttgttgtatgagtccatatacatatatacttggtattgtgttatgtagatatgatcctgatcatcagtgtaatactatgaataaagtaattaattaatgagataacgtatatatgttgtcttcaaaaaaaaaaaaagcatgta

SEQ ID NO: 18049 - DNA, 1440 bp, Glycine max
  Clone ID: PAT_MRT3847_116301C.1
ccacgcgtcctcgagccgaatcggcttaaagaaagagtgaccgagagcgatccgagagagagagagagagagagagcccgatcttcctctatcgatctctgctctttcctcccccctttcaagattcgttgcattttctcatttctcgcgaattccgaaatcgcgttccgttggctctcgattcccacgctcctcgttcacgattattcgttgcattttaccatttctcgagaattccatcaacgaaatcgcgttccgttggctctcgattcccacgctccacgttcacgattttgattgagatgaaacttgaaagggcttgatagtcaacaagggaagagaaaatgctgatgcccaggttcatgggaaagtgcttctgttttgggcaatggctgcaatgattactgcctctgcattgtaaatttgctcatctttcatgatgtggagttttgcatcaaatgcccttacaagcattagattgaaaataggctccaaacagccaagtcttcttcatagtgaataccgtgccctaggtctcgtcttatggcccagcagagaggaagggctggaatgcccaatatgttgggaatctttcaacatagttgagaatgtgccctacgtcttatggtgtggccacaccctctgtaaaaattgcatcctaggactgcaatgggcagtggtgaaatttcctactcagcaaatcaagattccattcttcatttcttgtccatggtgccacctgttatcattccggatcatttacaaggggaatcttaaatatccttgcaagaacttcttccttctctggatggttgagagcctgaatggtgataggcataaagtcttttccacttgcacagacaaccaaccaatctggtctcccaagtgcaaccttctgggaagccaagttactaattgtaacctaagaagggcctcagtaagtccttttcctagattgctgggatctaaaggtgatgttcgtgacaatgatggttcaacacaccactttcttaatcctaaattgcgctgttattttagttctacactttctagtcactattctttttgctatatcatcatttctcgtattgtactttgcataccctacgatccagaggctggtaagagaaataacatcttaagatatagccttcagcagactgtttctctggattgattgtcgtactctggtaatttctgtttgttacttttaggtttttatattcttatggctctatagcttttgcaatttttgtatcaactttaagtttcatcttgagaggaactttattttttggcagttgtatttttattcttaatttcctttttctgaagtgggtaattaaatattttgtacaaagaacaaggttcacttgccgaaaagtacatgtattcgaatgactatggttatgtgatacttatagaaaatgtttaatgcaa

SEQ ID NO: 18050 - DNA, 758 bp, Glycine max
  Clone ID: PAT_MRT3847_116302C.1
atcgttccggatcatttgcaagggcaatcttaatatcccttgcaagactttcttccttctctggatggtcgagagcctgaatggtgataggaataagctcgtttccacttgcacggacaaccaaccaatttggtctcccaagtgcaaccttctgggaagtcaagttactaattgtaacctaagaagggcctcagtaagtccttgttctagactgttgggatctaaccacgacgttggtgtcaatgatggagaaacacaccacttttcccttcataaatctctggatttcttccttcactttacatccaagttcccattggtcgtcattttccttctgattgcccttttcttaattccctgctgtgctgttattttagtcctatactttctagtcactattctttttgctataccatcatttctcgtattgtactttgcataccctacgatccagaggctggtaagagaaataacatcttaagatatagccttcagcagactgtttctctggattgattgtcgtactctggtaatttctgtttgttacttttaggtttttatattcttatggctctatagcttttgcaatttttgtatcaactttaagtttcatcttgagaggaactttattttttggcagttgtatttttattcttaatttcctttttctgaagtgggtaattaaatattttgtacaaagaacaaggttcacttgccgaaaagtacatgtattcgaatgactatggttatgtgataaa

SEQ ID NO: 18051 - DNA, 308 bp, Glycine max
  Clone ID: PAT_MRT3847_116303C.1
cactctttcgattactacaaataaaaaaaaataacaaaatagagagaaagggatataattacagtggctccaattacgtacggtttcttttgaaactgtataaaattattaaggtggcttttgaataaaaattcttcaaatattcataacaaaatttagagatttaattttgcttggtcagaagatgatgtccgtttataatttgtcatttaaatgttagagaggaatcaaaattggcgatgaataaggtgagagggaagggaagggagcgggaataatggttggtgtgtgtttgagaatgaaaggag

SEQ ID NO: 18052 - DNA, 661 bp, Glycine max
  Clone ID: PAT_MRT3847_116304C.1
gttggtgtggcatcttctccaagaatcccaaactcctcctgacacaagaattttgacacctcactgagtttctcaatttcaattgagcagccttaatcgcaggagcgcgacaattctgaataaatatgctggtttcgggtgctattagcgacgttttggtggtgcttccaccttcggcatctctcagacttccggaatttcgccatttgcatgctttcacagtttctgacgccaagggttttctgtctgggggatttcttaaaagctgtccttcatcttacaatcccaagcactacaatgaactctacaatttccgagctagaggcttagttgcaagagcatctgctgatccaagggataatttggtgccatttgctcccctccaatttgagtcaccagttggtcagcttttggaacaaatctcaaatacccatccgcatctactaccagcagccattgatcaacaactagagaatcttcaaactgctagagatgctcagaatgaatcttctgattcatctcttgattccctttacaagaggatagcggaagtcaaagagaaagaaaagcgaacaacattggaagagatattgtactgctcaattgtacataaatttttagagaacaatatttcaatgatcccaaaaatatcagcaacatc

SEQ ID NO: 18053 - DNA, 348 bp, Glycine max
  Clone ID: PAT_MRT3847_116305C.1
aaacttttatatctataacttttcatgtctccaccaaaaacctaactgaggccatatgggtctatcacttttccaacaatccaaatccaaaaccctacctacaccacactcaatctaaattcttcattctcttctcatatatagctcataagcctattatctacccgatctcgacccgtacaacagtgattctctcacattacaccaaattcaccgtactacttaactccatctcctaccagtaccttcacaaactccctatcaccaacaacaatttcacctacaatttctactcacactccttcaattacctcttctacaatttctacacataatttcatgttgcat

SEQ ID NO: 18054 - DNA, 281 bp, Glycine max
  Clone ID: PAT_MRT3847_116306C.1
attcttggcaggatggcttctcatcgtctgctcctcctctgccttgctggactggtatgtgtgtctgaggctgagccctacgggcaccggtgaatccaagtgtcctctgatggtcaaagttctagatgctgtccgaggcagtcctgccatcaatgtggccgtgcatgtgttcagaaaggctgctgatgacacctgggagccatttgcctctgggaaaaccagtgagtctggagagctgcatgggctcacaactgaggaggaatttgtagaagggatataca

SEQ ID NO: 18055 - DNA, 244 bp, Glycine max
  Clone ID: PAT_MRT3847_116307C.1
ctgcggccgccacagacttgcaaggttaagaaggaaacacatggagaagcccaacattaaagggcctgaacacagttgcttcaaatggggaaaaggctctgctaggaactctggtacatcaaccatatgtctagctctcatgttgaagctggaggatatgctttcaatacactctgagagatccttacaagaaagcgcggaactgatccatatcatactgataccggagctggttagggaaaag

SEQ ID NO: 18056 - DNA, 205 bp, Glycine max
  Clone ID: PAT_MRT3847_116308C.1
gggggggtgtacacgggaagaagagaaaaaacccaccgtcaaattgcgtgaatgacgctctcactcgagaccacgacaaaacttttccttttcgttgaaatgaaaaccgcttcatcgatatttcctactatacgcgtcaatgcgtgtgtaaccgacacgtcactaaacgtctcactcaatgcatccggaaaatgctattaatacc

SEQ ID NO: 18057 - DNA, 2149 bp, Glycine max
  Clone ID: PAT_MRT3847_116309C.1
aattggaaacaaatcaatagaatatattttctatataggcattaggacactttctattaagattctcgatcaatccaggtaaaaaatactaatacaagataactacaacagcaccagttacattcgagaaactatacaagtccaacaactgcattgtctcccttgctgtgtttacctgactttccgattaaacaacccctttggaaaagtatgggatgatggctcattagtatagcatcaaagcttagttaacatttaagtcggggaagcacatacatgactgttatctgggcctgtttctgcctcatttcccaagctcaagacctcctttacttaaaggaatacatctttgcatatatcgctgtggcatgcttgcaaaatctacttacaatcttatttgtgaactggtccgttgcagacccaaaaaaatacagcaataatagcccgtaaaagcaaatttaatcctctttttcataccatcatgagtgagaaagaaggtcactttcaccaggcaaaagaatcttgatgcccatgacatgagtatcctcttaccatcgagaatatgaatgtccatgggtcttccaatgatcccgtccatttcgtctgttagaagttctgtcagagggagatttgtaactatcaaagccaaacggtcttccacacccataaggatttgaagatctactgcttgccccacctctgttacataatttagaagcttcccttatctcctcttccaaatcatactctgagcgataaggctgggtctgaaagcacggcatacgcttctccaatcattttgaaaagcttatcagcatccttgtacacctcctgtgaaatttccttccaaagttggccttcatctccaacttcacttctagccaacaacattctaaccttgtctggatgatgtctgagagctgccttgtggtatgccttcttgatatctgttgctgtatcagctgatttgattcctctgatattgacattgtaagaggttgggtctttaataaccttacggttctgaatgaggtaaggcacattgcagagtgtgtgaaattgagagagatgttgaataacaagaaaatagaagatgagaaaacatcttctagctatctttatcttttggtttttggcatagaaccggatttcaaacttagtagattttgagtaagaaattgattgtttgtaagtatgaaattgctatggaaaacagtttttcaaaccaaaaatgagaatgaaatcaaggtttttaatgcttctactcaaagggaacaaaaaatagcgtccctgaaacccagtgaaaaggtttccttataatgtataatttttttcctcataatacaatttcgtttgagttatccacttacactggaaaaaaatttaggacaggtaactccccaattgaataaagaacttacaaaatgaggtaaacatccaagggtgctccctttttggcttgatcttccactgaaagcagacgttgatgagcttgccttaattctttcacagcattagatccactgggcgagtcagattgtttggctctttcattggattgagtttcaagaacagctataagtctcttgaggtcacaagctgcttgttcataatctctaaccatctcatgcaaggtggctcttcttgaaattgcctttgcataatttccatcaagggcaatagccacactgcagtccgcaatggccagccgcgtggcccaaagcttgatgagctgcagcacggttgcagaaacaaatcgccataaaaggacgtgattttatattgcatgataaagcagaagtgtaattctctacagcttccatatactttcccgatttaaagttttcatttccttctctcttgtccttcagaagttacagtattgtagaagctaatgtcagcaagtcttcaatgttattggcaacacgcttgtcagtgatacacgcatcctgctgtaatttctcaagatcattaactgatgcttcaagccttagcaaccaaaagtaacacttgattttctatgacctcctcctctattttcccttacgatcttcgcataagtacctatcagtcatatctatgtacttgtttaccatccgaaacaggtttctgcaatatacctgactctgtacacataagttcatccgtc

SEQ ID NO: 18058 - DNA, 404 bp, Glycine max
  Clone ID: PAT_MRT3847_11630C.1
cttgcatggcgctgttggtactgttgccggtggctatggaggtggcggaggaagctgcgagaggtggatttagatcagggagttttgtttgcatctacctccctgttccttctactatgtagaacctgcaagatcaatacaaaaacagaaaacacagcagagcatcaagcatggatctacaccatgaggttatgtggatcagcaatgtgcctacatacatgagaaatgacggctcatcagcatcacattgatcatgaaacattacaagtgtaattcaagcagtaactagtctttatctctcttggcaaaaccttccttaatcttctagggttctttctgttgaactcttttttatctagttctttttacagaaaaaaatctctgaatgagtaaaatggtcaaat

SEQ ID NO: 18059 - DNA, 403 bp, Glycine max
  Clone ID: PAT_MRT3847_116310C.1
gagctcactttttggcggccgcccttctttttttttttttttgttttttgcttttttgatttatgaacgcaaattctttcttaacaccaataaaaggcaccttgacacaaaaagtagatgagcttcatccacaaactacaagccgctttgggaaggcatacataaatctttatcattgagaagcggtgaaaagggcaccaaaaggttggttgaatgaacacgtggataccggaaaggcgaccaagtaaacccgtccacggggccttcaatgagcctgcacacacgagccagggaagccatagggcacccttgcaggcagaacaaccgcggcctccaacgtaaacccaagtgcgtgcagaatctgcaacttggcctgccccactgttaccaaatgcacaaaagc

SEQ ID NO: 18060 - DNA, 344 bp, Glycine max
  Clone ID: PAT_MRT3847_116311C.1
tccgggacctggtctctcttttctcttttctctcatccaatcttgaaaagggggaaaacacaatggcacgagcgctcccactccaccgaaagttcggtacatggcgaactgcggacaggccgagcgctacagagatgtggattcatggaaagtctcgctccgcgaagcgaggagctcccgggacgacgcacctcctctcagccctacagaactaatcggcctcgccgcgcctctggagcatcatctcatcatgagcacaagaggagagcccggcaacgatgaccaatcggcgtcaccggactaccggccaagatcgagccgactctacacatttgcacggaatc

SEQ ID NO: 18061 - DNA, 515 bp, Glycine max
  Clone ID: PAT_MRT3847_116312C.1
gcacgaggacttttcgatggggaaaaaggaatggggtttgtaatggcaactagggggtcctagaggccttcttttttcctttggagtttagatggagttggttaggttcataatgtggttcctcatggtttatggaacatgcataaatgctttcttctatgttttagaatgtctttgaagagattgtggctaaaagtttgtattctttatttttttctcagatgtttaggaatgatttccttgaagacaagctaaaacctttcctcaaatcagatcttgaaccatgaagacaaactctaaaagctgagttcagatcacatcaatggcaaggagctataaaactttcttcctttatttactgcagttaaactctgcgatcaatggatttaagtgtttggttgagttattctgttaattctaattaaacacattttgtaagttttggattattcaagggatgtgaagtctttatgcagcaaaaagactccaaaatgagtttggcaactgggttgcta

SEQ ID NO: 18062 - DNA, 350 bp, Glycine max
  Clone ID: PAT_MRT3847_116313C.1
aaaaaaaaatacatatatcataaattggggggatgaattctcactgataccgaaacaaataacccctttcaagttattattgctaaactaaaagtaaacaagtacttatttcataaatctaacttaactgtctatacaatattcgaaatcccgaactaagaatcatatatttgcattcacttaacgtagccttgacaccccaatccactaacaatattttttttatattatcattattatcatcatcatcaacatgcctggcttgtaaattaaaagggatttgaccaaactatctaaggacgtgcgcaatgaaatcatccagttccgtgcgagaaacaccccctttatcc

SEQ ID NO: 18063 - DNA, 364 bp, Glycine max
  Clone ID: PAT_MRT3847_116314C.1
agaaaatgtccaatcatctgacttgaacactggaggttctcatgttcttagtcatgtgtctccaccaaagtcatcaagcttctttgcagactttggaatggatggtggctttccaaagaaatctgggccaagttcctccaaagtgcaagtaagccatatgcttgcaactttggtctctgcaatgttatctcttatgcatccagttagcatacaggattaagttatatataaatatctagtctacattcacttcaacatttttttacatcatacagatccatggaacaaaacatggtcaacattgggagaaagtgttttcaagtgttttgtaaaaaataaatgctagcatacacatagaatgata

SEQ ID NO: 18064 - DNA, 501 bp, Glycine max
  Clone ID: PAT_MRT3847_116315C.1
ctgagttacttctcctgatccatgttcggacgactgaatcaggttgccagacacttgtctcgtccaatacccaactttgcgcatcgttccgccgtttcgttccgcccatcgataacgtcatcagtcatggcttcgacacagcaaaagagcctgatccacacggcaggttgtttggttatcggtgacgaagtccttggaggcaagacagtcgatacgaactcggcgtactttgccaaattctgcttctcattgggcatcaacttgcgccgcatcgaagtcattgcagatgatgaaggcgagattgtagaagccgtgcaacgcatgtccaagaactacgacatggtggtgacgagtggcggaattggtcctactcacgacgacatcacttaccagtcaatagccaaggcctttggcctcccgttgaagttacacgatgcggcgtttgaacgtatgaagcgcctctcgaagccgcacaagtctcagccaaactttgactggaac

SEQ ID NO: 18065 - DNA, 109 bp, Glycine max
  Clone ID: PAT_MRT3847_116316C.1
ccgttgttctcgatcgcagccagccgtacagccagacgggcaacctcaacgagcggcacttgacttcgacaaccacccagtggctggcgactgccaagagggcgatgct

SEQ ID NO: 18066 - DNA, 481 bp, Glycine max
  Clone ID: PAT_MRT3847_116317C.1
ggcagaatataaattaggaagtattttaatagacaaaaataaaattacattgattatatatatttttgttggttttaaaggaaaattaagattcaatgatatctttcaactatacggaagagttgaaaataaagcatttgggcatgtactttgacaagaaagtaagtgataaaatatatgtttatttctttagttttttttttacaaatattcaatagaattagttatatttttaggagggaaaatttgaaaaactatagaatatttggaaggacgggtacttacttgaaataatttgcccaattaacaaggctagatcaaatttgttactaacaatcttcatattatatcattttcaatcaatcaactatatttttaattttctttagcataggttcactagataaaaatttatttgattggacgagattctactatgtcaacaaataaaactcaactttaaaaatggtaaaaacagaat

SEQ ID NO: 18067 - DNA, 412 bp, Glycine max
  Clone ID: PAT_MRT3847_116318C.1
cccgggtgcgtacccatcgcgttccgaaaaataatacaaaatgaattatgggaagaagggtattatagaacccaggtattttaaaggagataaaagaccatcgaggtgaaactctttgtgttgtgcgagcattgttgtaagcgcttgggtcacatgcgaaacgaataaccttccagccgaaatatattgaataattatctagacaactcaatcttgcaatctgctgacatgggaaaaactcatctggaaacatctagctttgtggatccctcgtaatctcttcccagcataaagcttccctacaaacattatagtgtctaagagcgcatcaaatgttgctcctgttgacaattcaacaaatattgcattgaacttcaaatgcagcttcacagagaaatcttctgattaacct

SEQ ID NO: 18068 - DNA, 287 bp, Glycine max
  unsure (1)..(287): unsure at all n locations
  Clone ID: PAT_MRT3847_116319C.1
ttcaaaccttgctctatactacacagtacacacactagaagaataatggcttccatcctccactactttttagccctctctctttcttgcctcttgtcttttcttcttatccgactcagtcacccctacaaaaccaataaaccttgttgttctacccgttcaaaatgatggttccacagggctccattggtcccaacctccaaaaaagaacccctctaatggcaagtaccagtcctgggggcctctatggggaaatnanntgtgggtgaactgtgagcagcagtant

SEQ ID NO: 18069 - DNA, 339 bp, Glycine max
  Clone ID: PAT_MRT3847_11631C.1
ggggaaccaaattaaacgtaacatttttttggttgaaaaaggattttttttccaaaacgttttttttttaaaacttttttgggcttgcttttaaatccccaattttgcaacattttaaaattaggcggccaaaacccttttttccccgggattaaaaaaataggggaggggtttgggacattttgggcttttttgcaaactaaaaaggcccgtttttgatttttggctttttaaggaagccgctccttttttttggctttggttaaaaaaaaaattttaagggtttggggggttttggtggttcaaaaggtttttttttttttttagcagaagttttag

SEQ ID NO: 18070 - DNA, 549 bp, Glycine max
  unsure (1)..(549): unsure at all n locations
  Clone ID: PAT_MRT3847_116320C.1
cccgcgtccgcaagagattccccttcctctgaatttctcttgaatcgggatcttttggctcaactttctccgagttttgccgagggagcaactccactttttcaccttgaattggtcaaaatacgcagaatttcttactttttcgtggaggattagatccagtaactggaggtctatggctgaccgatattatacaccatcatttagctattgcaattcttttcttgatagcgggtcacatgtataggactaactggggtattggtcacagtataaaagacattttagaggcacataaaggtccatttacgggccagggtcataaaggtctatatgagatcctaacaacgtcatggcatgctcaattatctattaacctagctatgttaggttctttgaccattgttgtagctcaccatatgtattctatgcccccttatccatacctagctactgactatggtacacaactgtcattgtttacacatcatatgtggattgnngnggatttctcataantcggtgctgctgcgcatgcagctattttta

SEQ ID NO: 18071 - DNA, 139 bp, Glycine max
  Clone ID: PAT_MRT3847_116321C.1
ttttctataaagaaaaaacaggctgggcttaaacgccaccaggcctgcgcatgttttaacaaccctagcataaatccactctacatgcaattgaacggaccaaactcttagaataggtccaacatgggacaaaagcaga

SEQ ID NO: 18072 - DNA, 2129 bp, Glycine max
  unsure (1)..(2129): unsure at all n locations
  Clone ID: PAT_MRT3847_116322C.1
gtagtagagcactgaattggatatgtgtctatcacctaatctaagtcatcgtttggtgttggttttgtccgggggcaaagagagaagaaacaaacctggttcttcttaccattttggatcatcctccccgcgaacgtcttaccgaaattctccccccgttaccggtcagatccctacttagaatccggtcaacctcccaattcttgcagtccctaaatcaccaccaagaacttaaccgggctccacctaccagattccttaaccttggccccaaaccgcgccttcttcttcctttggacttcgatctatacctaaccaattttccaaccccataccccaccggtgccccttaccttcctcaaagtgtctaacgtaaccgaaaaatcctacaaggtgtcatcactcgacgtgtcgggttaagctaagttcgccaaaaacatcctctttcggatcgcttcctccggcaaccgccttttgtttctttactccccggtccgcatcagcctttgcccgaaatcgctgatcatgaccgcggtcaccgtcgcctttgttccggtttagaaaagtctgaatccaagcatggtttgtttgtcatttttcttcaccctcgatgacggtccttaaaaggctggggtcaagtctgctacattcggcgcaaaccctggcagaaaaatccccacctaccatacaaacgcttctttgctctcataatatcagtctctaagtggtaatatcccgtcacggacgtgactcgcgcaatcgaaaactatagaagccgactcgggtcagcggtagagatctgacaagacatgttttgcgggcgctcccgtgttgggacagcggctgtctcgggcgtgtttgagataacgctcttgccgtgtttggtttttccctcaatctgtctgcgtactgacaaaagtcgagaatcggcttgtgtgcggagtggggataatgccgtagacactgtttgtaaaaggtgtacacgctagaggagtcgtgtgatatgatcttgttaaaatgcgtgaggccgttgggccacgcgagagatgggcacaatgctctggtaaaacaagaggggaagagggttttgttatgacctggaaaagaaagaggttgcccttgttaaaattcagggtttgcctaatttaaatgaagccatgatttgtttgggaacacctcgtaccaccatacttcttacctcgtcaaatttgtaggaagccgcgtgctttaggatgcgaacgtcccaggaagacgagggatgacttcctgtcgcagggtttcaaattgacattatgaggaagtctaagaagaagaagcaatggtacatgggggtagctgaaactggctcggcgggtttgttttgcagttgattcaagccaaagggaggttgaggaaaagtaagaaaatgttgcttccgttacaatgactgtaatgtatagttaaattaatactatcagctacatattttactttgggatgtgtgccacgtttgacgaactctgaaacaaacatgctcttattggttacttgctgagttatctgactctgatgatgaaattcgtggccctggttcacaggacgagttaaattgatcaagagcaggaacagagacaccgttttgcctgttaagatataagactctttccttgtacagtttttgcaccttttgttttcttagcgatttaggggcgaacaaagccccccaccaaagtgaaagaaagggctgcagacctgccattcagaatgttgaagaaggaaacaatgactgaagaacagataccaaatatacaaatgctgctttcctcacttattaacagtctccaattactaagatcccgtaagacactcgctttccgcaatagaaaaaaaatggcctatatggttttgtctaagcttggattgcctcagtggtttggttgtaaagaagtgtcatgtatgtacgtgtgttaatctggttgtaccagcaaactgtaattaaatttttgcagttaacttgacatgaaatattgttgtttttgtttattggtaggtggactttgcaaattgaatgcggaaaggttgacaatttacattaacgaaggatttgcccctnnnnnnnnnnnnnnnnnnnnnnnnnnnnnnnnnnnnnn

SEQ ID NO: 18073 - DNA, 248 bp, Glycine max
  Clone ID: PAT_MRT3847_116323C.1
ctgatgttttcgaatatgtcgagcgagcaaacggtacactcgagaggtatataccatggtctttcagtgttcccatcgtctttgaaaggcttgactgccattattaagggagcaaacggaatatctggaaactacatgctgcgggtattggtcgcaagatcccgaacgatggagcaagatttatgcttatcgaggcgtccttgggcgatcccaaatggtctgtccaagaacgccgagcatatgcttgg

SEQ ID NO: 18074 - DNA, 590 bp, Glycine max
  unsure (1)..(590): unsure at all n locations
  Clone ID: PAT_MRT3847_116324C.1
ctgtgcaccaataaggtagatagaaagggccagggtctatcgactgactgatacaacataaaccacttggcacgtgtcacagtggcgtacagtccaatctaattctaatgcttattcacaggctgggcgcgcggagcccaacccaacggatgcctagataccggagccaaaacaacttaaagccgcttagactcctggtaaagcctacgggaacgcagacaagctcgcgggtgtttaaaaggctactaagccggtaactaagccagtagcacagaaaccaagtgctgcaactgaaggtcgggcacaaatagtatcacaccaaacagacgggcacgcttaaaaatataaaaggaaagctgcctggcttacaacaacacaagcacaaagtgcagtaccggttaacttttgtgctgttatacttagtgcagtaccggatgcaaaactagcgtatttagctatacctgcagcagatgcaacntgcagctacgccgcgcaatgggagctgtgaagtcgataagagatacgtcttgaaggttgtgaccaagtacacttactgtatgggggtatttacaacgtggcagtagcagcag

SEQ ID NO: 18075 - DNA, 489 bp, Glycine max
  Clone ID: PAT_MRT3847_116325C.1
tcgattccgattccaaggaagcgtttcccgtcatcactgtatgacgtcctccttctttggggggggggggggggggggaattatgggggattagagagagagacacacgacacaagatcaacgtatatgcgagtatacccagcagcatgtgtgggaacgacccgaactacagtggagtacgatatagaccgacccgcgaaaggtgactgtgactaagtgactgacacaaccgacgatggctataatatatactatagcagaagtgaggggagatataagtgtaggtgtaccccgtgtaacagctagccatgaaggacctaataacgggcctgtgcagacctacgcgttataccagaaaggcccagatttagaaaagcccttgcgtggttacccaaaccataaatacccggagggttaccagtaatgtttagaacggcagcaactagggcagcaggtaggttacacgagggcacgcctaaagactaacgc

SEQ ID NO: 18076 - DNA, 250 bp, Glycine max
  Clone ID: PAT_MRT3847_116326C.1
ctcgagccaaatcacctcgagtacggttgcgagaagacgacagaaggggatggttggaagaaaaaggtcacaggaccaaaactccatgtacgggggcattgcaacattgttttgcgccattcacaactcacaaagaagaaccaaatgcaaactagcacaatgaatgattgaccagttggacaaattcttttctttattttatctcttattaaagaaagaagctaagcctattgcacaaaatcaccaccgt

SEQ ID NO: 18077 - DNA, 632 bp, Glycine max
  unsure (1)..(632): unsure at all n locations
  Clone ID: PAT_MRT3847_116327C.1
taacgcgtccgtacggctgcgagaagacgacagtctggggcccactcccagaatctactcttctgttctttggatgggtttccttcttcaccctcttccctgaaaccacataaccccatggccatggcactcgacgcggcactctggatcgtgaagatgacgtggattgctctcagtggctggatttcttcttgtttaattgttgctgacgaatttgcctcttctctacgctctggcgatattggcccctttcatgtaggttgatccaattacgctctctttcgtccaagatgggtactttacttattgggtatgctgcaagttttgtaattttatattgcccttcaaaataggcttgatttgatgtagtgggtatgaaccaaaatctctctcttttttctttttttataagtctggcttgtgtgtttttgagctggggtgaagtggttggtcatggcttgccttttttgggttggaggaagatgtgtttgttgagtgagattcattgtatttcctttaattgaggaactgtgtttaaggttgtttgttgttgtatagcttgtggattgctttgtagcatactttgtttagggatgatagatgaatttgaatgctaagtctanntcnntcaa

SEQ ID NO: 18078 - DNA, 3402 bp, Glycine max
  Clone ID: PAT_MRT3847_116328C.1
tttttgaatttttttttaccgttcttggtggtatcaacacggcactgtgtcgggatatcttatccatttctccgggaaaatagatatccccggaaaatatttttaattcaatctttttttttttcttctccaatcggaccaatccccttactcgacttcttatatttaaagtgattagtgtatctacttcaacgatactattgttccgtaccattatggaagaagattctggtaaaatatgcacttcctcgggaatgaaaaaaaattgatctactttaatttggtattttgtcttaaattctttaactccttgatactcaattaaaaaatcctcttttttaaaaatggaatttatacctatagtcctatatttagtaattcccgagctctgtgttcggtattgaggatcatcgaaataagcaagaatgctatttctacgaaaaataccattgattggtatttcaatcgagatactggaagctaacattagctctttgtctcgttcttgaatcgattggaattgaaatggaataattaatctatttctccgcctctttgctaataaatccgtagtatcatggaaaatagtaggatgtgtaaaatgacaatgatctatagatatgatttgattaaatattgaataatctgaaatccttctttcttttttatcagaaggattgaaacgaaacaatttatgtcttactttttttttacttgctaaaaggttacaaaaatctctttctccagtagaaagataatgaatgttcatttgatcttgatcttttcggattgaaaaagagactgaaccggacctgtatgattttcctgataaaatccataaatgacttgtttttggtaagatatggacattactatatctaaattctgatgcatggtacacatcggtactccaatgcatttctccttctaagtcagaatagacatgttttcgaactttttcttttaaattaaaagtgtatgttcctgcgcgaatctcggcaattacttgttctgattttacatattgattgttttgaactaatagaaaactttttggtggaatagtcacattatgtataatatcaccactttcaatagtaacatacaaatctatataacatagaaaagcaggatgcccatgacgtgtacgtgtaggatgaaccaaatcttcattgaattgaatttttccattataaggtgctcgcacctgttctgcagtacctccagtgaagactccgccagtatgaaaagttcttaatgttagttgagtgcccggttctccaatggattggcccgcaataatacctacagcttctcctaattccaccaagtgaccatgagtaggactttggccataacacaatcgacagatccaagatgtattcctacaggtaaagggagttcggatagatattggttgggtttgaagggttttaaatcgattgataagtccaattccaatatcttgatttctaacggcaatgcatcgtgaacctctgtatatatcgtctgctaatacacgaccaattaatgtttgtatccatattctttccggcatcattccattctgggtattcaccgaaattccttgaatggtaccacaatccgttcgacgtacaacaatgtgttgaaccacttcaacaagtctgcgtgtaagatatccagcatctgatgttcgtacagcagtatctacaacccctttacgagctccgtagcaagaaattatatattctgttaaagaaagcccttcgcgcaaattgctttgaataggtaaatcaatcatttgtccttgtggatccgacattaatcctctcatacccactaattggtgtacttgagacgcatttcctctagctcccgaaaaggacattatatggactggattaaaggggtcggtcatcctaaaattaggattcatttcttgtcgaaaatattcacttgtagcataccatatctcaatggattggcgtaatttttttactgcatgtacattcccataatgatgatgttgttccaaaataaaactttgttgttcagcatcttggactagccatcctttagaaggtattgttaaaaggtcatcaattcctaatgaaatggatgtatccgtagcttgacggaatcccagagtctttacttgatccaggatatgtgatgtatatgccattccaaagtgatctattaatctgctaataagtcgtttaatggcagttccacctatcactttattgtgaaagactagattggcccgttctgccataagtacctccatattccactcagtgggattcggttcaacaatgggtttgagtcaatgattggaaaactgccttttctttatcttgatttgcgtagaaattgaaaaactatgattttcgttaaaccatgaagacctgaatttacatcggtatcataaattttcttatcttagataccaaccatctatatgatctatatgattagatatcatatgattagatatcatatgaataggcccggcaaaaaccttgtatagcttcttcgatttctcgataaaaagaaatatgaccaacattggttcgaatgtatatagaacgaatttctttttttgtacttcttactactagataatgctcataaatttcatgataggtacctaaagattcatagtgaacttcgataggaacttctcttgacgaaataatgcgttgatctagtcgccaccggagccacaaaggactatcgaagtttattcttttttgttgataagctccaattgcatcataggaattacaaaaaaagggttctttttttttcgtatacttatagttattatctcgaattctttcatttttaagatttctaaaatttccgcaattccgtggattatacctatttgaataaatacctcgacgattcccgctcgttaatatgtaaagtccaataagcatatcttgagttggtacggaaataggatccccaatagccggagacaggaggttcgtatgagaaaacataagtaaacgagcttctgcttgagcttctaaagataaaggcacatgaacagccatttgatccccatcaaagtctgcattgaatcccttacaaactaatggatgcaaacaaatagcacgcccctctactaaaatgggttggaatgcctgtatacctaatctatgcagagtcggcgctctattcagcaatacgggatgtccctgcataacttcttgaagtatttcccatacaatcggttctttttcccgaattttactcttagcaattcctatgttcgaagcaaaatgttttcgaattagaccacgaattagaaatgtctgggggggttctattgctatttcgcggggcaatccccccctatgtaatgaaagtgtggaccaaatcaatgcagaacgacgaataatcaac

SEQ ID NO: 18079 - DNA, 347 bp, Glycine max
  Clone ID: PAT_MRT3847_116329C.1
tttttgcaaagaaagttaccaaaccaagagcgcgggggaagatgactaatcttacaacagtaactaaactgaggaagaccttacaagaacaaaaacaactagtcattgccgtattggactaccataaccattgttaaactcgtcatatttatgggcatggaaatgagcagatggccttgtgtttatcaaagccacctctatatatacagatctgttaggcccaactctagaccactgtctttaaagcaccacatactggttctgttcaagcagagacattaatcgcctgagggagagcattgctgtctatttacaaagctaacggatactcaaacccgaatatcctt

SEQ ID NO: 18080 - DNA, 1490 bp, Glycine max
  Clone ID: PAT_MRT3847_11632C.1
gttaacctgtatgtatgcaggccttgtgtgccttattgtcggttctggatgatagaggaaaacgggaggctcttcttattgaatctttggaaaggagacgggcatcactttgcagatctatgtccaggattaatgttaatagtactggaaagggttctatgtcacattctgatcaatctgaactggatatggtcactgatgacagttattctcctgcatctgatgtagacaacctgaacctgactgagactgctgaagactcgctgccatctgctggggctgtggtaattgaagctggaaagaaaggagaggaacaaattaaaaaatggatccgtgttcaagaatatgattcttggatttggaattccttttattcagatctcaatgttgtaaaatatggtaaaaggtcttatctggactctcttgccagatgtaagagttgtcatgatctatactggagagatgagagacactgtaaaatttgccatatgacatttgagcttgattttgatctagaagaaagatatgcaatccacatagccacatgcagggagaaagaagacagcaatacatttcctgatcataaagtgctatcatcacagattcaatcactgaaagctgcagtttatgctattgagtctgttatgcctgaagatgccatggttggtgcttggaggaaatctgctcataagctatgggtaaaacggctcagacgcacctcaactttagtggagcttttgcaggttcttactgattttgttggtgccatcaataaggattggttgtatcaatgcaaatttctggatggggtggttgaagaaatcattgcatcttttgcatctatgccccatacaccatctgcccttgctctgtggttagtgaagttagatgccataattgctccctacctggacagagtccatcttcagaagaaacagggaaccagtcaacatggtgcttggcgataggtgcacttttacgtttgttgaagggcatgcgaattgaaatgaaggaactacctgttccgctccttgatcagagattcatgtgctggcttcacttggttctgaatttctagaacgactacaatttggccgaggctttttttttaatcctcccctccccgatttatacaggcaatcttgttggtcagatgtataggtttacattttttctatataaaaaaatactaggtagctcgagttttttggtgcgtaatgccacttggtttctacaaggtcgcccatttttcttgcttcatgatgtctggtcttctcgttcgagaaatcaattttgtctttgtatcttacagaataataatgtcgtactgattgaaaataatttgtattatgagaggatagagttttaggccgtctataaagttaaactgactggcaatgtacaatttgctttgctttaaataccctaaaaatagagcaagtaaactgcctacctttccgattgtttgaccgggaaaaaaaaaaaaaaaa

SEQ ID NO: 18081 - DNA, 278 bp, Glycine max
  Clone ID: PAT_MRT3847_116330C.1
atagaattattattatgcttcatgtagataagttgtttttttttgttaaattattttttttcctctagcttattatttaggtttgatttggtcatctaatttttttatcgatttgatcatttcatttcaattaaactaactacatcatgaaatatgcattttgtaatggtttaaaatcatttagtgatggttttaaaccatcacaaattacgattttttaataccgtcgatccaatttatgtagtagggtccccttctgtcgtcttctcgcagccgta

SEQ ID NO: 18082 - DNA, 311 bp, Glycine max
  Clone ID: PAT_MRT3847_116331C.1
ctacaggatgcacactgatgagacccttcctccattaggtctatcggattcttgtacaagaacgaagtcttattggaactgcacagctcacctgtgtggaaccatatcacatcacggatatgatgaaataagaggaattgagacggcatgttgtaagtacttaaatatgttggataaatgcactatttcattattttgctatcgcctgcaaagaacaagatgtaacttttgtactttcctcaacaatttctgagcactactagaccgctcagtttgattccaactccgaataagatctgaccatctggcag

SEQ ID NO: 18083 - DNA, 302 bp, Glycine max
  Clone ID: PAT_MRT3847_116332C.1
cctagtcacttttttttttgaaattttattaactgatcagggggcttgattggtggggggggaccacaaacaaaaagactttatttaagccagaggtgcctttttgaagtccttttttgacaaaaagaaagttaatttataaaaacaatttttgatgggcacccaaaaagaatcccaaaggttagaactttcaacaaaaaaagaaatgccgcctcccgtggagaatggaaaacaaaaattcctcctcatgaagtgtaatggaagcgttttcaaaaaaaaaagagggggttaaactgcagggc

SEQ ID NO: 18084 - DNA, 359 bp, Glycine max
  Clone ID: PAT_MRT3847_116333C.1
ctcccttctcttcacacattttcttagctctgtccggcaatccctctcgttcacactttcaggtctctctctctctctctcattatctctttattttaatgtattttattctcgattaaatatgaatgctatgcttctcttctcaccgcttcaatcgcaccttcttattttccaatttccctattctcgttcgatctaaccttttccgctcttcgtgcttcgaatgactgagtaaatctacgattctctgttcattcatttcatagatttcgcgtgattttggctattttttatttgcggccattccttacatgtagtggttgattttcaaacttttctcctcgatataactcttgtgc

SEQ ID NO: 18085 - DNA, 307 bp, Glycine max
  Clone ID: PAT_MRT3847_116334C.1
gccgtaccgatccgcggtgtacatacccacgcgactacgagcgcagtcgtcctttttttttttttttgagaacgaaaaggtccactttatatctataaaacaaactttttctgcggctggatttcacattatttacgtgatttagaaatcgaatacaacaaaacgggttcttacatgccatagggtgatagaaaaaaaatatatggaagctgaaatactaccacgcttaaaggtatcaccggtttatcaccctatataatctctcggggaccattaaaaatttgatctttaaacccttgtagcccaa

SEQ ID NO: 18086 - DNA, 541 bp, Glycine max
  Clone ID: PAT_MRT3847_116335C.1
cttttttttttttttttttttttttttttttttttttttttttttttttttttttttttattattaatttttctttttttgggttaaccgaggttacagggggaaagatcggttagattttcctttaacagggattaaatgagattacaatgcaaatgatcgggtgaaattcattttattatttattaggcaagataacggcttaaacgatcggttaaagctcattaaaaatgaaagaaaagaaaactacaagtgaacaagatgaagatgaaagcaaacaaaacaagaaatgaattgaaagcctcagattcgaacacttaccggttgaagatcgaagaacgaacgaagaacagatgaagaacggtgaaaaacggcggaaaaccttcatggatttgttcacagaaacgtctcgaaagcgttacgaaagcacctcgacttggattttcttcacggaaacaatttttttcacccaaaacagctgaaatgcatagccaaaggggttatggacctttgcaacagctccctctttgcctatttatag

SEQ ID NO: 18087 - DNA, 148 bp, Glycine max
  Clone ID: PAT_MRT3847_116336C.1
ggctcgagctcagacgcaacctactacgcgaccggatttacgtttcacagacgacaccacacgacagaacggggcaggatgcacacgcaacccccagaaaacaccagcccggccgagccaaaacggatcaactacggctacgaacgca

SEQ ID NO: 18088 - DNA, 786 bp, Glycine max
  Clone ID: PAT_MRT3847_116337C.1
ggattccatcaaatctcttcagatccgccaggtcctcacccaggctgtgagcctaggcatgattgttacgtctgcactgataatatggaaggcattgatgtgcgttactggcagtgaatctcccgttgttgttgttctttctggaagcatggaacccggattcaagcggggagacatcttgttcttgttgtgtttaatgttgatggacgtgagattccaattgttcatcgcgtaattaacgtacatgaaatggaagatactggggaggttgatgttctcacataaggagacaacaattatggggatgacaggctactgtatgctcatggtcaactttggctgcaaaggcaccacattatgggtagagccgtcgggttcttaccatacgtaggctgggtgaccatcattatgactgaaaagcctattatcaagtatattctcattggtgctttggggttgctcgtgataacttcgaaagattaaatgatgaatatgaagtcaaaactgcggtctaacttcggatggtagggtgagcagaatataatggtaagattaaaagatgaatctgaaatcattttgtaccattcatagtatatgggggacaatatgatgttaaggatttatgcaaaatagttgaattttggtatattcttacttcttcctactccttgatgagttggtatctgactgaaacccctcttcctttgcattttgagtgaaaccccccttcctttatattttaatttggtgcagtttaagattaagcatataaatcagctgttcctt

SEQ ID NO: 18089 - DNA, 2779 bp, Glycine max
  Clone ID: PAT_MRT3847_116338C.1
ccgcatgcagttcacgggatcacggcggcgggtagacgagagtgttgaagcggttctgggttggagacagagagagagaagttttcagtttcagaaagaaagcaaaagcaatagcaatgggttggatcggtgagactgttgattccatcaaatctcttcagatccgccaggtcctcacccaggctgtgagcctaggcatgattgttacgtctgcactgataatatggaaggcattgatgtgcgttactggcagtgaatctcccgttgttgttgttctttctggaagcatggaacccggattcaagcggggagacatcttgttcttgcacatgagtaaagatcctattcgggcaggggagattgttgtgtttaatgttgatggacgtgagattccaattgttcatcgtgtaattaaggtacatgaaagggaagatactggggaggttgatgttctcacaaaaggagacaacaattatggggatgacaggctactgtatgctcatggtcaactttggctgcaaaggcaccacattatgggtagagccgtcgggttcttaccatacgtaggctgggtgaccatcattatgactgaaaagcctattatcaagtatattctcattggtgctttggggttgctcgtgataacttcgaaagattaaatgatgaatatgaagtcaaaactgcggtctaacttcggatggtagggtgagcagaatataatggtaagattaaaagatgaatctgaaatcattttgtaccattcatagtatatgggggacaatatgatgttaaggatttatgcaaaatagttgaattttggtatattcttacttcttcctactcatggaagagtttgtttcactggactcttgttgttcactcattcgatctgatagtttcatcagctggaatattttctattaggggtacacgtgaaactggagttatagttcccatggaggatcctatgacaattcttcagaaaggatattcttttacaatagttttagctgttctggcattcggtttgtctacccggtggttactctacactgagcaagcaccttcagcatggttcaattttgctttgtgtgggttgattggtattatcactgcttacatatttgtctggattgccaagtattataccgactacaagcatgagcctgtgcgcatattagccctttccagctctactggccatgggaccaacataattgcaggagtcagtttgggtctggaatctactgctcttcccgtccttgtcatcagtgtgtcaattatctcagctttctggctgggccacacctgtggactagtagatgaaacaggaaacccaactggtgggctgtttggcacagctgtggcaacaatgggaatgcttagcactgctgcctatattcttaccatggatatgtttggcccaatagctgataatgctggaggaattgtagagatgagtcagcagcctgaaagtgtccgagagataactgatgtccttgatgccgtaggaaacacaaccaaagctaccaccaaagggtttgctattggttctgctgctcttgcatctttccttttgtttagtgcttatatggacgaggtttctgcatttgctcatgaaccttttaaacaggttgatattgctattcccgaagttttcgttggtgggctgctaggttccatgcttatatttgtttttagtgcttgggcctgtgctgctgttggcagaactgcacaagaagttgttaacgaagtgagaaggcagttcattgagaggcctggtataatggattacaaggagaaaccagattatggtcgctgtgttgctattgtagcatctgcgtcgttaagagagatgataaaacctggtgctttggcaatcatttcacctattgtagttggtattctgttccgaattttgggctactatacagggcaacctttactcggggccaaagttgtggctgctttgctcatgtttgcaacagtgtctggtattcttatggcactttttctgaacacagcaggtggtgcctgggataatgcaaagaagtacattgagactggagctcttggaggcaagggaagtgaggctcacaaagcagccataactggagatacagtgggagacccattcaaagacacagctgggccttcaatccatgtcctcataaagatgcttgcaacgattacactggtaatggctccagtcttcctgtgagtgagagttgttgatatctctattgcggccggctcagaaaaagcatactagcgcgaatttgattttgctaattttggaagtatagggataggttgtatgaatctatgatgtaaatggacgagcctgatttatagtgacgatgaatcttcttgcccttgatgagaataagagagattagttgactggaacatatggagaaaatagtgattagaaaaattcccccgatgtttttttaatggtagtgtgagcagaatataatgttaagattaaatgatgaatctgaagtcattttgtaccatgcatagtatgggggacaatataatgttaagaattaatgcaaaaaaaaaaagttaaaaaaaaaaaaaaaaagggcggccgcctcagaaaaagcatactcgcgccattttgattttgctaattttggaagtatagggataggttgtatgaatctatgatgtaaatggacgagcttgattaagagtcccaatgaattttattgcccttgatcagaataagagatattagttgactggaacatatggaaaaaatagagattag

SEQ ID NO: 18090 - DNA, 362 bp, Glycine max
  Clone ID: PAT_MRT3847_116339C.1
ttttaattcactcaatttgaaaggccccccttttttattatgggagccaccctttaaaagacgcccccccaccctcttaccaccttttccacaaaaatattttattttattccccctcctagagaagaaaaattttttttaccaaattccacctaatataaaaatccccccccccgcctccaaaaaaaaaaaagaagcggtttcttctttatattataatcatcgacaaaaaagcccccttcttacaacctttttccaaaaataataaaacactgatcctccggaagaacccccttattatacataatcttctcctccacattaatcatctcataaaaactctccacctccataataatatt

SEQ ID NO: 18091 - DNA, 474 bp, Glycine max
  Clone ID: PAT_MRT3847_11633C.1
aaagctaccagaattgataatgcaaaaatgggacacgacacatacagcttataaaaacgatgatcactaaaatcaacactaacatgcacagacctacaccagcaattattagcatctgataattatttgcaagaagaggggaatgtgagccacgactatataccaaaatccctgagataccctcccaacatagcagaaaagctgctcatatgagcccttccaagtgctagccgaactaccagtccaccttctctatccctagaatccgaacgggagatagggctagagcattcgatgtgaagtatctcacactgcgtgggctttccccacccaaaatcagacccatgtggaccaagcgaaggcgaccctgcactagagacgagtgctgactaacctcccactttacggagagacataaaacatccaacggggtgatagcatgaaacggagaatcactaactgccctgacaatac

SEQ ID NO: 18092 - DNA, 782 bp, Glycine max
  Clone ID: PAT_MRT3847_116340C.1
aatattctaacatgggttggataggtgagagtgtcgattccatcaaatctcttcagatccgccaggtcctcacccaggctgttagcctcggcatgattgttacctctgcactgataatatggaaggcattgatgtgcattactggcagtgaatctcctgttgttgttgttctttctggaagcatggaacccggattcaagcggggagacatcttattcttgcacatgagtaaagactcaattcgggcaggggagattgttgtgtttaatgtcgatggacgtgagattccaattgttcatcgtgtaattaaggtacatgagagggaagatactggggaggttgatgttctcactaaaggagacaacaattatggtgatgacaggctactgtatgctcacggtcaactttggctgcaaaggcaccacattatgggtagagccgtcgggttcttaccttacgtaggctgggtgaccatcattatgactgaaaagcctattatcaagtatattctcattggtgctttggggttgctcgtgataacttcgaaagattaaatgatgaatctgaagtcaaactgcggtctaacctccgatggtagtgtgagcagaatataatgttaagaataaatgatgaatctgaagtcattttgtaccatgcatagctatgcgggacaatataatggtaaagaattaatggaaaacacgttcaattttgggaatattatttacttcctcctagtcccttgatgagttggaatctggattgaaacccccccttccctt

SEQ ID NO: 18093 - DNA, 618 bp, Glycine max
  unsure (1)..(618): unsure at all n locations
  Clone ID: PAT_MRT3847_116341C.1
gaattcggcaccagcatatcnnaactttttggncttaaacattattcaacattgttcaatgttgggtcaatatcaagtccaattgggtcatacttgctcagtgtgagggttgcagggtatttatatgatatgcaagcaagaaggcaaatggaagctttggggcaaaagacaagtccaggggaggagctgaactgcaatggtgatgagtgctacaagttggcattcattacaatgactgcagtttgcttgtttggggcatgtttgtcactcattctggtctttaggaccatacaactttatagaagagacctatacaagaaattcaatggtgctacaactgatgtaactgaaacaactgatgtaactgaaacggctgtgtcttagaaatgtattggaccatcagctgcaaatgaaggctaggtgactttggcatggaaatggcaacagaaaattcagaaccagagcaatagctatagcaactactttgcaatcactaacaaatttacagtttataatgagtagtccttgtaaatttgtaatgttatcttttctaccttagagacctatttcggctagtgggataacactttattgttatttgtgttttactgtgacaac

SEQ ID NO: 18094 - DNA, 113 bp, Glycine max
  Clone ID: PAT_MRT3847_116342C.1
ggcatcagaaaggtagagagggatacgtcacttcatcatcgttatgttccacaacgtgccgcctgtagaagccatgaatgtgcctgccagcaacatgacagaccactccgcta

SEQ ID NO: 18095 - DNA, 181 bp, Glycine max
  Clone ID: PAT_MRT3847_116343C.1
ggaattcggcacgaggctcaagtgtattctaaagggattggacttcaaaacctatatatttctgtttgtgattgttcctgttggcatcttcggtctctatttgcacgggcagaaaatctcctactttctaagaccactgtgggaatctcctccaaagcctttccatgaaatccctcactat

SEQ ID NO: 18096 - DNA, 388 bp, Glycine max
  Clone ID: PAT_MRT3847_116344C.1
gcgcctacgcatgcgaccatacggacgaaccatatcatcatcaattcctcccaatacggctcgggctggggcgccctatgccgcaaccacacttccaagatccttcaacacaaacgcgccatgtgcttttactgtacccgcaattgtgtcctacacaccctgctaacacgcctcatatcatattcatcaatccaacgattcaataaaagtgttagaccacttgcaatacttcatgaaaagtttgattgtgtctatgatcttatgtgaaagactcgatgatgggaaagaaagagacattgaacaagtgcaatgacaaatgctcctgctgattataaggttcaatgtactcaaattttggcccctacaaacgcacgttttatttttcaaa

SEQ ID NO: 18097 - DNA, 404 bp, Glycine max
  Clone ID: PAT_MRT3847_116345C.1
ggccgggggaaaattttttagggtaaaaaagggaaaagttaaaagggggaaaacccggcagccccaaggaccaaatggcccccgggccccgtttttaagaagcaagaacccccccaaaaaaccccatacccagggggattaattccgggcctaaaaaagggttaacccccccccaaaggggggcgggggggaaaaggaaaggcctttcacaagggatcaaaaggccttggccccaaaaaggcggggattttcccccggggggcccctttaaaaacccccccaatccccttttccccccctttacacggggcaaaaattctggaaaaaacactcccctttgaaacccttttaactttccccggggttatggggccccccaaaagggggccccccaaaaagccccc

SEQ ID NO: 18098 - DNA, 119 bp, Glycine max
  Clone ID: PAT_MRT3847_116346C.1
acccacgcgtacggtcgtgcatgataaatttttgcaaaattccatcattgacctatagttttaaattctgtatacgttattataacattgttgttttgacaattaaagcattatgtttt

SEQ ID NO: 18099 - DNA, 330 bp, Glycine max
  Clone ID: PAT_MRT3847_116347C.1
ggcaaaaaaattcattggatttgggtggtttttttttttttggggagaccaactttgaactttttttttcccaattccatcgttttaattccaaagggaaatgaatccaatccattttctgggttaagggttccagccagtttttagatagatagaccgggagagaaaaaaggggagagggggggggagagaatacaacttcttgctattactggttttttgcataccccctggggccaaatattggggatccaatttttacattgggcctacccatttcaatcgctaactcaaaataaccagacatgcccattgacaggtcacattcct

SEQ ID NO: 18100 - DNA, 172 bp, Glycine max
  Clone ID: PAT_MRT3847_116348C.1
acatcaaaaaacatgccgccatcagaaaaggacagttccactgtacatgatggatacgtaccaatacttgacaaatggacagtgatcgcagcatatattctctactacaggggggaaatacaatgacagaatatggaattaagcttgccgagataacaaactccacattact

SEQ ID NO: 18101 - DNA, 708 bp, Glycine max
  Clone ID: PAT_MRT3847_116349C.1
attcccgggtcgacccacgcgtccggtatttgtagctgatgtaactggggtgggggggggggggatcaaataaatgactattggatactgggacagattgggaaatcaaatcagcatgggcgattgcgtaaaaaaaaaaaaaaaaaaaaaaaaaaaaaaaaaaaaaaaaaaaaaaaaaaaaaaaaaaaaaaaaaaaaaaaaggggggggggggggaaaaaaaaaaaaaaggggggggccgcctttttttttttttttggggggcaaaaatgcgggtcattaaaaaaaaaggggggggaaaaaaaaaaacgtttgggggggtggaaaccttgggggcgaaagccttttatttaaatacccccaaaaaaaaagggggggagaaaaaaaggggcggcggtttttttgagaacaagggcttctccccggggggggagaaagtaaaaggttttttgggggggggccctaaggagtcattggggcgcgggtaaaaaaagggggaaagggagaaaaaccgtggggtccccaacttaaggggggtggggggaattttcctttttgcgccgtgtgggggggtataccgaagaaggggggggatcgatgggggcttttttaaaaaggggggcgctcccctcaagggggaaaaggggagggccccccctagagggggggcgtttaaaaccccggggggtgtatgtggggggtaaacccc

SEQ ID NO: 18102 - DNA, 358 bp, Glycine max
  Clone ID: PAT_MRT3847_11634C.1
ctctcccaatccaatcaatggcttcttttctttccccttctccctcttccctcgaccaaacccttcgcgacggggacgactacgttctggaaaatgggtcagaaggtttgtcaagggacacacttcattatgtgtacgagcttgtgaagaatgggaatgtggcatttcgagagaacagaatggaagaggcaatcaacttttactcaagagccaataacatcaaatcaggattagccaatatttcatgcacagaacaccatcatcttcagaacgtaggccattgagtgggcttgaacccacaacacttgctgaactgggtttgaaggatgctgagaagcttgtgaactccaaagaattt

SEQ ID NO: 18103 - DNA, 378 bp, Glycine max
  unsure (1)..(378): unsure at all n locations
  Clone ID: PAT_MRT3847_116350C.1
gctcgaaattcggctcgaggcggcggatatggaggtggcttttgaagtggcggcggcggtggtgcccgtgctgggggagctcatggaggtggagggggtaataaaggaggatcangcggaggctatggaggaggagcggctggcggtggcagtggtggctctactggcagcggtggtgcctgttctggccgtggaggtgcacatggaggaggttattgaggtggagctggaggaaaccaatgctgtggccccagacaatattacccttgaggcttaatcagcctacaataaacttcaatgggaaaaaaaaatatttagctcatcaaaaccttactattaccaaccataatatttgggaacaaggatgcttataaacta

SEQ ID NO: 18104 - DNA, 413 bp, Glycine max
  Clone ID: PAT_MRT3847_116351C.1
cattcgctcggaacaagaacgtggaacattggtatcgcatgtgaatgcaccttttccacactgtttggtttattaactgaacttcaaatgtgggaaaaggaaactgaaatgggagtaatttataattggaactgcaggaggagttttcagagtatgagaaaatatctggaaaaagaaatatgcattaactttcagatcttttatgaccctgatccccattcgccctttggatcatcagcgtttttttgactttgtgcaaggcatgtttaaggtttttcaggtcttgactggcgaatttggtattcacgaataatccactatacaaattaaaactatttttgatcatcgtcgactttaatttaacaagtgtcttcaagcccttaacgtcaataggtgtggattgatatccattt

SEQ ID NO: 18105 - DNA, 146 bp, Glycine max
  Clone ID: PAT_MRT3847_116352C.1
cttattctaaggcaaacattaatatacaaaaactgaggaagggggctggaacacacaaggggggctgatgtgaactaatggtaacatatccttcaacccacgggtttaatgaggaaggtattgacgtaatttttcaatattattca

SEQ ID NO: 18106 - DNA, 247 bp, Glycine max
  unsure (1)..(247): unsure at all n locations
  Clone ID: PAT_MRT3847_116353C.1
gtcgnatnntggcacgcgtacntaagctcggaattcggctcgatngggnggctataagagattgatggcaanaggttntannannntatngncatngntncctctgctantaagngnntcaccatntcnacattcgtnaagtcaaaggtanncanntggagcacaaggtntggttnacatcagnngnagncgnattcntcntggattanagnnagatgntntncgagcaanntatggaatcgctgnn

SEQ ID NO: 18107 - DNA, 796 bp, Glycine max
  unsure (1)..(796): unsure at all n locations
  Clone ID: PAT_MRT3847_116354C.1
tcttgatgcctgcgttttgtgacttccatgtgctgaatgagctgtttttgctggctggaaatgtggtatagcctagggtattttagaattagtggattgccatcatcattccatttatccacccaaaaactgaccttatctctgcaccccgccctccaggctattcccttttgaaagaaattaacctcctgcgatgactggaaccgtgactttaagtcctgccaccacaaagattcattgctgcctcttcttttgtcatccatactcctccaactgccgtatcttgaatccaatactcgagcccaaagtttgccttggtggtgaaatagattccatcccctttttccaagcaaagctaaattgaagctcttgatgtccctgattcctaatccccctttttcctttgggaggcacattgtatcccacttgacccacacagtcttcttttgctcaaatcatcctccccataggaatcggcgttgtatactcaccagcttatccacaactctgttaggaaccttgaaaaatgaaaagaaataaataggaatggatactgactttataagagtcactctaccctcaaatgaaatgcgtctttgtttccattttgctagctttctctcacacttcttgatgataggatcccacaactcacaacgnccttgngtttgcccctattgngatacccaagtatgtgaacggtatggacaacaatctgtagttcaagtattttgcagcaaccttcttccattgttccgacttcccgattggcccaaaactgctctttgtgaaatta

SEQ ID NO: 18108 - DNA, 375 bp, Glycine max
  Clone ID: PAT_MRT3847_116355C.1
ggaaacaaatgtgagtgaactggaccttgaagcacatgttcagcaacataattgatctgtttttttcagtcaaacgagttgattaactgctctcaagggtcacttaatgtgaatcagtactgtaccaaattgaagagtatctgggaagagctgggtgggtatcttgtgaaggtgtgaaacctcttcttgattacatccgcatggaatgtgtcatgtacttcctcatgggcgttaataatgctttctcccaagtcagaggtcagattctactgatggattcaataccttctataacaagatttcctccctgattattcaggaagaaaacaaatggaacttggttccttgactgctcaatctgaatcaccaattgca

SEQ ID NO: 18109 - DNA, 153 bp, Glycine max
  Clone ID: PAT_MRT3847_116356C.1
caaaaacaaaggtccaattctttttcaaaggaaataaaaccctgtccttaggactggtgccaatatgcaatcccattggtaactaactggaccctctaatttgtatcacttaaagctcaaaaacaagtgtaaccggacgcgggggcgtgccct

SEQ ID NO: 18110 - DNA, 358 bp, Glycine max
  Clone ID: PAT_MRT3847_116357C.1
actgcggtccttggagttggaatatactgtgtatgatgaccgggatcttggggaaaaagcatacgaataccggctagtgaaggtggttaaattttaacttccccggaaccaatgggtggtgtacttggatctgaagcgggaggagtgtaacaacctattgccatccgggctggtatattcacatgcgtttcatttgggtggacaaggtttcttcctattagcacattgcaacgtggaccaacaaagctcttttcattgcttaggactgtttttgggaatgcaagaaatgggctcagtgatctttgtcgccaactatcattttgttgcgaggtttatgccgacagacgaatttattgct

SEQ ID NO: 18111 - DNA, 374 bp, Glycine max
  Clone ID: PAT_MRT3847_116358C.1
gggacacgtggggccactgcttatactgtgataagcgggatgcagacaacgcggttagactgaactatccatatgctgtctttcactcgctgagacatactgatccagatcgccgctcagaggggtctaatatgacaaacacctgcacgaaagggccaatgtttgttttcataacattctgtggagacaacaaggacaccgtgacaacagtggccaattgccacaagctggacctcttgggagagaatcatgcaatagctgcttagtttagaacacatgtaccacatttcacaaggtggccaactgatgcccggccgacctccactctgccatctgatgtgactgcatatattgaagctatgcggcatgagagt

SEQ ID NO: 18112 - DNA, 342 bp, Glycine max
  Clone ID: PAT_MRT3847_116359C.1
acgacccgggggcggacccgggggtttccccgggaaatccggcccggggccgggagggggaccaattttcccaaaagggaggcggataaaagctgggggaaaaaatggcaaaaaaaggggcccgggaaaaaatgggacccggtcacaataccacacaacatgcgagccgaaaacataaagggtaaaacccggggttcctaatgggggagccaacaaaaattaattgggttgggctaaatgcccggtttccaaacaaaaaaacatgggggccacctgaataaaagaattccccaacccacggggagagggggtttgtttattgggccccagggaggctttttt

SEQ ID NO: 18113 - DNA, 431 bp, Glycine max
  Clone ID: PAT_MRT3847_11635C.1
ggggcgctaaattttttttttttttttttttttttttgcccttcaaactgcatacatttattaataaacatgttttcttacaaaaaattttctcaacaaccaatatcacattacacattttccacacttacacaaaaaacttgactaatagatcttgcttaataaatagttccatttacaattttataacttaaacatcatccttcatacctattaaaccaaaacacctatcttatatacattatgtgcacctcccacttaaaaaccatttggagtcacagcccaattagacaacccaataataccttcctcgtcaacattacctgttataaaccattccttatagtccataataagacttttaccatccacattaacactcaatttatttacaaaactataaacaccctttctcttatcttatctcccaa

SEQ ID NO: 18114 - DNA, 275 bp, Glycine max
  Clone ID: PAT_MRT3847_116360C.1
tccttaattcccgctcgacgcacgcgtccgaacactcgttctgtgactcctaatacacggaactttctacatatgctaacgccaattgccaatggacgcatgcttataacattcgggtgaggatctcatccgaaaaaagcaacctcctctcagattcagcctgttaacacatcgaaagattactctcatcatcaatatgaaatcactacttttcatcatatcatccaatataaactgcaaactgatgtagaccaaatacgtatatacaaacatta

SEQ ID NO: 18115 - DNA, 657 bp, Glycine max
  unsure (1)..(657): unsure at all n locations
  Clone ID: PAT_MRT3847_116361C.1
accggtccgnattcccgggtcgacccacgcgtccgcgacggcagcgtacctggctcggcgcgcggcgcagaaggagagggttcggatcctctaccgccgtgccctcaaagacactctcaactgggccgtacatcgccacctcttctacgacgacgcttcaaacctccgcgaaaggttcgaggagaacagacacgtggaagaccctgataccattgacaggctcatagcggatgctgaagcttcctacaacaagtggcgccatcctgatccttatattgttccttgggctcctggtggttccaagtttactcgcaacccaactccacctcaagggattgagatagtttataattatggccgagaagataatgactgaaatctgattttttcttgcatccttacaatgaataaagattgaggagtccatccctgcttatgatgttgaaaaattttatcacctccgaaccagatggtaccttgatttgaatgtttttaagattctgtcattgatacttgttagtgcgtgtctgaaattttacataaaactagttgcataaattgtctgcaaattctgaatattgggtcttctcgatatcattntaactttgntaactgttgagctacactatcaccctattacaatggctaatgagagct

SEQ ID NO: 18116 - DNA, 786 bp, Glycine max
  unsure (1)..(786): unsure at all n locations
  Clone ID: PAT_MRT3847_116362C.1
cgacccacgcgtccggtaacgccttccctattcctgttctactcacttcatcttcttactctccctaccttgaaaaaacgtgtttttttttatagaaagcgcagcgtggaactttacttgtagcaagcaattgtaacgcaagcttcttccttttcccatttccccctcaaagtttgcgacttttgagattctcatggccttccaactcaaacccgaacctgggtctccgcctatgtccacttccaccacccagaaaaactacaaagaaatgagcatttctcagcttgtctcggttttgcgtgtttcgtttcaaacggaggattttgataaagttgaggaagaattggcgaacagggacgccaaacttaaggcggagattgagccactccgggagaagatcgaggtggagaggctcaagaggattgaagccgaagaaaaacttaaaaatagagatgagcaatgcgaaaaggggaaaagagcacagcaaaactatgagcagttgttgaaggaagtgaagaaaaacggtttggttgaaaaaaacacgattgaggagttaaggcaaatgagcctcgctttacaacgtgaaaattgtgagctgaagggcttaaagaaaaaatggctagatgatggcaaatctgtgggtgaacttaggagcaggatcagtgtgttggaggaggagaagagtgctcttgatgcccttagcaccaagaacagtgaattgaagggaagcatcaagataaattgaccgncatagaggggtttgaggaccgaaaactgtaaattggc

SEQ ID NO: 18117 - DNA, 820 bp, Glycine max
  unsure (1)..(820): unsure at all n locations
  Clone ID: PAT_MRT3847_116363C.1
ggtccggaatcccggtcgacccacgcgtccgatttttttatttttatgttaagttccatcttcagggtcaaacttctctttagctagctgcagagatcaacaacatggagatagaatcatcagcagccaccgatagcaacaactggggtggtgcagctgctgttgagagagagatgacatacactggctttgacagaggaaccttcttggcttggcaagatctgagagtggtgattcctaactttggaaagggaccaaccaagaggttgcttaatggactcaatggctatgctgagcctggtagaatcatggccattatgggtccttctggctctggaaaatccacccttcttgattcacttgcaggtagactctcaaaaaatgtggttatgacaggaaatgttcttctcaatggaaagaaaaaaggcctaggcgccggctacggtgttgttgtaagtaaagtaacacattttcttcatataataatatgtggatcgattaatatacgggaatagtgatttttctcggaaaatttacaagaaatatattattaattattgatataagcaataattttagtttaggaatgattaattatccaactggtcatcaatattcgataagtggttatcggttaatcattaattagttggttttgttagtgtttttaatccaattgtaatttttttttatttttttaaactatagtgtaagttttttttttttttgtatagcctagttagtaactttagtagtttagttattccaattttagctatcaagaaggacatcanntataataatatcattntaaatttaa

SEQ ID NO: 18118 - DNA, 584 bp, Glycine max
  unsure (1)..(584): unsure at all n locations
  Clone ID: PAT_MRT3847_116364C.1
cccacgcgtccggtcttgtttctgcgtttggcgttgcacacgatgaggaaattcaccaccatattctcccacatcaaatcaacaaagatgaacttctccgtttcgcttcttcatcggagctctccattttgccccaatcaaccaccacaccctaatttcaagaacctcacatggcagaatcgcgattcactactattatttccccttctctgttcgcgccactttgcctccactaccgcgcagaatccttccacattgaatgctcttcaggatcattatcaggccattgattttcctggaggagcagtacaattcatccctgaaatgaggtttatatccgaatcacctaaagagagaataccttgctaccgtgtccttgatgataatgggcaaccaattttgggccataattttgtgcaggtcagcaaggaagttgctgttaagatgtatactgacatggtcactctccgatctatggacactatcttctatgaagcacanaggcaaggtagaatatcattttatgtgacagcaattggggaggaggctatcaatgttgcttcaactgcagctctggccatgga

SEQ ID NO: 18119 - DNA, 688 bp, Glycine max
  Clone ID: PAT_MRT3847_116365C.1
ttgacttggaggttgtttgcctttggattttttcgccaatccctgaggagaactgaaaaaagcagaaagtatggcttcgacggcagcgtacctggctcggcgcgcggcgcagaaggagagggttcggatcctctaccgccgtgccctcaaagacactctcaactgggccgtacatcgccacctcttctacgacgacgcttcaaacctccgcgaaaggttcgaggagaacagacacgtggaagaccctgataccattgacaggctcatagcggatgctgaagcttcctacaacaagtggcgccatcctgatccttatattgttccttgggctcctggtggttccaagtttactcgcaacccaactccacctcaagggattgagatagtttataattatggccgagaagataatgactgaaatctgattttttcttgcatccttacaatgaataaaggtctgcaatcaaactgttctgtattactagattgtggattaaatgaccttcatttatgtgatgagcataaattgatacagattgaggagtccatccctgcttatgatgttgaaaaattttatcacctccgaaccagatggtaccttgatttgaatgtttttaagattctgtcattgatacttgttagtgcgtgtctgaaattttacataaaactagttgcataaattgtctgc

SEQ ID NO: 18120 - DNA, 676 bp, Glycine max
  Clone ID: PAT_MRT3847_116366C.1
tcagatgtgttcagctttgggtcttagttttggagattgtgagtggcaaaaagaacacggatttttatcaaccgaatcaagctgatgatctcttaagctatgcttggaagaattggacagagcaaacacctttgcagttgctggatccaactctgagaggttcttattcaagaaatgaagtaaacagatgcatccatattggtttattatgtgttcaggaaaatccatctgacagaccttcgatggccaccattgcacttatgctgaacagttattcagttaccttgtcaatgccacgacaaccagcatcttttttgcgcggaagaaatcctaacaggctaaaccaagggcttgactctgatcagtctaccacttgttcaattccatggtctgtgaatgaagtatccattacagacatataccctcgctaaaggattgttttcatgttttctttgaccaatccaggatatgtttaaatgtgtcaaaccatggtgttgctgttatacaatcctagtgcatatatattgtaaatattaatagttaaaagaattctgtcaaatacttcttggatgaacacatacagtagctaaaacatgatgccccgggagagaccagattaatttgcaatcttcaccaattttgtttttgaaatatgttgttgatttacagagaaaaa

SEQ ID NO: 18121 - DNA, 1466 bp, Glycine max
  Clone ID: PAT_MRT3847_116367C.1
cccacgcgtccgcccactcgtccgtacggctgcgcgcgaaccacagaaggggggaggttgtttgccaaagtatgttttcttcgactccctgactgagcttgacgcgggggagtgaactgaaaaagcataaagtatggcttcgacggcagcgtaccttgctcggcgcgcggcgcagaaggagagggttcggatcctctaccgccgcgccctcaaagacactctcaactgggccgtacatcgccacctcttctacgacgacgcttcaaacctccgcgaaaggttcgaggagaacagacacgtggaagaccctgataccattgacaggctcataacggatgctgaagcttcctacaacaagtggcgccatcccgatccctatattgttccttgggctcctggtggttccaagtttactcgcaacccaactccacctcaagggattgagatagtttataattatggccgtgaagataatgactgaaatcttattttatttttttttgcacccttgcaatgaataaaggtctgcaatcaaactgttctgtattcacaaattgataccgattgagtccatccatgcttatgatgttgaaaaatttgatgtcctccgaaccagatggtacctggattttactgtttttaagattctgtcattggtacttgttagtgagtctgaatttttttacataaagaaaaccagttgcatatattggccgcttataaaaaagtaaactgttgagctacaatatcaccctattacaatggctaatgagagctagtttagtacttattacaagggctaagaacaaccagataaacaagagtaaaagggggggtaagttgttatggttatatcatacgcttatcttttccattttttgttggtcctacttattgattttgctactttcatgggcatcactaaaattattgtagaattgagaattcatgacaagttcatttgatgagatatacacttttttctgtgcaagaggcctaaaatacctgcataaggccccatgcttttctttttgcatggggcattgtgtctatacttctcatcacggtcatcagatgaccctatttggcattgggtcatttgacctgttgtgtgagggtatcacacaaaatgttccaaatctgtgtctacctgtgttatttaattactttatacactttgtggcctttttctttgggaaatgtactgaacttctttgtgattattaagtgactaacatagctgggaataaatgtatctcatctcctctgcattatatactaaatgtgtgtgataattttagaagttaacaagcattgatctccccatatttcttcaatgagtacaattggtggatgagcaatttttacttttgaaaaagtgatggaatgctcaggaccagctaactgaaatctccgttggtcatattaatctaatcgtggagatgaaaactgttataagcttaact

SEQ ID NO: 18122 - DNA, 1922 bp, Glycine max
  Clone ID: PAT_MRT3847_116368C.1
tgtttctctggtgttattctcacataagaattggaattttacttgagtaataggcatactccttgctggtcctcgtggcttctgtcgacgctgccactggcagatcctcacacgggttcttggttggcccaggtggctgtggggtggtgtaccacggggaggattttcttggacggaaaggtcatgtgaattctcttattgtgtacttccagcttttcgcgtctaatttccagtgtgcagggaaaagcagtatctctataattttggcgatcgttgtcccaattagagttgcaattctacttttcattgttggcggctacttcctacgtaagagggcaagcaagaagtataacacttttgtccaggattcaattgtggatgatcttaccgatgtcggtgatgtggagtccttgcaatttgatttggctacagttgaagctgccacaaacggaattctcggatgagaacaagattggccaaggtggatttggggtggtttataagggtgtcctccctagcggacaggagatagctgtgaagaggttgtcagtaacctccttgcagggtgctgtagagttcaggaatgaagctgctcttgtggccaagcttcaacatagaaatttagtgagactattgggattttgcttggagggacaagagaagatccttatctatgaatacataccaaacaaaagtcttgatcactttttatttgaccctgcaaagcaaaaagagttagattggtcaagacgctacaaaattatagttggtattgctcgaggaattcagtatttacatgaagattcccagcttagaattatacaccgggatctcaaagctagtaatgttctattagatgaagatatgaacccaaagatttcagattttggtatggcaaaaattttccagtcagatcaaacagatgtaaatacaggaagtatatttgttatggagagttacatgtccccagagaatacggttctttgtcaatccaagtaagatgaggatcttttaagctttgtgtcttagttttggagattgtgagtggcaagaagaacactgagttttatcaatcgaatcatgctgatgaccttttaagccatgcgtggaagaattggacactgcagacacctctggagttgctggatccaacactgagaggttcttattcaagaaatgaagtcaacagatgcatccatattggtttattgtgtgttcaagaaaatccatctgataggccttcgatggccactattgcacttatgctgaacagttattcagttaccatgtcaatgccacaacaaccagcatcttttctgcgtggaagaggtcctaacaggttaaaccaagggatggactctgatcagtctaccaccgatcagtctacgacttgttcaattccatggtctgtgaatgaagtatccattactgatgtataccctcgctaaacgatggtttttcatgtttccttcaatcaatccagtgtatgtccaaatcttttcaaactttggggctactcttaaacagacctagcagatatatactgtaaatattaatggctaaaagaattatgtccctacttcatgctggatgccccaggagagaccagaataatttgcaatcttgaccaattccattgtctgtgaatgaagtatccattacagacatataccctcgctaaaggattgttttcatgttttctttgaccaatccaggatatgtttaaatgtgtcaaaccatggtgttgctgttatacaatcctagtgcatatatattgtaaatattaatagttaaaagaattctgtcaaatacttcttggatgaacacatacagtagctaaaacatgatgccccgggagagaccagattaatttgcaatcttcaccaattttgtttttgaaatatgttgttgatttacagaga

SEQ ID NO: 18123 - DNA, 149 bp, Glycine max
  Clone ID: PAT_MRT3847_116369C.1
caaacacctcaccatctccaagacaactctttttcctgaaactactacatctatgactagttaacacaccaggggccgccaaaaaaattctaccccattcacccaaatcaagcttccatatgactcaaagccttcatgcttaaactcaa

SEQ ID NO: 18124 - DNA, 2143 bp, Glycine max
  Clone ID: PAT_MRT3847_11636C.1
ccacgcgtccggaaggagccacgctcgaacacgatgcccctaaccaatcatcttaacataaaaacattttaacattaaaactcttttccatttctcactctcttctcttctcttacactctctcccaatccaatcaatggcttcttctctttccccttctccctcttccctcgaccaaacccttcgcgacgtcgacgactacgttctggaaaatgggtcagaaggtttgtcaagggacacacttcattatgtgtacgagcttgtgaagaatgggaatgtggcatttcgagagaacagaatggaagaggcaatcaacttttactcaagagccaataacatcaaatcaggtgatccaatcatcctcagcaatcgaagtgcagcttatattaggattagccaatatttcatgcacagaacaccatcatcttcagaacgtaggccattgagtgggcttgaacccacaacacttgctgaactgggtttgaaggatgctgagaagcttgttgaactccaaagtaattcagcaaaatcatatcttttaaaggccaatgcttttctactgttagagaaatatgaaaaagcccgggatgttattctttcaggccttcaagttgatccttttagtaattctcttcgggcttctcttcaaaatttggaaagtgtttcatctagttcaagagggatgagtacacatggacatccagaacgtaatgatgattttgattgcactctctgcctgaagttactgtatgaacctgtcacaaccccgtgtggacattctttttgctgttcgtgtctatttcagtcaatggatcgtggaaacaaatgcccattgtgcaggactgttctgtttattagtcctagaacatgttccatcagtgtgacattgaagaacatcatacaaaagaatttcccagaggaatatgctgaaaggaagcaagagcacgacagtttaatcaaagctggtgtagatttactccctctttttgtcatggatgttgtcataccatgtcaaaggtttccactcaatatatttgaacctcggtatagactcatggtaagaagaataatggaaggcaatcatcggatgggaatggctatacttgattcaacaggttccttagctgagtttgcctgtgaagtggaaatcacagagtgtgaaccacttccagatggtcgtttttatatagagattgaaagtcgcaggagatttcgtatcatccattcctgggatcaagatgggtatcgtgttgcagaggttgaatggatacaagatattatgccaccagaagggacaagtgaaagagatactttacagcaacagacatataatgcagtcgaagatgctagatcatggatagcaagagctaaagaagcagcaagacatggtaatttttaaactataattatatgatgtttacctaggactactttgtactttggtgatagtgaaacccaagatatattggtaatttttaaaccatcatcagatgatgtttacctactacctaggacttctttgtactttgattataatgacaaccaagatatattggtcatcgcctttttcttttcccattttttttgggggggttgctgaacatatatttccagcacttataggaatctgttaattctgatgatgctttagtttttgttatcctatgtttctgaatgggagtgacctttttcctctttgcacctttacaaatgacaatggactgctgcaatactaaactactggaatatcatacagatcaaagaaaacttgagagactcgccagtgttgaagtaatgatgccctcaccaaaagaccctgagcgctttagtttttggctggctactctttccaatcggaggcctgcggaaagattggatctcctacgcataagagacactgccgagaggattagacggggcctgatatttctccgccaggaggaacaagggtgcagaattcagtaagacaagctgaggagggctgccactattattgcaattgaatatttgtttattgcaaattcatttacaagtctttcaacattcttcggcctcataaacaaccgttgatgaggtcatttttgctgtaacatagggttgaacagtttttctaatatatataatcatctacaacacatttttt

SEQ ID NO: 18125 - DNA, 636 bp, Glycine max
  unsure (1)..(636): unsure at all n locations
  Clone ID: PAT_MRT3847_116370C.1
gctgactgcctcaggggatggtcttccttacttgcactttctgttccaacctgcgtctccgtttgtctagaatggtggtggtacgaactcatgatcattctctgtggactccttctgaacccaaaagccaccattgcctccatgggtatcctcattcaaaccacttccttggtctacgtcttcccttcttctctcagtctcgccgtctccaccagagtcgggaatgagttaggcgccaaccgccccgccaaagcacgcatttccatgatagtctcactcgcctgtgctgttgccttgggcgtcaccgccatgctcttcaccactttaatgagacaccgctgggggagattcttcacctctgaccaacaaattctccaccttacgtccattgctttgcccattgttggcctctgcgagcttggaaactgcccccagaccacgggctgcggcgtcttgagaggcagcgccaggcccaccgtcngtgctaatatcaatntgggctccttttatttgttggcatgcctggcgggttctttctcgggttgttgggaaatgggctttcctgggctcttgcctgggttgcttgcgtcccaaggctatgtgctgctctcattaatatcgtctctgcccactgac

SEQ ID NO: 18126 - DNA, 562 bp, Glycine max
  unsure (1)..(562): unsure at all n locations
  Clone ID: PAT_MRT3847_116371C.1
tgttttnanncaagtttcaaacaacaaaagagattttattaattggggtttttataaaaaaaatcaaaccctacacaatcaattgtgcaaattcactaatttatcttttaaaaagtttattttcattttttatgtttccaaaaaacaaaaaatattaaaccaaacgaaaacttttattaccatcccacatccttcttttacttctccatattcctaaatgatctaatttcataccaatatcagttcaaattttattgtaaaaccttaataaaacaaatcaacttattaatctttaaattaaaacccctaacccttgactaccaaaattcaaaactccattaaccaaaacccttaaaattaaaataacaaccaaattcaccctaaaccctataattcaaaactacttaacacacccggtcacattttacccaaatttccaaaacccaccaaccccaataccaaaaaaaaattgaaactttccccactcaaacaattttaacaaaaaacccattattccaaaatattactaaatattgttaaaaaactttttttttttattttt

SEQ ID NO: 18127 - DNA, 321 bp, Glycine max
  Clone ID: PAT_MRT3847_116372C.1
cagaccgacaaggacagatggaagggtcttgcctatgatatctcagacgaccaacaggacatcacaagaggaaagggtttggttgactcccttgtgggggcggcacaggatgctggaactcactatgctgtcatgagctcctacgagtgcgtgagcgcgtgacttcgccagtacttggacaacaacatggatggagttgacattgctccagctgttatggacggacttggtggtgcacattacgaggaacttgaggaccctgcccgacatgtggggccgtgtgggctgggtgtgtggggaggcgtggggcagagaagatcg

SEQ ID NO: 18128 - DNA, 135 bp, Glycine max
  Clone ID: PAT_MRT3847_116373C.1
ctctcaagccatttctttctataatctaaaccaccctaataacactcacgttattttatcctcatgtaatagccaacacaatatgacacggctcttacaataccatacttgactttacaataccaatcattaaca

SEQ ID NO: 18129 - DNA, 1051 bp, Glycine max
  Clone ID: PAT_MRT3847_116374C.1
cttatctcagtctcacagtctatccattttatacttccatttgtcctttatctctcaaagtttatccattttgtatttgcatttttaccttgacacgaacatctcagctgttcatcgactggatcgccttgtctcaggacttcttattttggccagaaatgctgcaaaagctgacatttttaggcaacagatagaagccggcttagtccacaaacagtatatagcaaaagtaggtggagaatttcctgaggatgaggtaattgttgatgccaatatagactataatgcaagagaaggaaggagcacagcagaggtcagaggctctgcaaaggggaaggctgcctctacaaaatttacccggattagtactaatggaactcaaagtattgttttatgtgaaccaatcactggccgtactcatcagatacgcgttcatttacagtattcagggcacccaatagccaatgacatgctgtacatctcagaacaaactgttgatcgatctgttaaagggttgagtgctgatagatcagctcgcatttctggtgtttcactgacatcaaattttaatgaaaaagtgctcaatgaatgtgaagaaaattccaatggagactttggcatcgatcccatgtgtacaaattgtccaaatttggcacccaaaggatatgatagtgatgaagaaggtctgtggctacattgtattcgttactctggacctggatggacgtatgagtgtccatatcctgattgggcaaaacttggctagacaacttgatatatttttcatacgacatttcaaacaaatatacaacggcatgttatcttgagattaaaatttgagttttgatggttagtgaaagttatttaatcttttgctattattcagggacactggattgtaatgatcaatgataactattattgctattattatttggttcacttaggggggaaggacgtagaataaacaacagatgtattctattgtaagatgactaaatattttgttagtgcatatgtacttaacctttttggtgttacttatcaaaaa

SEQ ID NO: 18130 - DNA, 273 bp, Glycine max
  unsure (1)..(273): unsure at all n locations
  Clone ID: PAT_MRT3847_116375C.1
gcctgnnttcaanttcaaangggattgttgggggngtnaanaatcgtaagaaaacaaaagctcaancgnaatcgaatccttcaatttcattctcttcnnggtcancggatcgtcatgtacagagttgcaacatcaatcaattcaagaanggcaatctcnaagggccatgggagggaaacttggggatccaatnaggttttcnaanttcagccggcnggtactggcaaggganctcnatccaggngggtttgttttaagctgggcttacnggag

SEQ ID NO: 18131 - DNA, 107 bp, Glycine max
  Clone ID: PAT_MRT3847_116376C.1
cgaagtaagccaaaacgcaacaccggtagttgaatttttggacgtggaattctagcgttcgggaattcgacggcgaagagcagagggttattagcacaacagcagca

SEQ ID NO: 18132 - DNA, 194 bp, Glycine max
  Clone ID: PAT_MRT3847_116377C.1
agtaccatcacaagcgaagtttattgaaaaacgagaaagtccagctctaacgcctttaggcttgcttcctgataatagcacttgtataactcaaaacaaacgtattagaaaccgaataaattccaaatcgctcactttcccgagctttagacttaaccaagcgttccggtgttcgacaatccatttttctgtgg

SEQ ID NO: 18133 - DNA, 298 bp, Glycine max
  Clone ID: PAT_MRT3847_116378C.1
cgactcgatctcgatcaatttcgttgcttcagtcacatgcttattagcagttgtttctaagctaatggagcccgaatcaaaactgtcattgttgcaaagccttcaaattagtcgtgtacttaggttagtgaccgaggatgtctatgttgagctggtctctgatatagctgcattgctttctgggtatgctgtggaggccttggattgctttaaacgcataaattctgaggatgctaaaggaatctctatggagcttttgagtgaagtttaccctccattttctatgtaatgaataatt

SEQ ID NO: 18134 - DNA, 197 bp, Glycine max
  Clone ID: PAT_MRT3847_116379C.1
ggttggtaaccttacttcctcaattgctaaatttggaatgaacaattttttatttgacttcaaatatatggccaaatcaactgacttttcccccccagctgtctgggaaaggaaacccttcttttcttattccagttatctaaataggaaatttaaattaattctgccattttcctgtttgctagtttcaatccagg

SEQ ID NO: 18135 - DNA, 666 bp, Glycine max
  unsure (1)..(666): unsure at all n locations
  Clone ID: PAT_MRT3847_11637C.1
attggagttgcgggtgtgcagagaactttacatttgaagttaagaacatatttttacacttggttctatattggcactacatgatttcttgaatttgtagaaagcatcaattaaaacgacaataagaatcttatgttagacaaatttgttccaaaaatgtgtggactacttgaatagattcacgtgtaagactactttattctaaggattcaaaaggtgagtttctatagttctactgttcaatgggtccctattctcttctgtctttaacttcaatcaaactcgaggaagagaagcataaaggtggtgtctaaaagctttttgtctggaaaggaaaatctgggttagtcctttcaagctttttctggctagagtattactgagatcttgactcagaaaatcattagtttggcaattaacaaatcttgggtttcactcaaggaaaaagacaagtaggccactatatattttggttagtgtttgttttgcaatctctcgttttctttttctcttgctatcatattctctgagtgtttttggatcttccctttcagtggcattggtatatactatattattagagatatagattagtttagtcagttacaaattagttattagtttagttaataacaagtttagttatataagatntaatgtattaat

SEQ ID NO: 18136 - DNA, 458 bp, Glycine max
  Clone ID: PAT_MRT3847_116380C.1
cattattcttaaaaatttaataaattaaaaggcacgtagtatatatatgtccttgatctataccataaaataaaacttcaaaatttggtaaatacaaatgtctcgattcttcacatccggacatcctccctctctctctttttttattcacacatactgcttaagaaaacaaaaacgcagttaaataattacatgagtttattgtcgttttcccgcaaggaaacaacaccgcatgcacggtgggtgcagttcagcatccaacctttgtttatgttatgccaaaattagcatttggcagcgcaacagttcacattagtttcacacgtagtacgacacagacaaacaccaacgtcagagaaggaacaattttccaacgttgaaatcattcatgcatgtccctttccgttcaaaacctggccgccacgtgtccctccctcacacaatgctgattccacaca

SEQ ID NO: 18137 - DNA, 205 bp, Glycine max
  Clone ID: PAT_MRT3847_116381C.1
ctaaaaaactccaatatcataccatcacctccattcacaagccattcaacactcctcatcttactactatcacattttccaaataatcccaatacattctctcctatcatccaaatccctaacaatcacaacctacatcttatcaatctcacctctatcacatcataaaaatcttccatcactcctatattcttaaaaataaccc

SEQ ID NO: 18138 - DNA, 892 bp, Glycine max
  Clone ID: PAT_MRT3847_116382C.1
tcgcgcccgatccgctaagcaacacacccaacaaaaaaccacagaggtgctctgttgctaagttcttaactgtgaattctccaatagtattatcaatgttgagagtgaagggagggagcaggccgccgtgggttgggctcggcgccgccgtgtgggtccagatcgcgtcggggaacaccttcaccttccccctctactcccactccttgaagtcagttctcggcttcgaccagcgccatgtcacgctcctcggtgtcgccatcgacatcggcgaaaacctcggcctcctccccggcgtcgcctgcaacaagttgcccccttggctcctcctcgtcgtcggctccctcgccgccttcctcggctacggcctcctcttcctcgccatctccaaaactcttcactcactcccttacatactgctatggtttgctctggttgttgccgctaacagtagtgcgtggttaaccactgctgttctcgtgaccaacatgagaaacttccctgctagcagaggctctgttgcggggattcttaaaggttatggggggcttagtgctgcggtttttactgagatttacagcattgtgcttcataattcttcttccaagttcctgttgtttcttgctgttggtattcctgttgtttgcttcagcatgatgtttcttgttaggccttgtactcctgccacaggtgatgaccctgtagagccttaccattttctgtttgtccaaggttccagtgtggttttgggtgtgtaccttcttgcaactacaatagtgggcaatattattccatttagtggtgcgctttcgtatgttttggtggctgtgatgattctgcttctcattgctccacttgcctgccctttgaagatgacattgtttctaggcat

SEQ ID NO: 18139 - DNA, 348 bp, Glycine max
  unsure (1)..(348): unsure at all n locations
  Clone ID: PAT_MRT3847_116383C.1
gnnggggnntttgtttttttttttttttttttttttttttttaaaacaaactttaacaggttttattgcccctcctgttttacgggcaaatgggaacaagggggaagaatccctgaataaaaaaatcaaattttttcaaaattttttttatgatttcaaaagatgaacaaaacttgaacataacttgcaaattaaaaaaaaaagttggggtgggttcaagggggaacataggggtcaatagagtaaaacctgtcccctcatataatggggggggttttttttttggcctaaaaacagggttggacaaaaaacaatttgtttcagggggtttgcccgnttccccccccg

SEQ ID NO: 18140 - DNA, 1067 bp, Glycine max
  Clone ID: PAT_MRT3847_116384C.1
tacgcagagtaatcaacttaactttttcacgtccaaatttgagatcggaaagtcgtgttgttccgatcaggaaaagcacatgcattaatttacactttacagtacttaagaaagctacctgacctagggtgatatatacatagttattgtagtcttaattaggtgcagctgccacggaaccaaacgataccgtttctatggcagttttttttttaagcgaacccttaacttacctcgagagattagaagcagttattaattagttatttgttataattattagaaagctaagcttaagctaagagcagctttaacgtctaatctccaggcaaagccaccactgtccattctccacacatcacatggcaccgttctttctatcccgcacgcgtaccgcaccctcaccctgcacgtgaaacctctgtacggatacggtacggccactttcattgccaaccatactcctccagcacctactgtttccctgtacgcctcatttgtccacgtcaccctcccgtaaccatccgatataaaccccggacacgtgtcctctttcagcttcaccttccgttcctcgtctccactccccaaccctaacccctcatcctgctgctgccacgtgtccatcacgcactccaccgtcaccaccgatcccgctgccgccgtcgcctgcgagtaccagcaaggatccagcttctccgaagcagcaccgccgcggttctcgaagttgttctcgaagctcagccacacaggtacattcttgttctttagttctgaggtgattttcttcggacctggaggtcccggcagcagcgggagagtcaccgccggagaaggaggaggaggaggcgcgtttctcctccggcggatccctcgactgcaccgcttgctggcggtgttatccttccgcttggcggagccggtgctttccgacgaggaagcgtcggaaagagcggcggcggcggcggggaggggtttgggggcgatagggcgaaagcgtaacattattttgtccatcttggacatgttatatgcctcgcgatgcaacaggcacccttagtttccag

SEQ ID NO: 18141 - DNA, 576 bp, Glycine max
  Clone ID: PAT_MRT3847_116385C.1
tttttttttttttttttttttttttgttttcatttaggtctcctcacaaatcttattgatcacaaagaaatagttgtcatcttgtagtaatacagaatttcttttttaagaacatgagatatatatatatatatagaataaaagatcaaagaaagatatcactgatgagtcgtgtcccatgatataccctagaaattgacttgcttactgctttgtgattgagacttaaggccattaagctccaaataagctttgcaatccaaactgtgaacgtttgcttgtgccttgttttttgacactttgcttcttggacaccactggttgtggttgttgaggttcatgatttggaacaggtacagtcttcaccaaattcttgtacataagattgtagaacatcttgatgtatctttgctttgcctctttttgttcattattcacccgcctccagaaggtataactgctccccatgttcaacatcttgtttgcatagatcttccatgtatagcattcatttatgcgttgcaatccggctgctgaaattctattccaatgtgctgaatcttgtaagcatttttc

SEQ ID NO: 18142 - DNA, 225 bp, Glycine max
  Clone ID: PAT_MRT3847_116386C.1
tcctctatagcggccgcccttagtttgtttttttttcttttctaattacaatcatatcctaagaaagacctaagcgtaaaattccgctgaaaaatgtctcataacgttcaatacaaggcatatgcctacttagcatttgaaagactatacttttgttacggctttgtaaaagcatagatgggggcatatatttctgggggactaagacaagcttgggggttctaa

SEQ ID NO: 18143 - DNA, 200 bp, Glycine max
  unsure (1)..(200): unsure at all n locations
  Clone ID: PAT_MRT3847_116387C.1
ttttttttttttnttnnttttttgggcgaaaagggcggttattccacttggccctcaaaggggcctttacgccgagaaacccccttctctttaagaaacaatttttgaataacccatttaactggaaaacagagctagaaaccttttttaatatactccctcagggcggacccacgaaaaaattccaactctttttaagg

SEQ ID NO: 18144 - DNA, 311 bp, Glycine max
  Clone ID: PAT_MRT3847_116388C.1
gggcccccaaacaaagggatttattaatccattcgatgttcaaagggtaaaaaaaacaataaaggtttaaatgcccaaatggtttttaacagaagcttaaaaagccaccaaagaaaaacattaccgtttttggaaaaccagacttattttcacaggggcggaataataaagacccttaggggaactacttttcctaattttcctcattccagcactttaaagttgatttaggggaaccacagtcactagttttcccgaatttttggtagacaacaaaaccacccatttcaagccctttgggggttcttttt

SEQ ID NO: 18145 - DNA, 483 bp, Glycine max
  Clone ID: PAT_MRT3847_116389C.1
atggtagtttctcttttcttcctttcccactactgttttcttccttcaaaaagcgcttttccgaaatcttactctactcttttctccaaaagcttccctaacaacaacatatcacaacaagcgccctcctctccgacgttaaggaacagtttccctcctcgattccactttcttctggaacgaacccaatcggcccgccaccaagcacgccgcgcacgcccttgtcaatctctccaaaaacggcgccatttcggcgtgtgccaaggccaatgccgtttgagcacgaggtcgagaaagggagtgctttcgcacttggacttctcactgtcaaggataaaacttccagacattaacccagacgcgttaactcctttaacagttcctatcttcaaggattcacaattcaatgacgaaacagttgttttattcaacctggactttaacatagtcaagaacagggaccaaacaattgcagttaattaa

SEQ ID NO: 18146 - DNA, 380 bp, Glycine max
  Clone ID: PAT_MRT3847_11638C.1
cccacgcgtacgcccacgcgtttttatataatcaaaaaacaaatacccaggcgaacaaaacgaggagaaggcaaaaaaaaaaaaagcagggggggcgcgggcgcagaacccacagaaaggaaggggcggccccaccagaggaaccaagctaccgaacccgggaaggacaccagaaaagcccacaaagggggcaacccaaaaacaaaggccagggccggcgaccaacacccccgggacgggaaaaacccagggggaacccaaccaaaaggccaggcagcagaaccacaagacgccaccgggggcaaaaacaaaaaggcccgcaccaaacaccactcccaaaaagggcaccacccccgaaagggcaaaggggaacccccccc

SEQ ID NO: 18147 - DNA, 157 bp, Glycine max
  Clone ID: PAT_MRT3847_116390C.1
actgaaacatgactcaatttaacaggagaggggcaatccaatttaagaacaaacacatattttcctcataacattgttcccaaacttcactcccactaaccccctattttttccattcttgcacaccaagctcattaaagttttatttccgaaaccg

SEQ ID NO: 18148 - DNA, 423 bp, Glycine max
  Clone ID: PAT_MRT3847_116391C.1
accagcaagtatgttgctatctattatgcaaattgtttgctatatgtataacttagtgagttttttcttgatctgactgagtttgttaccttgcttcttcctatttataaatatgcctaaggatgttgagttttgactagaaaaactgaagaataaaattttgcatatgtttccaaaaacatccaacagccaaaaaaatttatgattgaaagtttcatacctgaagttgaaattttatagattttctaagaacttgaagcttaggccactgtgatgagatgttgaaatgaataatcatatgctttttgtattatcctctgcatttgtttttcctacagtgagagaagaataagtatgatgctttgtttcactgtgattacaggtgatgtatgagaacaaagccagactattatgtactgctga

SEQ ID NO: 18149 - DNA, 1146 bp, Glycine max
  Clone ID: PAT_MRT3847_116392C.1
gctaattgcaactttagcttcttttcttcctacaactacacaatcacctgccactgatggtgccaagtcagctgtaggttcctcgaccatgaagcctccatttcctcccatgacaccaaatgatggaaatcaatctcatttatggaaacaggataatcaaattgcagatcaatccactcatcctcctcaacagttgaggagcatgtataacattcacaatgctcactatcagccctatccaccagcatctgctccttctggcaatccttctcaagtggtctctggcagttctcatatccaagatactgctgccagcatgcagcagcaaggtgctgtttcatcaagacacatgcctaatttcatgatgcctactcaaagtggacaggtagctgtatccccccatgccagtcagaattatcaagttgaggtctcccccagcaatcagaaaggttttggagtggtgcagggaacagatgcctctgttttatacaattctcaggctttccagcaacctaataacaattctctggctttccaacaacccaataattcttttgccttatctaatcaagttaatagtactaatgcttcacagcagcaaactgccatgccatatacagtggaccaggtaaacccggacacccccaatcagcaacttcctatgtttggagtcagtcaaggacaaacagaggtagaggctgataagaatcagagataccagtcaacgttacaatttgctgccaatcttcttctccaaatacaacaacaacagcaacaagccccaggaggacatgggccaggacaatgagaattgttttctgtaatgaccgtgcttagggaggagatacatggtcgtacacgacgaaggtgacggcgacttggcgattgttcgacggccatttttatttaattgaactagctcttttatcaccaacttactctttccttttaacatctctgctctctacaatctacaaaggtgtaaggttggtttttgattgttgttactgtttaatgtatataacaattttcatctgatgtcgttctaactggaatacatgttttttttgggcctacaaaaaaaaaaaaaaaaaaaaaaaaaaaaaaaaaaaaaaaaaaagggcggccgctctagagactccaagc

SEQ ID NO: 18150 - DNA, 153 bp, Glycine max
  Clone ID: PAT_MRT3847_116393C.1
gacagcactgcactcttcgcaacacaagagaggaagacaacccatagagcgcgtcttaataaacgcgcgtcgctgaaaacccgcatttcgtttcgtcgtgcgtcgtcgcgttcacatcttcgatggtcgatcgtcgtcgcggaaggggagaga

SEQ ID NO: 18151 - DNA, 458 bp, Glycine max
  Clone ID: PAT_MRT3847_116394C.1
aaaaaaaaacccccccttcacacattattacgacatttaaaagagggggggaaattttcaaataggcagagcttactcaacaagaggggcctccctaatttcctttattgaattaaacaacccaacctgcgaaaaaaaacccgatttccaaatcatgcagaggattccccattttcaaaaaatctggcagtaccctggggaacaaaaaaagctggcataaaagttttaccagcattttcaaaatcttgaaaaatccccaaaaaaatatcaaaacctggaaactgtttgggattgccaataaggaaactcaaatcccctgaattttgatttgcccactcaaaactccacttttaaaaacctttattaggaccccctccctttattgggaaaattaatccccaggaagggggttctgattttgcccacttacatgcataaaaaggctcttgactggggct

SEQ ID NO: 18152 - DNA, 380 bp, Glycine max
  Clone ID: PAT_MRT3847_116395C.1
agctagattacttttgttccacccctctgatatcccttaaatttaagatttcttttcactttcatttacattactgggggtattctgttatttacgacatactaataactgaatagagttgttgccagcgagaaaaaaacttggctataccatacaactacaaacataactttatccactttcaaccatgaatatgcaatttatatataccactcgacaagaatgggaaaaaaataaatggaattcaacatcgcaaattcgggaaataacccgttggacttaacccaattccttttcccgagcatctggattaactataaatcctaatcgttgtaaagattgaaaaaggcaaactattatatatgaagggtgctgggggg

SEQ ID NO: 18153 - DNA, 532 bp, Glycine max
  Clone ID: PAT_MRT3847_116396C.1
tttttttttttttttttttttttttttttttttttttttttttttttttttttttttttttttttttttttttttttgggaagcaaaaaacaacaccagaaaacaaatttgggaacaaggcaaaggttaataaccccaaacagtaaaaaaacccggcgcggaaaaatccaaaacccaaaaaactggggaaacccaaaaacaggccccacaaaggaataaaaagcattccccgcacccaaaaataccccccaagggcaaaaaccaggaaaaggaccgggggaaggggggggacaaaacccgggggggggggggggaaagaattctttaccagcaaaaaccgggggggcaaaaggggaaatttggggggccaaattccacttaaaagaaaggggttccaaaaagggaagccaaaccaaaaacttcagtttaaacccccccaaaaagggcgccctggaaaccccaaaagggcccgggaaaattttggacagggcccttttgaacaaccaaaatgggaccccttttttcaccccac

SEQ ID NO: 18154 - DNA, 564 bp, Glycine max
  Clone ID: PAT_MRT3847_116397C.1
tgtaggagtgccgcctgcttgggggggggggggggggcctctcgctgtgagcctgagcaagagctgtgaaactggtgggaggccgtgtgaagtctattagggggaaacgcgaaatgaggtagttgaagttaaggacaggcactgaattagatttgttgtgcagcagcaggtggtccaccttatacgactaagagtaacggtaatacagggtggcggaataaacggataagcggggtgcagggtgttgggcggtttacgcactatattaagcggatttagtggaagtaggcaacttgtaaacctagtaaacaacataggggccgtatgctgcaattgaggcataagcccaagccgagtcctattcccgcgtcacaatactgtggcagtatgtgcaactaactttggtggcattgcaacaggccacaacgacatttgcgtaaggggagtaccacgcatacccgtaaaaggtataaccggcggcccgttattaggtccctagagggcctctaaggcggctaacgaacggcgcgtaacacggccagtagcgggcttgcgcttatgcaa

SEQ ID NO: 18155 - DNA, 197 bp, Glycine max
  Clone ID: PAT_MRT3847_116398C.1
tggacgcctgcggtaccggtgcggagttcccggggggacccacgcggcgcgctgaattctctggcgctctctctctctcgcgagcaatgagtgggtttgcccaatcagcaaaccgtggattaccctagtttcaaactcgtgatcgtcggggacgggggggcaggagagacaacgtgtcgtgaaaaggggtcttaccg

SEQ ID NO: 18156 - DNA, 962 bp, Glycine max
  unsure (1)..(962): unsure at all n locations
  Clone ID: PAT_MRT3847_116399C.1
aggcttgattcagcaagaatgatcttccattgcatacttaagcataaaatacacaaataattgaacctttactgatggagtaagtaacttatatgccaacacaatagaagtcacaggtttcttagtttcttcagtagtgtcatttcnttcttctccatcttcatccagctcctttcttctgagttcattagtaatggttgtgtacgctcgttccctactgcaacttgtactactggttctgtatctgcatgatatagcacaagatttccttgattctcatgtgcgggttccttgaaacaaatccacaaccacagtagatagacaagccaagcaagagccattatccagccaggcagagtgtcttggttcatggtgaacctgtaaatcctaaaatttgtctgtaacaaacaagcaagagctggaccacaagccattcccagagcacttgcactaacaaaacctgctgaggcctgcatccgaagtttcaatggtacacagtcactgatataacgcctattaacagccctagcagagcctaacccacagaaaagacgtcccatcagtagaactactattgaattcatatcaaaagccaaaaaaaacaaggtgttcccaactacaagaacaatgctactgaagatgagtggtcgtagatatgaacggttcgaccatgcactgaaataaactgaagaaaacacctgtgcaacagccatcataccaatgaccacaccacacacacttgctgcagctccaaggctcaaggtatagttgtctgccgtaggtacaataatgtaagtgttcccaatatacaaaaatgtatttgccaagttcaaaagaagtgacataaaatgatatctttcatcaccaatgtgatcttcagatgaagatggtagctcttcttgcatgataaaagcatgtcttcccaaaaactgaaggaagtttgttgagtttgataatctgtc

SEQ ID NO: 18157 - DNA, 203 bp, Glycine max
  Clone ID: PAT_MRT3847_11639C.1
ccgtatcgttacccacatgaccagaaggatgctatcgagaaatttgtaagagatatgttggcagcatgcatgattcgaccaagtgtaggtccttactctagccttctcattttagtttagaaaaaagatggaagttggcatttttgtaccgattataggactttgaacaccattactattcccaataaatatcctattcctac

SEQ ID NO: 18158 - DNA, 1033 bp, Glycine max
  Clone ID: PAT_MRT3847_1163C.1
cccacgcgtccgcgggtgtattcctgatgataagtttggtgggttcaaagatgtgggcaccaatgtgtcttgtgttgtttcaaggagggacatggcaacccagatgagcccacaggggatgtgcaggtagatgaacacttaccgtgacaagatggtccaagaaacatagggccttattcactggctgaggctcagaacaagtcaaaagctggaaaaaagaaaaagtaagcactcaattgtcaacttgggatgtttctgaaacgccaaaacctgccccaaaggcaaaaagtgaggaagccaaaatctctgcatgggagaacttgcaaaaggcaaaagcggaggcagcaatacggaaactagagatgaaattggaaaagaggcgagcatcctctatggataagattatgaacaagcgtatattggcttagagaaaagctcaggaaatgagaagttcagttccacacaaccaaactgatcgggttgtaagaacttcacacaaggcttcatgatttcttagaaccagccagatgcgttctttgagtggttgtttgacttgccatgccttttaagcattctttcattggtttgctgagaggtggattatcagccctgtttcggcagatacagagtcagtcatcatcaatgcccctccaaggacaagaggtgaggaacccaaaatctctgcatgggagaacttgcaaaaggcaaaagcggaagcagcaatacggaagctagagttgatttaagttactgagacaaaagcaatggtgactgagatgaaacgtcgattttgattagagtatgatacggagaatatctaaggtgcaggctgtattattactcttgggagcacaagaaatgacaaatagtgcccccacctgacttttttttgcagcaaaactatcatgacattatagtatttctttaggaattgcttttctctttgatatattttatcaataattgctattttgacatattattaagtgttctaaaacttgttattgtatgccaggaaataaatgatcattcc

SEQ ID NO: 18159 - DNA, 408 bp, Glycine max
  Clone ID: PAT_MRT3847_116400C.1
gatccatgctttttttttatttttttttttttggtttagttttttaatattttgatatttttttttttatttttttgagatacttaaggcatatgggaaaatttggctagcactcaaaactggagttttcaaaaaaaaaaggggctggaaaacaaaaaaggaataagggaaagcaaggaacatagcgagcaaaaaagggtgaaccaaagaacaattgcatgcaaacatggggctgggtctcaaaaccgcggggggaacatgactaacaaggaccctaagcattataaactggccccaaatggcccacaaaggcgctagatgcccaatgaacccttttaatacaaaaaaacgtgtggcgaggggacgaaagttgccatagcatgtagctgcaaagtctttgtggaaaaa

SEQ ID NO: 18160 - DNA, 1222 bp, Glycine max
  Clone ID: PAT_MRT3847_116401C.1
ccaccacctcccatttatattcccttctctcaccaattactttccaggttccattccccccacacacaacacaacacaaccaacatatcttgttgttatttgctctctctcaaaccatgggaagatccccttgttgcgagaaagaacacaccaacaaaggagcttggaccaaagaagaagacgaacgcctcatcaactacatcaagctccatggtgaaggctgttggagatccctccccaaagctgctggcttgctcagatgtggcaagagttgcagactcagatggataaattacctcagacctgatctcaagagaggcaacttcactgaagaggaagatgaactcatcataaacctccatagcttacttggaaacaaatggtctttgatagctgcaaggttacctggaagaaccgataacgaaataaaaaactattggaacactcacatcaagagaaaactctacagccgcggaatcgaccctcaaactcatcgtccactcaacgctgcctccgccactccggcaaccaccgtcacagccaccgcagttccatcttctaacagcaagaagaagataaagaacaataacaacaacaacaacggttttcagttggtgaataatagtgcttatgccaacacaaagattggaaccgacatgattgctgctgaagattctaacagcagcagtggcgttacaacagaagaatccttccctcatcatcaactcaacttggacctttccataggtcttccttctcaaccccaagtttcttcttcgttgaacccagaaaagttgaaaccagaaccgcaagagcatgatgatcagaagccacaggttttgtaccagttgtatgggaagaacatcactggccaacaaggtgtgtgcctatgttacaatctagggcttcaaagtaaccaagcttgttattgcaaaaccatgggtacttctactactacggttactaccacaactgcgaccgataggaatctatatagattttacagacccatgaacatttagaccttaaaatgtcatgttaattaattattgtgacctctttgttaacatggaaatagttgtagaatcccaaaattttgagaaaatttagatcattttttgtgtccgagaaaatttagatcatttttgggtctaatttttttcattttggttttaatcttttatttatgagattgaattcaatttttgacccttaagttaat

SEQ ID NO: 18161 - DNA, 1569 bp, Glycine max
  Clone ID: PAT_MRT3847_116402C.1
gttggggtatttttttttttttttttttttttttttttttttttttttttggagaaaaaaaaatgttataccgagcctttataactaccaacttaagcatgtagaaagaaaattgatggataacagcttacaaacttgaattcagagtgtacatgcacaagcacaaagaacccaacagatacgttgctgaacttttaccctataactggacagagttcaacaaaagcctccacattagtttgtcttgactctcgtgtaatctcttctcacctgtatccacatcaaatttgaggtactctagaaaaacgaataatcattatttatgtgctgataaaattctggtaattttgattttgtgtaacaatcgattatacagtgtacacggaaaaaaaaaacaaaaatattgcaccacgatttgtcactttgaaatttcaggaatttccccttattttaacccaatcttcatatttggtgcacctcctgttttacctcatcctcggctgaattagacatttctaatgtatcatgtcgttcattggtttcgtgcttgctttcccatagcttactagctttcccaactgcaagaatcagatcaagctgttttcgctgttgttcctgcattgctagtaaaacctgttgaatttcaccaagttccttctccaaaatgtctgattgcactgctaatgctctagcagcctcagaattcttctgggccaaagctgcagtctcagcgatgggatccttcaagcccttcctcgtaaccctaaacctaacccccaatttctcgagctgtctcgacaaaaccctaacaaccgtcgcggaactcctcatatcctcctccaacttctcaatcctctccaacaagttcacctccaacccgcccttcccagtctccacacacgcgcgcctccactgccgcctccgaatccacgcgccgaccagaaccccgaccacaagcaacgcgccgccgaacggagcagctctggcaccgatcccggcgatgagctcgttcttggaacccgcgagcacagcggcagcagcggaggatatggcggaagagagcagacacgagaactcgagcagcgaaaggagcgagtcgaaattggaatcggcggcggcgcatgttcggatcggaggcgaaatgagtcggctcgaactgtgagggaattgaagcggtgagcagtgaggttaaggttttgcgttgtgaggtggagagggcgcgaggttacgatggagaaagagagagagaggttgcagtttctgtttgtggtgaagagcgagtgggttgaggttgaagaaagtgaatgagggaagggatggtggtaacacgtgagtagcatggtttgttgcaagttgcaaattgcgttagtgagtatggagtagaagaaacaacattgattggagtatgagtatggttatagaagacatatcatatcatggtaggtttctgagctgaacttcggtgacgatagcttcgaggggtcgagtatatgcaatgcagcgctcccataccaccactggcactgagttgccgaactaggacttcatcatcttgtccacatttttccc

SEQ ID NO: 18162 - DNA, 594 bp, Glycine max
  Clone ID: PAT_MRT3847_116403C.1
tttttaaatttaataacaaaattgctttttttacttatatatatttgatacttagttatcagtaactacaaactctataatttatttacataaaaaatgacttagcaaaagaataataaaatgaaaactcatctgtcaacaaaacgaaccaatgcttgtcatctcatgaaaaacactggaaggaaatcctgcaaaaaaatctactctgttctaaaattcctttcactgtactaaaattcctttacgcgaacgagccaaagaaaaacgcagctgtcaccaaccattgcatgcaacagagagcgacaaatccacgttgtaaacactgtttcattcgctgtcaaacttcatagttcaaatccaattgtaacgcattacgtgtcactcttcaattggccagcaaccgaagaccttcgctgcgacctacctagcttctcactcaaactaaccagaacttgccacgtggcgtccccttcttgcaccttgttgttgttgaaaagaagggcccgccttgtccgtgggtcccacaggttcctctgaatgacactcaggttcgtcgccgccactcgctccagaatcttccccaacttccccacg

SEQ ID NO: 18163 - DNA, 265 bp, Glycine max
  unsure (1)..(265): unsure at all n locations
  Clone ID: PAT_MRT3847_116404C.1
tccgnattcccggtcgccccgcgtccgcaatgcctatgtccatgttgagagtggctgtgctccttcactaaggacatatggggggaaatagaagggacaaagggatattgccggcaacaatcgcggttcgaattcaaagtcactcgtttctcgcttctcctttggttggacgcatgtttgctggggcttctccgcttctgggggggggggcggagtgtcttttttttgtatcctnnggaaggttgcgcggccgggggggacacct

SEQ ID NO: 18164 - DNA, 883 bp, Glycine max
  unsure (1)..(883): unsure at all n locations
  Clone ID: PAT_MRT3847_116405C.1
ttnaccggtggaggcgggttaagtaccccctcagtaaggacttctgtacagaaaaattgtttttataaaaccccttgtaagtacaaattatggggagaccttctccacggtccgacaatatatacataccccatcgtaaaattaagaatttgtactaaaagatgtaagagctttatggaaactaatcctaagactagaacccagtaaaagctgaaggggtggagcatttccttttcttttctacttattactagtcagcagagtatcaaatcagggtcaagcttgttttgagcgataatgcacctcaccgttgtccaatctttatctcaaaaaggtcaaaccaatgtatcacctctaaggatattaaatttgcacagcgggcaagtagcttttgtccgaagccaacggctgatgcatccacaatgaaaatggtgtgtacagggaaggcgatacagttcttctccttcaacatatggacacagacagatacagcattcagaatcatctggatggagagaaagctcactcatatggcttccattgcatgaatctactcttactttaacaagttgcttcttgttgtcatcaaccatcaccaatgaatttgacaggctaaacctatacataggaagtgacctgatatcttcttctgatgcaccttctctgattctcatagcataagctaatgctattattgggatgatgcagaagagagcaatgaaaactatacatgccatccccatgcaaaagataataaaaaatacgtcaaaggctagaaagaccactgttaacccaatctttcacatgatctgtctctttttgaacccatacacaacaaggaaccacctgtaagctccccaaaatagaccaggggtctaaacac

SEQ ID NO: 18165 - DNA, 241 bp, Glycine max
  Clone ID: PAT_MRT3847_116406C.1
gcccaatcgatggcttcggcccgaggtatacccactgtttgcagctcttggaatatgtggtttgcagttggttcgcaatatctgcatcaaccccgatgtcatggtaagcaatgaaaaaagaaccgcaggactgcttgagaactctgccctaggactaaattatacgaatcatttcctaaataatttgttactcaacaaataaccagaaattataccctccatcaatagcttcttcgctaac

SEQ ID NO: 18166 - DNA, 218 bp, Glycine max
  Clone ID: PAT_MRT3847_116407C.1
aattctttcaggcataaaatcaagggtggattgtactattccggggaatgcccaccccccaagcaattaaaagccacaatttacaaaaactttttcccgaaagggaaagtttaccacgcttaccatgcaaaacgcgcattgtacgagcaaacaaaaaaggtccccagtctaatcctgggagggcctggcggactaaaagtcctattttccgagatgcg

SEQ ID NO: 18167 - DNA, 621 bp, Glycine max
  unsure (1)..(621): unsure at all n locations
  Clone ID: PAT_MRT3847_116408C.1
gcaaagtgaaaaggtatcctaaatatattgggccaatagaggctacaactcaattaaaaaataaaaagattttttttttggtacaaattaaaccttttaaataaggaatataactaaaaaaaaaagggaagagatagagagacagggtttgcttttgaatgtaacattgtacaagataactaagttagaccaaaaaatgccaagaggcataaaccttaagcataatagctttgtagctttcttcatcaataaattaacataggaaaccttaggtaagtgacaattgtgcaaaactcctttaaccaaacccctttgtgccacggttgcaaattgcaatgactaattgagccaaaataccatgtgaaattctgtgaagatcgtatagagaaatgtacttggcagccaaaagccaagccagttcttcaactttgatttagttgattattgagttgatgtggaattagtaacccaatactgcttgacagcaaccagcaccttctcaggaacaagaggaccatcctcatggtcaaccatttnttagggtcccatctcaatcctccaacttttttctttaccttaattagcacatcaacttcatcggggaatatgacagcccttttc

SEQ ID NO: 18168 - DNA, 511 bp, Glycine max
  Clone ID: PAT_MRT3847_116409C.1
cagagtcctgtcacacaaactcagccaaactctggtctcagctatcaaacacaacaaagccaactaaacgggttctcggggcgtgggtagaaaaaaaagcggaaaggaggaggggtgagcagaccaggccgggtggcgtggggggtgtggcgggaacaagggtccgcgagggggaatacggcgaaactatgtgctctgtgtgtgctagcagtagcgataatgataactagctgtgtgcgacggggtaattgctgctctggctaccccggcgaaaatgaagtaagagaaggaaagaaaggataggtgcgtgtgtgtaaaaaaaaaagaaaaaaaaataataaaaaaaaaaaaaaaagaaaaaaaaaaaccctccttcttcatgacgcactgtcgtcatttcccaggaaaggttcctttcgattggctacctcgtttactgggtttgagacccacgtcagggaaattggcctcgaagtagccttagactgcgggttgcgcgcaaaggcggagt

SEQ ID NO: 18169 - DNA, 193 bp, Glycine max
  Clone ID: PAT_MRT3847_11640C.1
ctccacctacatctctctgactacattcaattatctattatcctttacatcctgatctaacacttaattgactcattttctacctataacttaatcaccaacacttcaataaccacctatatgtatcctataaattcacttattcaaacctaaatacatatatccatacacacattttaacttatatcttctc

SEQ ID NO: 18170 - DNA, 380 bp, Glycine max
  Clone ID: PAT_MRT3847_116410C.1
ggggggggcacaaacgggggcaacaaaaaaaaaaaagctaaaaaacaccaaaaggcgaaaatcccccaacaaaggagcctaggagggggggttaccaagcaggcaccaaagaaaatacaaacccaacagggacaaacaagcgcgcaaaacaaccgaccaaaaagaacccaacaggaacaaaaaaaggccaatcagaaacaggaagcaaaaggaaaaccccatcaaggggccaggagggcaaaggaggggccaacttcaagcagagggccaaccgaaagagacaatcaacacataaaagcccccctgaggggggggaaacaacgggaacctccgggcgaacctgagagactgccaaccaccagccagccggggggtgcccc

SEQ ID NO: 18171 - DNA, 380 bp, Glycine max
  Clone ID: PAT_MRT3847_116411C.1
atttaatgaaaccttatatgatgaatgggttaacatgggcgacgcaccggcattgccagagacgcttaaaaattacaacatgctgcagtctcttggcttcaagattgcatactcgtcaggaagatatcttgacacaatggtcgtcaccgatgcaaacctaaagatggctggattgcacacatgggagcagttaattctcaaggatccacatcttatcactccggacgcactttcatacaaatcagcagtgaaagagaatctgttgctgcagggatacagaagtgttggaatcattggagaccaatggagcgatctgcttggagaccacacatgctaaagccggaccttcaagcttcctaatcccatgtactacattgcgt

SEQ ID NO: 18172 - DNA, 113 bp, Glycine max
  Clone ID: PAT_MRT3847_116412C.1
tactatctaggcttggtggagtatatgtgattgcaaggatcttaatatattgtgactcatatcgagtaatcacatacaacttattgtaactcgcttcttactagatagaagca

SEQ ID NO: 18173 - DNA, 460 bp, Glycine max
  unsure (1)..(460): unsure at all n locations
  Clone ID: PAT_MRT3847_116413C.1
gggccaagctcggtttacttttattgttttttggattcttcattaccgggtgataatgtcaccttgaaaatgttgcaacccatctgaggacaggacttgtttatttattttatgcgtacccattatttatgtttcatttgtaaaataaggacagcaaattctaatttgtctctcacatttcagctttctttcctcaacttatctgcatacaaggtgtattgccccctgatattcctgaccctctctgacccaacctgctaacagtgccaaaaagtgcatttaagagtaaccatcacctaagtttaaaatttttacccctgtaatcaaaaactttaaagggtgccaggaattgccaatgcattcgatacacaataatttaaaatatgaggggagttagtttcttagtggtgcatgctgagccaatttataatagcnaaagataggaggatgttaagtttga

SEQ ID NO: 18174 - DNA, 476 bp, Glycine max
  Clone ID: PAT_MRT3847_116414C.1
ctctgggaaaagtatagtttagaccttcaacaaaaactaacattggacaaagaatttgagagaaaggtaaaaatgttggagagggaagagcaaaagatgcacaaagtgatgcgggctcatgagaaaaagatggttacagttggcagagaagaatctgatgcactgttacgtggagatgctgtgcaccatgctgatgtcgttgacactactaacctacaatcaggtttgaagcagatctttggtgccatggagaagttcactgactccactgttcgcttatatgaagaactttgccaacaaattaagcaagaggagaaaccaacaaaaattaactagctttacactttttagattggatgaattttgtaggattgaagttatcacaattttctgaacctaatttttatgtatacggcatctcataaagtttcttcgaggaaacatttggttacttaatatttggggatttgtttttc

SEQ ID NO: 18175 - DNA, 218 bp, Glycine max
  Clone ID: PAT_MRT3847_116415C.1
ggccccggcccggaatccccgggtcttctctccacgcgccctttcattcaccagatagctcgaccacatgagaggggacttataaaaccatgcggggtttcaaaccccacaaggtgtcaatcacgagagaaactacaacaactcgggcaaggacgagcccaagaggacaagagaaccagtccctgtcctggatacagccaacggccaaagtcacctcc

SEQ ID NO: 18176 - DNA, 801 bp, Glycine max
  unsure (1)..(801): unsure at all n locations
  Clone ID: PAT_MRT3847_116416C.1
gggatggcgaccaagagactggcgcggcggcttggattaattaggagaaagtcagttacaccagcaagtggaaatccaggagggagcagattgaaacagttgtatgcctacttaattgtcgttgactttgagtctacctgctggaatgatgggaagcaccacagtagccctgaaataattgaatttccagcagttttgttgaatacagcaactggagagattgaatctgagtttcatgcttacgttcagcctcaagaacatccaattctttctgaattttgcacagaactgacagggataaaacaggttcaagtcgatgaaggagtccccctgaagatttgcttgtcccagttctgtaaatggatccataagctgcagcagcagcagacgatcagctttgctgctggggattcagagccttctacttctgaagtgaaactgtgtgcttttgttacatggtcagactgggacttgggcgtttgcctagagtatgagtgtagaagaaagcagctgttaaacctgtgttcttaaactcttggattgatctcagagcaacttacagggcttagatgattctcggaacactgctcttcttgcttggaaaatgatcagggnatggttgcttaatgaaaattaccaggtccttgaacagggttctcactaagaagaatcccaagattntggccagaaatttgggtacagaatcaagttgaaagagcagctacttgcancatgagtatccagggccccagcatatatcaaaaggagcttcaaagtacagtaaatgcagagggaaatgcc

SEQ ID NO: 18177 - DNA, 207 bp, Glycine max
  Clone ID: PAT_MRT3847_116417C.1
ttgacgcgttggagaatacatacctacagggggaggatctggagacggaatggctgtggttgccaacatgatcgaacatagctgggtacagggccttaatgagggcctgaaggacttggactacatcagacactgcaccatcagaatctggataaatggaacggaactgagcaagggtgagaaacgattgctgacataccagaatat

SEQ ID NO: 18178 - DNA, 751 bp, Glycine max
  Clone ID: PAT_MRT3847_116418C.1
ccacgcgtccgcaaatcagtgcatgaaaagaagaagaagaagaagaagaagtgagtttaaggggtttgagagacaagtggtttttggcttgttggggtgcttttgttaaatagaaaagtggcttctttgatgagttttgggggttttttagacgacaaatcaggtagtggcggtgccagaatcaacaatttttcagatattccttacaataacaacaacgttaccaacaccaccaccaccaacaacaacaacaacgatagaatgccctttggtgcaatctctcagccacgcctcgtgaccacaactcccactttagccaaatccatgttcaactcaccagggctatctctggcacttcaaacgagtatagatggacaagaagatgtgaatagaatggctgagaatagcttcgaaccgaacggtttgagaagaagccgtgaagatgaacatgaaagcagatctggcagcgacaacatggacggcggttccggcgacgaacacgacgccgccgacaaccctccgaggaaaaaacgctatcaccgacacacccctcagcagatacaagaacttgaagcgttgttcaaggagtgtcctcatccagatgaaaagcaaaggcttgaactgagtagaaggctgtgtttggaaactcgtcaggtgaagttttggttccaaaatcgtcgaacccaaatgaagacccagttggagcggcacgagaacacgttgctgaggcaagagaaacgacagcttcgag

SEQ ID NO: 18179 - DNA, 794 bp, Glycine max
  unsure (1)..(794): unsure at all n locations
  Clone ID: PAT_MRT3847_116419C.1
ccacgcgtccggttggttagagcatgtgactctgtatcacaggngtcgaaagttcaagtcttccttttagagcttattttttttttttaccagttctataaattaaaaggagttgtgctcccttgcgacttgtgaatcaatcattctattaaagcatgggaagcgtggtagaaagcagagaatggtacttagctgcatattcccctcacggtgtaccaaattccgataatctgaaactccgcaccgtcgctctctcattatcctctgattcaatccccgacggccacgtgtccctccagatcctctttctctccgtagacccctaccttcgcaccagactcaccggcaccctcgacggtctttacattcagcaatatccactcaacgaggtgattacagcatatggagttggcagggtaataggatctaaagacagcaagtacacggagggtgatcttatattaactccttctgcgccagtggctgagtactgtatcttaccctcctctcgtgtaattcgaaaaattgacgctgctagtggaatttcgctgccggattatctaagtgccttaggggtgccagggtttgcggcgtgggtgggtatagtggttctgggagacccaaagcctggttcgaatgtgttcatatctgctgcgtccggtgcggttggtatgagtgctggccagttagctaagattcgaggttgtagggtcatcggaagcactggctnccgacgaaaaggtgaagctcattaaagaggatttttgggtatttgatgatggattcaactacaa

SEQ ID NO: 18180 - DNA, 490 bp, Glycine max
  Clone ID: PAT_MRT3847_11641C.1
ttgtacggctgcgagaagacgacagaagggggggatgcaagcagagattttttcttacgcaggcagtggacacagacaccatgtcacttattaaccagctctttaacagaggcgttttcggcactcgatgcaaaacatgcctgaacctggcaatttcacgaattaagctgctgcaaaacaagagagatatccaactgaaacaaatgtgcaaggagattagccaattcttgcaggctggccaagaggcaattgctagaattagggtggagcatatcatacgagaacaaaatacatgggctgcatatgaaatattggagttgttctgtgaatttgttctagcacgtgtacctataattgagaaccagagggagtgccccacagaattgcgagaagccattgcaagtataatttttgctgctcctagatgttcagatgtaccagacttattgcacatcaagaacttgtttaccactaaatatgggaaagaatt

SEQ ID NO: 18181 - DNA, 239 bp, Glycine max
  unsure (1)..(239): unsure at all n locations
  Clone ID: PAT_MRT3847_116420C.1
cattcggttggtctcgttggtggcctctcagtacgaatatcaacccaccctgctgatgtacattagagtcttacctcatatctctggtgccactcagtgtacggaacagtgtattaaacgttttcgtaacagtcctcaccctgaaccttcgcgttctgcaacaacataacagcataancctctttctcctccttttcgcgttctcaaccaatttgtactactcattcactaaaaagaca

SEQ ID NO: 18182 - DNA, 222 bp, Glycine max
  Clone ID: PAT_MRT3847_116421C.1
ttgagaagacaccacagggggcgatgaaggcagggtgggaaagcatcactagcgagtccggtaacatctcactgaaactcaaagcatggaaatcaaaaatggtatgctagaagcacacaacacacatgtcagatgtaaaccataaacctccttatatgttaactgatctcgaactgcgacggacatatgaatatgcagatacactcggcattctgtctgttc

SEQ ID NO: 18183 - DNA, 356 bp, Glycine max
  Clone ID: PAT_MRT3847_116422C.1
cggactcttgggtgagaaactccctagtcgcaaaagggggggacatacctaagacgcgctgctgcactacactgcctatggagtggaaccacgtggtccgacagaagttcctaaattgtgctcggttcattatgaagaacagggacaagcttaagatggcaagctggactcaacccatactccatggaatggactggtctggccaatagattgctgagtaagggcaacgatattctgtgttgcgattatgctagttttgatggtttgatcaccaagcaagttatgagcaagatggcagaaatgataaacagtcctttgtggaggtgatgaaagattggatgcgtgaaaggacacac

SEQ ID NO: 18184 - DNA, 763 bp, Glycine max
  Clone ID: PAT_MRT3847_116423C.1
tactgctgcggcagacgacagaagggggagaacaattggacggcatcgaaagccacgtggcacgcgccaattcatacgtgcggggtggggtccagcagctgcacgtggcaaggaagcaccaaaagaacacccgaaagtggacatgcatagccatcatattgctcattattatcatcttgatcatagtcctccctatagttctaagaaaatgatcgatcacatattctaattggtatatggtggtggctgcgaagaacttggactagttcaaacttcagagattgttagtatcttatattagttaagtcaattcatatgctgcctagaccattgcattagaaaaatatataccttggcttttgtgattagttttattttttctttttttgggtcgcatcatgtgttgattaatttatattttccacgtacgcatttgtacatgtttgaagattgaaacattttggtttggtttatagaagcctatggacatgtcacatggtgcttgcgtgccccgtttaaaattattactttactaccgcgaagagaactcgttgaagcggttttatcctagctagggaagagagacgctagggcatgttgatgttcatggtggtacattcttttgcaaatatgtatgtaatttatatgaaattttaagcagctagataaatgggcgaactacttttatgtattgcaggagttagttcaattgttttgcgtgtttatgccgttgtacaaatgaattgccccttatttagtaccc

SEQ ID NO: 18185 - DNA, 830 bp, Glycine max
  unsure (1)..(830): unsure at all n locations
  Clone ID: PAT_MRT3847_116424C.1
tctatctgtctgtctcggctcgtcgttctagatcgcgatctagaactctctctctctctctctctctctctctctctcatgaacgacgcacttcccatgtttcctcggttctatagatggagatggaagctctgaatctcgctttcgccgaatctcgtcttctgtgttcagatttcgctattctccgtttggattgatgaaaaaaaaagccttttctcttcccgttatttttttctcgtcggatttggaattcgatcttcacctcatccactcgtaatcgctatccgaagcatgtgcggtggtccagagaaatcaaagtctctttcaactccatcttcatctgcggtagaaggttcaactaacggcaaagacatgaacaaattaacagttcatgctgcagattctttttcctgcttactcgagcttgcttctaacaatgattttgaagattttaagctagctttagttagggatgtttctctaataagtgaagttggcctctggtatgttcgccagattgggtccaaacaaattgttcttgagcaccgaactcctttaatggttgctgctatgtatgggagtatagatgttctaaaacttatactctcatgtccggagactgatgtcaatttctcctgcgggacagataaaagcactgcccttcactgtgctgcatcgggtggttctgttaatgcagttgatattgtcaaattgctcttatcagccggtgctgatatcagntgtgtggatgctaatggaaatcgtccagttgatgttattggtgttcctcctaagcttgaaggtctgaaagcacccttgaagatctactt

SEQ ID NO: 18186 - DNA, 267 bp, Glycine max
  Clone ID: PAT_MRT3847_116425C.1
gccacgcgtaccggtgcgcctacattcccagctgcgattttgaattctgtcctacgaggagatccacggggaccttgactttggcggcctcaccttattgctcctagaccaaagcacacaagctttggatgtgttgatgagcgcacttgatcagctgcatggcccgtctggaaaagactatggagagctaaatctatttgagtcgcacttgtttttgactaaaacagagccccagaaggatcacccggcaaatgcatatggacaacc

SEQ ID NO: 18187 - DNA, 695 bp, Glycine max
  unsure (1)..(695): unsure at all n locations
  Clone ID: PAT_MRT3847_116426C.1
aattgaaaggcaagaggtgaagcaaatggtagttgctacacttgctgaatctggcatgaacctatcagatgatgttatagaaagtataattgacaaggttttaccccattttctataacttacatttctaagttctaatagtgcacatgagtcttaagagtctcattttctctttttgaaaactcacatggatagtttcaacattaaattttggatttctttagaccttcgaggaagcagatacaaagcatgatggcaagattgacaaggaagagtggagaaaccttgttttgcgccatccgtcacttttgaagaacatgacccttcaatatctcaagtaattctttaattaatatttttctagtcaatttctgcggtactctcccaagtggagataaccaaataactgttctttattttaaaaaaaaaatggatgagatgtgatgtggtctctacttcatcggaaagtctaaaaccaaccgcagcttatttggtattagtatactataaattaagctacaaagaaagatagaaaggtctaaattagaaaaatctcttcatattgaaggacaactactttgctttttagtgattgaaattgtgaaaagagtggcagatgaatactaactttgaattcaggaagagatcaacttgaatatctanattgatatatgtgactcatggtggggggtggg

SEQ ID NO: 18188 - DNA, 411 bp, Glycine max
  Clone ID: PAT_MRT3847_116427C.1
agctcgaggcggaagaaagattgatcaaattattgcacaggaattgaacatgggttggatagggagactgggttctgaatatggtctagttcaagccccattaggccctgatatttctgctcccccacttgttgctgcagttgccaatgctggagctcttggacttcttagggcccctgatcggcaatcgccggattacttgagggaactcataaagacaacttggaccttaacatgttatacccttcccagatgggggaggtctaacttttccttttgacgagaaattgcatgacattttggaagaaaaacgtgcattcctgcctgttgattggtgggagtgtacaaaggatttggtgaatcatgcttattccgatgcgatcaaagttgttactcaagttggttttttga

SEQ ID NO: 18189 - DNA, 671 bp, Glycine max
  unsure (1)..(671): unsure at all n locations
  Clone ID: PAT_MRT3847_116428C.1
cggtcacggaattcccgggtcgacccacgcgtccgcgaagctctgtgctcgctgttatcagttttttttcctctgtttaacccagaaatatgtaacacaaatcaaaacatcgttgttgttttatttgagcatgcaagttggctaactcttggaaaggaaaggagcttcaagaagagagagataaaataaatggtgcaagatatgaagcagcaagacaatggagaatctaagaagaaggagcgtcacattgtgacttggactcaagaggaggatgatatactaagagaacagattggtattcatggaactgaaaagtacccactactctttgataattttttcttttgtcatacacactactttcttgatgtgtgacattaaagggatttttattgcaattaaaactatgcagttgggcaattattgcatcaaagttcaaagataaaacgacaagacagtgcagaagaagatggtacacttacttgaattctgatttaagaaaggtggatggtcagctgaggaagacatgctcttatgtgaggctcaaaagggtatttggtantagatggacagaaatagcanagggtggtctcaggcagaacggantatgctgtgaanaatcgtttttcacactctgcaggaagaacagaaatatgcagctttagcaaaag

SEQ ID NO: 18190 - DNA, 2364 bp, Glycine max
  Clone ID: PAT_MRT3847_116429C.1
ttctcatacgaagctctgtgctcgctgttatcagttttttttcctctgtttaacccagaaatatgtaacacaaatcaaaacatcgttgttgttttatttgagcatgcaagttggctaactcttggaaaggaaaggagcttcaagaagagagagataaaataaatggtgcaagatatgaagcagcaagacaatggagaatctaagaagaaggagcgtcacattgtgacttggactcaagaggaggatgatatactaagagaacagattggtattcatggaactgaaaattgggcaattattgcatcaaagttcaaagataaaacgacaagacagtgcagaagaagatggaacacttacttgaattatgatttcaagaaaggtggatggtcagctgaggaagacatgctcttatgtgaggctcaaaaggtatttggtaatagaaagacagaaatagcaaacctggtctcaggaaggacggataatgctgcgaaaaatcgtttctccacactctgcaggaagacaccataatttacatcttaaaaaaaagagatttgcacctcgcacatcaattcaactaacatggggttgaagtctcaacattgtaataatatggatacaacatcagaatctggagtacctattaagaatttgaggagggccgatattgctgatgatgcagaaaagatcaaatttgaggaccgatcacatttacgaaatggaactccaataaatcagcagccaagagcaccacttgcagtcttagctcaaaactctcataactcaaacaacttgacagaccagcatcatctttgcaatcccaagtttagcagttccgcccaaaataacaagattcaaggaacatttctcaaaaaagatgacccaaagataagtgcattgatgcaacaggcggagttactaagttcactagctctaaaagttgatacagagaacatggaccaaagtcttgaaaacgcatggaaggttcttcaagagtttctgaaccgatccaaagaatcagatatccctggacaaaaggttccagatgtacggcttgtagatcttaaagatatgattgaggagttgaagagtggtaatgaggaaggccgggttcttcaagagcttctgaaccgaaccaaagaatcagatagtactgggcataaaattccagatttacggcctgcagattttaaagatatggttgaggactcaaagagtggtaatgaggaaggccaggtacttcaggagtttctgaaccgaaccaacaaatcagatatccctgaacataagattccaaatttacagcttgtagatcttaaagatatgattgaggacttgaagagtggtaatgaggaaggccaggcttgttggaggaaaatggactgttatgaaaactctccaggcagttctggatacagtacaggatcaattctcatctgtcagtcagctagtgataatttggagcactcattgcatcaggatattggaaccgaaatgaagtctaaacaacttgaagatgaaaaaggagtaaaagtggttatgcctactgcaaatgtagatcaagatatggtaccatgttgtatggaacagataaacaatgacgggattgtttctacctcatcaagattggagttcagctcccctcttcaagtaacccctctgtttagatctttggcggcaggaattccaagcccacaattttcagaaagtgaaaggaacttcttaaggaaaacactaggaatggaatctccatccatcaacccaagtgccaactcatcacaaccgccaccctgcaaaagagccctactacctagtctataaactatctgagatacaaatattgaaccgttctttccctgttctgaatcctactttgtcttccttggcagtaatctggcttgtggagaaaaaaatacaatttcactgtgcctaaaattttgaaaggcatatgctgctccccaagaatgttatgatgcattctttccaccttcaacatatctaacaactcaaaagttacctttttgaaacttgcacataaaaattggcttgcttagtgtgtcattctttggcttgttttcttataatattattctgggtttgtttttctccaatccagcaatcagcattttgtccggaaccttattttttttgtacagagcttgctgtgtaatcactagcatcctgattcctgagtgtgtatgaatacattagcatatatagaagagagaaaaaagaaagtgagaacttggattctaatttgttgtttggtgtgtgcataggtattttaataaagatttttcccttatggttctgatgtactgaaacttaactataagtgattggaaatgcattttggttttggtgtgc

SEQ ID NO: 18191 - DNA, 754 bp, Glycine max
  Clone ID: PAT_MRT3847_11642C.1
ccactctttattgctaccattcctaattcaagcttcttacgagagattcgttcattgcttttttcctttcattttatacggcatacagcaccagagtttcctttctgggcatgacaatttttccataaaaattcgttttttttttctcctctctttttttttttttatttgggtcttttcaatcactttgattgagagaccttcttcttcttcttcttcttcttagttgtatatgggttccttccgttaattataacaacttaagttagaaggacttgagtttaggaaaaagaaaaaaaaaaattgttcaaccttgaaagatgtcggtttctgaggttgctgtgagaccgattttgaaaaaatcggtgcattggcaagggcgttgctctggcgaatctatccggatatatctaaccgtagacggtgcgttgagaccaatgcgtgtattggagtctgactccatagcttcggtgaaaatgaggattcaagcatgcaaaggaatcgcagggaagaagcacaagctggtctatggtggcagagagcttgcccgcaaggatgcactcatcaaggattacggtgtcactgctggcaatgttcttcacttggttctccgtctctctgacatgatcttcattgttgtgaggactgccttgagggtgatcaagagcttttctgtggtggggaagagctccatgaccagaggctcttccgtgatatatgcaacactgatgatgctgatggtgtcattcatttg

SEQ ID NO: 18192 - DNA, 390 bp, Glycine max
  Clone ID: PAT_MRT3847_116430C.1
atgtatggatcaacatgcgaatgtcgtagtggtgcagttatttcaggggctatgctatccaacgagattgttcatcaaaagggtggacataacttgtggcgggaacgtgactcatctttggtggtgcaatcttttaaaaactcggatttagtcccatggaagctgaagaacagatgggaggataatacttgtgcagacattcttgccaacgaagctcactcttataatgagttttattggtggaattctctccctcagttcttagctgttgatttcaataggaatagatatggttacacaaacgacagggaaaacaaatctaaaggagagtgcattagcctaagggaagtgaaaatagcattagcctattacgcatttacgaggttctag

SEQ ID NO: 18193 - DNA, 324 bp, Glycine max
  Clone ID: PAT_MRT3847_116431C.1
atgctatccaacgagattgttcatcaaaagggtggacataacttgtggcgggaacgtgactcatctttggtggtgcaatcttttaaaaactcggatttagtcccatggaagctgaagaacagatggtctaattgtataaatttaaccaagactatgaattttttggttggtcatattttcagggaggataatacttgtgcagacattcttgccaacgaagctcactcttataatgagttttattggtggaattctctccctcagttcttagctgttgatttcaataggaatagatatggttacacaaacgacaggttcaactaa

SEQ ID NO: 18194 - DNA, 331 bp, Glycine max
  Clone ID: PAT_MRT3847_116432C.1
acaaaaaaacaaaaaaaccttgttttccttgccggggggggcgggattttaaacatgtcccaatttaattaaaaaaaaccgcggggataaaacccctggttttttggccccccaaaaaattaaaatctttgggggctttttttctttttggaaaggaaaaaaagaaaccggggagtgttccccccctcccactttaagcaccaaagttctgctttcgtggcactgtcccattctggccataccttccacaatactgcctatataaatttttgcagcaaatgggctagtgcatgattcttgaaactgttctttattttctcccaaacccatt

SEQ ID NO: 18195 - DNA, 376 bp, Glycine max
  unsure (1)..(376): unsure at all n locations
  Clone ID: PAT_MRT3847_116433C.1
aaccaaaaaagtttcttttttaccaaagaaaaaaaaaaaaaaaaaaataaattttttttttattttctctccaataaaagggagggggaaattttaattttttattttttttttttttttaatttttttttcccaaaataaggaaaaccttaaagaaaaccagtaattttgcggaaaaggatgaaaaaaaccgaaaaatgggaaaaaaggatggggccctttggctgttgttctaatcangcaagttaaagggggggtttaaaaaattcaatccccaaaagttcttaaattattgcctttacaaggttttttggggtgggctcccagggagttggaaacagagggaaaaattggaaatgcggaaaaaaaaaggaaa

SEQ ID NO: 18196 - DNA, 117 bp, Glycine max
  Clone ID: PAT_MRT3847_116434C.1
acgttcggacgagattagtcatctagaggcagttggataatacagcatgtttgtggcaaaagaaaacctgctgcgtgttctgaaagtgcgaaaggaagtaggcatccgtcttcaatg

SEQ ID NO: 18197 - DNA, 360 bp, Glycine max
  Clone ID: PAT_MRT3847_116435C.1
ggctcgagggcgtttaccacacatatttctttgtcatttccaaaccacacttgcttactagcggggggagcttattggtgagtgcgaaaaaactaacagctgaacattacatgcattatcattagaggagaatcagcataactaaatgttgggataaatcgcacagcaaaaaatttaaacaatatatcaaaatcttaatatattatatcgtgtcataacatacaacttggaatactcactaatgcttccaatgctgttggcaacagaaccatttttgttgcctatcaccacccgtgaacaaattcatttgaatttattgatccatatccaaacctatgtgaagtcaactttacacgacta

SEQ ID NO: 18198 - DNA, 1353 bp, Glycine max
  Clone ID: PAT_MRT3847_116436C.1
gcacgaggctgaatgggcatggtgacttttgtcgggaaatgttgcgtatggacaagcatgtatttcacaagttgtgtgacattctccgacagagagccatgttgcgtgatactgctggcgtaatgatagaggagcagctagcaatttttttaaacgttattggtcataatgagcgcaatagagtgattcaagagaggtttcaacactctggtgaaaccattagccgtcattttaacaatgtattaaaggctattaaatcattgtcacgtgaagttttgcaacctcctcagctcaagacacctccagaaattctcaacaatgctagattttatccatatttcaaggattgtataggagtaattgatggtatgaacattccggctcatgttccagccaaagatcaatctcggttccgcaataagaaaggtatcctatctcaaaatgtgctggcagcatgcacatttgacctgcagtttatatttgtttatcctggttgggaaggttctgtcaccgactcacgagtgttaagggcagtccttgataacccagatcagaatttccctcaaatacctcaaggaaagtattaccttgttgacaagggatatttaaatacagaagggtttattgctccttaccaaggggttcggtaccagcattatgagtttagaggcgctaatcaattaccaagaaacgcaaaagagctgttcaatcacaggcattgttttctgaggaatgctatcctgaggtcatttaatgtgttgaaaactagatttccaatcctgaaacttgctcctcagtattcctttcagattcagcgcgatatagtcatagctggatgtgttttgcacaatttcatccgccgtgaagaaagaaatgactggatattcaatagtgttgggggctctccagtagaggaaatttcagatattgatgaacttcccgatgtgccgatgctatcttcaatacaagaacaacttgcattctcatcgagggattcaattgcttcatctatgtgggatgacttcttaactaaatgggatgagtggtgactcttggctgaagaagtgtcatagcttggtgactcaatatgtaggtttgttgaagagggcgatgggacttcaatcttctatccggatggaactgatgaccaccttaatatgtgatttgatttgatgttttggtcaatgctcaatattttggtgagtaacttaaaaactttgtataggctgtgtatatctttgtcaaataatagttttattgaaatggaattgtgaagggtgcttggtttagatggaaatatttctgaggtatatgttaccacttataatagcataattacattcctagtttgct

SEQ ID NO: 18199 - DNA, 386 bp, Glycine max
  Clone ID: PAT_MRT3847_116437C.1
ttttttgttacatttcaaacactttgcggagttctaataaaatccaatgcattactgctgatacgattgcatcttcttctctatttatatctaatcacttcatttattacatctcgtactttataaatcaaaatttatatatacttttattagaattgaaatttcatcttactactattctacggaatcatttaatgaacttatgttttgttaaacatttattaaatcagtttcagttctccttttcttattctgattatttttcaatttcaaatttcaaaaaacaaatgaatgaatagataaataaaaaaaaaaaaaaaaaaaaaaaaaaaaaaaaaaaaaaaaaaaaaaaaaaaaaaaaaaaaaaaaaaaaaaaaaaaaaaaaa

SEQ ID NO: 18200 - DNA, 319 bp, Glycine max
  unsure (1)..(319): unsure at all n locations
  Clone ID: PAT_MRT3847_116438C.1
caagatactatccaaccgaaccataaagatacacccaataaaaaacccccaaacaaaactcaggaaggaaaaacccaccctgtccgtttcccctnaaaccgcccggcagcccccctaaagtttttttgatccattcatcaaccacattccataaacaaattgcgctttggggcctttttggggtcttcaccttcctggttgggggctacctttttggaagaccaatgggaccttgattttggcgttgtggaattgctaggggccctccctcttgcaaaacttagctgggatggttgcagccttgttaatttggatgcat

SEQ ID NO: 18201 - DNA, 803 bp, Glycine max
  Clone ID: PAT_MRT3847_116439C.1
tgcatgcctgcagttatattcttaatgcctaacaatttaagaacttgtttattatttgttttttacttttattttttatttgaaatatatcaatcttatacttcaacttttatactaacatttcagggttgctaagtatcaggaggcaaatcctactgtgtatactgtagttacctttccatttctttttgctgtaatgtttggtgattgggggcatggaatatgtttactactggcggctctatatttcataatcagggagaagaaactttctagtcaggtaaccttttagtttgccttgaaaaaatcatcctttaagagtatgaaagggagatattaagtagattttcttcaccttagtagaaagtgattgtgtttaaccaagtgattggacacaagtggttaatgtgctgatttttttcttttgcactgcaaaaaggatttgtattattatgacatgtttttgccacaaggagtgtcaaatccagtctttgtcaaacatcaatacatataatacaaaccaagccccttaattgtatccaattccataatgtaattgctaccctgcatacttgatactggacacattaaaccttttatgtgttacagcctatgctagtcatcaagacacttgaatgcaccttactcccctataattacgtaataagcttaagacaactggccaagtcaatactacctgagattaatgtgctgaagttaaggttgaatcgtttgggtactacccaagtgcaatccttggcagaaacaattcttgctcaagctttacttacctctcggctaaa

SEQ ID NO: 18202 - DNA, 1651 bp, Glycine max
  Clone ID: PAT_MRT3847_11643C.1
ctattttagacaagccccatgtcagttcttatccatgcaagcagacatgttgtcttacgcacgcagtggacacagacaccatgtcagctattaaccagcaatttaacagaggctgtttaggcaatcgatgcaaaacatgcctgaacctggcaatttcacgaattaagctgcggcaaaacaggagagatatccaactgaaacaaatgtgaaagaacatgcgctaattctaatagcaattgaagtatgtaatgtgtaaagttcggttgcaatttagagtccttagggtgggtttcgtaagatattatttaggtttatccaatttttgattggaggaactaagacaggcaccatgtcacttcttaaccagctctttaacagaggcgttttcggcactcgatgcaaaacatgcctgaacctggcaatttcacgcattaagctgctgcaaaacaagagagatatgcaactgaaacaaatgtgcaaggagattagccaattcttgcaggctggccaagaggcaattgctagaatcagggtggagcatatcatacgggaacaaaatacatgggctgcatatgaaattttggagttgttctgtgaatttgttcttgcacgtgtacctataattgagaatcagagggagtgccccacggaattgcgagaagccattgcaagtataatttttgctgctcctagatgttcagatgtaccagacttattgcacatcaagaacttgtttaccactaaatatgggaaagaatttgtctctgcagtatctgaacttcgtcctgattcgggcgtgaaccgcacgatcattgaaaagctttcagttagtgctccatctggagaggtaaaactcaaggtcttgagggagatcgcagaagaatacaatatagcatgggattcttctaaaactgaggctgaatttaggaaaaaccatgaagatctcctgggtggagcaaagcaagttagtgctggagctacgctttctcatactcccagcagaaatggttctaataatccatcaccttgtattacggaaccttctatcaagcctgtgcaagacaagcaagaatataaacaccttgaagctccgagcccttctaacaataattcttcgttggatactaatgaaatcgaacagtcacacaaaaacaataatgttcccgctggagatgctaaaagtgagacaagatttcaatcctctgatgtactggagaaggcacgggctgccattgcttctgcggatcgcgcatctgcagctgctcgtgctgctgctgcactagttcagagtaattttggatcattgaagctggaaggtaaataaaccttcacatcgatgaaaatgctgccctcccaggatcttaatgctggaaaaaaaaatgttaagaactaaatgccaaaggagaaaattatgttctttgttgcggaggtgacagcttcatacagtgattctatgtaataagaattgtgccgtacttcattgtacattccataattaatacatgtatatcattgtaacggaacggaatactgaacagtgtgaacttttctattttctagatcttcctgattcttgcaactgcggatcgtagtgtatcatgaacttatagatgttatttctaagtaatttaaacatcaattttacccagga

SEQ ID NO: 18203 - DNA, 438 bp, Glycine max
  Clone ID: PAT_MRT3847_116440C.1
agggggaaattttagctttagcaatctatctagaaaagggaggtcttgcacaacacacaggacatgaaaatttattttatacacaattttattttcatggggctcaagaagcgggggccaattaaacaacaatggtggtctgataggccgggcccccagataaattgggtacccataaaatggccttgcttccaagggaatggcaaacagggttagctccaggaacaactcccataagttgaggaaccctttgaagattccttccaaaagatatttgagtggcaaataacaagggcctgagttttgggtccatcacccccccccaatggaaccatgaaagctggtggttcccgggcttaatggggggaaaatactgcggtgctgaaattttgcctatgacacatgactgctttgtacccaaaattctgccctccttcc

SEQ ID NO: 18204 - DNA, 352 bp, Glycine max
  Clone ID: PAT_MRT3847_116441C.1
gaagagacttatcagctcatattcttccactgccctcatgacaatttttccatcatcatcatcagaggaacatactccgacgaacatcctccacatgtatggcatggagttccgatcgatcttgcacggactcgacgaggaaagatgtgttgaataacctgggcatcaatctgagaataagcgtcgactaagtgtagaacaagtgaaggcttctgagaagaacttacacggtgaaacccagcttgaccctgaaacgaggtcaaactttcccagaccttggttgcacctatactagtgccgtttgttccaaacccgccgacccgatgaaaaccaaccaattgagagaaattat

SEQ ID NO: 18205 - DNA, 162 bp, Glycine max
  Clone ID: PAT_MRT3847_116442C.1
ggaataggtgtataatgtattcgtattgtttccttggcttaaaataattttagtttgaattgccgtagtttttcatatccttactgcataatttcactgacacattgcttctgttttgcatatgcactttaatattcaatttcagtaagatccttttagttc

SEQ ID NO: 18206 - DNA, 422 bp, Glycine max
  Clone ID: PAT_MRT3847_116443C.1
accttcgcccactcgttcgatgcaaaattggggcgcggaccgacagaggtgagatcaacagttaacacacagataggggcctggcacccctacttcaggtgtgccagaaatagagacagcgccaattctctattttacaagcaaatgcttataggcggggaaaactttttgatacccatacctatcgatcaaattccaaacacaaaaacagaaataatgtattagttgttcaagggacaaacaaaacctaaatgctactcctgaagctggtgctactctgaaaggcgctgaggaataatcataccaaaagacttctgcagacattaacatatctttggcacattaatacaacaaggtgattcagaggctgacatggcggtaatgaatgaaactaacaccggacatctgccttgacaaactac

SEQ ID NO: 18207 - DNA, 309 bp, Glycine max
  Clone ID: PAT_MRT3847_116444C.1
cacgcccacgcaagctcgaactcgggctccggctcgagttcaaatcttggaaccttcatcaaccttactttaacatacataaaaacgccgggtgcttgacttacaaatgaaagggccgggaaaaaaatacaggccgatccctgccaacctcccaaatctccctatagcaaaatctattaaaactcagcatcatcttggacataacggcaacctgtcagaaatacttttcctgcaacaggcgcacatattattctcaccgttaacatgccatggatagcccccattgcctattgagaccgttaactaaca

SEQ ID NO: 18208 - DNA, 276 bp, Glycine max
  Clone ID: PAT_MRT3847_116445C.1
cactgagttaacagtggaagattctggtgaaagcttggaagacctcatggccaaaatgaagaatatgtagataatggactgggatatattgtatttctcatgttaaagcctcttcccttgaaattaaaaaaaaattttaactgataaaacttagggcaacattaattaatgtatattcttacctgaattgttatactttttgaaaatcctgtgacttgcctgtttctccccgctccaacgaaatcattaactctcctaaaatgtgtttcattctag

SEQ ID NO: 18209 - DNA, 372 bp, Glycine max
  Clone ID: PAT_MRT3847_116446C.1
caatatatcaagggagactggggggagaaagaggtttttaaactctaaacatatttcttttatgccaattttttttatcagaagagccattaccagatggtaggcgtttcacgaatacgcaaactataattatggaatttcttttggtacctaaaaatcacgggttggaaacaacgggcttagaattaacggggatgatatgaatggccccgtattaattattttgaacctggtattaaaaggctacttattaatcctggaccccgaaaggggccccttgccaattttttgggccttggagaagaacccttaaggaacctaaccgaccttggccccaaccctttctacccctttttcaaaaccaacaacagg

SEQ ID NO: 18210 - DNA, 369 bp, Glycine max
  unsure (1)..(369): unsure at all n locations
  Clone ID: PAT_MRT3847_116447C.1
aacacacccaaacacaaagtaacatgnnntgtcattattcataagacaaaactaaactaacaacaaaaaattgctctctcaagcaaaacaagacctgtgatctatttgctcttttgcattaccttttctttaagaagatgattcatatgaaaagcagtggacagaagggtatgcnntactcacctcaagatacatgtcaagggccttgtagaccccatcataccaaacccttgcagagactggcaagcattctnntactccaagaaatttaaagatcttgaggctgtggccaagacatacttatctcaaaaacttgccaattaatataccaacgcttttcanttnntnntaagacagtcnntcacaacc

SEQ ID NO: 18211 - DNA, 306 bp, Glycine max
  unsure (1)..(306): unsure at all n locations
  Clone ID: PAT_MRT3847_116448C.1
aataatgtgagaaattgagctggtgctggtattnttgaagtctggttgacaatagaaaagatgtgtgtcgggtattttagttggctccaccancagcngnacgnnacgcaaggcantaacggtctggntgtgcaccacactagacgcganacaccggntcannttcatccatatccaggtcggggtaagcctncgttcgtccatcagagtnaatcnttnaagcttgnggactgacgcgcagtccctaacatgcgactacctcgttgggntgatattgggactcagngngcccgccggttatttgcc

SEQ ID NO: 18212 - DNA, 802 bp, Glycine max
  Clone ID: PAT_MRT3847_116449C.1
gtcccgtttgtggttgggtgtcgagtttcgtttaatatttgttcctcacagatcttaacactttaaagttcaatctccccattttccatatcatacgctaacaaattaagaatatataaaagaagatgaggtcttcaatcatatttctttgcattctggtgtatctgaacgtggtagctgcggaattgtcagcttacgacgttcttgagaaatacgatctcccagttgggcttcttccaaaaggtgccacagggtatgaattaaacgaaaaaaacgggcacttcacagcgtatttgaatggaacatgctacttcagcatagagtcgtatgagctaaagtacaagtccaccatcaagggagtgatctccaagggcaagttgtcgaagctgaaaggtgttagtgtgaagattgaagtgttgtggctcaaaatcgtggagctaactcgcgacggcgatgacctccaattctcggtgggtgttgcctctgctggcttcagcgtcgacagcttctccgagagcccccagtgtggctgtggattcgcttgcgacaatttcaatcaaaatggtgatgtttcttctctttagaattcggatctgttactatgttttttccgtccttaattaattattgaacagcatcatcatgttgttttcctttgcgtaaattatgactatggtagacaccggacaaattgatgtaagacaactagcattggctgcatccccaatttggcttgtcgtcaagttttacttttctcagctaaccttgtccctgggtttttagataacatggatatcctccc

SEQ ID NO: 18213 - DNA, 197 bp, Glycine max
  unsure (1)..(197): unsure at all n locations
  Clone ID: PAT_MRT3847_11644C.1
atcctctagagcagggcgctngnntttggttttttttttttttttttttttntgaggattagtatctcatcgccctatctagtcgtcattatgaagagcgcgtcaagacagcgtgaggcgagacagcgtgaggtctgacccaggagaattccgagatccggtacctagcagagcgtaccatgctttccgctatagta

SEQ ID NO: 18214 - DNA, 403 bp, Glycine max
  Clone ID: PAT_MRT3847_116450C.1
atgaaaggtgcttttctttcttgagctggcaaaaatgctgactttgatggatccctcttcctattggcacacataattatggcctacctatgtgccgtctcaccattacagttgtccacccatgctctttcccttaatactgctcggcgcggaaaatgtctatgacatggggatgctctttgttcagattttaaaatctgccgattccacgtttactttgaagaccatgcacgttgatcgctgtgagtgtcctctgctaaaattacatttcggaaccattctttaatcttctgagaggcgtctagatccacgtactgtagcttacctctttttcagcctgtctgtgcatgcgctctagcatcctatctcatatacgttgaattctaagggcagaagtcctccc

SEQ ID NO: 18215 - DNA, 302 bp, Glycine max
  Clone ID: PAT_MRT3847_116451C.1
ctacattatcataactgctaacaaatcaaaggacgacctttatctacttgtgcccattgattcagctcccatacaatgctcatttgaaagcatttcaaacaagattattgtctaaaatatgctcaacacaaatatcacacatgaatgcttcaatataaatgctgcagaagatactaaagtgctaattttgaccaatcagacctacacggacagatgaaaaagccttagcctattatatttgagactaccaccaggacttacaacggggaagggtttggttgacctcctttttcaaacttcac

SEQ ID NO: 18216 - DNA, 496 bp, Glycine max
  Clone ID: PAT_MRT3847_116453C.1
gaaaaagttgcaattgcttttatgctcttaaatacaccaccagggaccccaatcagggttatgaagaatttaagagtttgtgcagattgtcatatggctatcaaactcatagcaaagatttacgatagagagattgttatcagggatcgcagtaggttccatcattttagaggtggttcatgttcctgtaaagattactggtaatatagtaatcatcaggatttgataatggcatcttgagagtcaagttctgcattgatttccaagtacaatgtggtgctttaaaatagaggcagtgagacatactttaatatgttgtaataattctccgcaatcctctctgctgcaagggtcaaccaattcaattcaagcctcttgatacatggatgagttagtgaacatgcttaagattattgaagtttggtacaaaatgcgtatagaatgtgtcctttttactaaatgcccggccatttgtgcctaagtactaactatatgc

SEQ ID NO: 18217 - DNA, 416 bp, Glycine max
  Clone ID: PAT_MRT3847_116454C.1
tttttctttttttttttttaattatttattattgctgagattaagaaaaaaactcacctcattcatatctccggtggccttagatctcaaaccagttttggggggaaaaagcatgatccaggcgctcaaaactgccatttttcgtaaaggccacttataactgcgctgcaaggcctggcgtgaaccgctctattttcgggatctgcgacaaacacaaagcacgagagtgacggaaagcgatgacggacatattacagggggccctagctacagaacaatagttgagcattagacgtacttagggcctataacccgctgtgaatcttgctatcccaacacctggccttgcaggtgcattggttgaaggaccgggttgcaccacccgttcagccttggttcctagcggacacacccat

SEQ ID NO: 18218 - DNA, 340 bp, Glycine max
  Clone ID: PAT_MRT3847_116455C.1
tcgtggacgcctggggccgaaccgctccatgatggtacaggttagcgcaaacagggttctgaaatcaccacccttgacaccactgaagcatatgctctcattgactcggaagatgaacctgaagagcatgagggatgtgcatgtcaccaaggacgcaaacgtgcgaccacacgctccagggccgactcttaactggaccactgaaaaaaaaactaaatccaacagagcttattatagcaaaatgccatcaaagaccaagagcaaccggaaaaactgtaaacacaagacttgcataacgagatggacattgttaagtctcaatgctacacaattgataaca

SEQ ID NO: 18219 - DNA, 688 bp, Glycine max
  Clone ID: PAT_MRT3847_116456C.1
atttaaaactctccggaattcaattttctctgcacagttcaatccaaagtacagatacttagctaggagctcatcctataaatttcacaactctccaaaatcaattttctttgcacagtgcaatccaagaacagatagatttgaaccatttcataatctgaagccttttttttttttcttgttgcgatcgaattgtgacggagatggcggagccgaacaggatcgaacgcgcccaccagatgtaccgcgacggaagttacgaggaggcgttagggttctacacggaagcaatcgccttggccaagaccaaccctcagaagatcgctttgcatagcaaccgagccgcgtgctatctcaagcttcacgatttcaaaaaggcagcagaagagtgtacttcagtgcttgagcttgatcacaagcacagtggggcattgatgctgcgggctcaaacgctagttaccctgaaggagtaccattcagcactttttgatgtcagcagacttttagagttgaattcatcttcagaggtttatcaaaatcttcaagctcgtttgaagacgcaagtaacacttactccaataccagaatcaaaagaagatttcaagaacagtaaaatgaagaacctgaagttattcgcaaagagaagttaaaattgaaaaaatagagaaaatattcttcgattgtattt

SEQ ID NO: 18220 - DNA, 795 bp, Glycine max
  unsure (1)..(795): unsure at all n locations
  Clone ID: PAT_MRT3847_116457C.1
cccgcgtccgaagatacactgtttgattgatacaggatatttggcaaccagcttttgtttcttattggtttaagctatactaatccaacttatgcggctgccatacagccgtccattccagtctttacctttctgttggctgtaatgatggggtcagtttcatttcacttgtgtcatttatcaattccacttttatgtgtgtatattcctagaactcaaaacccaaaggcattctctcacttgtagtgctgaaatgtgtacattaataaacttattcagatacgccaggacatacagtaatgtgtatctgtatagaccttttcatgtagtacagaaagagtgaacttactcagatatgatggtctagcaaaagttggaggaactattatctgtgtctctggtgccatatttatggtttttatcgtggcccagctttgataggatatgctgaattcaatcatgtaacacaaaatgaaataagtgctaaaggtcagccagagccatctggatggttaattggtggtttacagaacctttggtttgaccattttcatcttggagttctgtgcttgatagggaactgcatttgcatggctgcatttctagccattcagagaaaacaatgtcccttgcccggagataatgaaattgagggttcaatctcttctccttctctccaacgcttgaaaaccctagcagaacaaccaggggaaaaccttaaggaatcttagggaatcgctagagacatagttatcgctgctggactacacacatgagtcggctcanagcatcata

SEQ ID NO: 18221 - DNA, 284 bp, Glycine max
  Clone ID: PAT_MRT3847_116458C.1
tccttccgggtgtaaaaaaacaaactaatagagatttttttaataacaaacaacaacaacaaagattcgcagtttaaaaaaactaagcctgctccctccttcttacaacacttttcatataatctcttccttctcgaatgttttctatctgaggaatttatttgaagctacgaagcggtcttcatcaatgttcattttcaaaaaacccgcttcttccccaatttcaaagcttgacgggatatccactaatctcaactttacgttgactgcaaaaaaccagttca

SEQ ID NO: 18222 - DNA, 276 bp, Glycine max
  Clone ID: PAT_MRT3847_116459C.1
tgaccggcgcttgtttccaaccagccggcacgagggcacacgacgaaacagcagggaccgcaccggccgctggccggggcgggcagaaagaaatccggacaaccaacgccaccaaggccacgccgacgcagggaaccgagaaccaggagagcatgacaaaagaggaagagaagggcccccaccgcccagtgaacgagcaacagagccgggaggcacggcaggcaagcacaaaccaagaggcggcgcgcgcggtggcagacgcaaaagaagaccggg

SEQ ID NO: 18223 - DNA, 414 bp, Glycine max
  Clone ID: PAT_MRT3847_11645C.1
gcaaaaaaaactttttattctaggatagccacatccttggtggggaacaccctgataactcaactctataagttgaggcaactcaatgtatgctattcaaaacacatattacttacaaggatacaaagcccatatacttgcaagttggatggacacacataaattgacatgacaccaattgagtgtgatcttgattacatatcacttcaagaacatttaaggtagaacatcacaatatgctgaatgataaatgtgtcactctcacactaactgctattaatgatgttccattgctggaacaacacatatgattcttaggcatacctaaaaacaagcgttacttacttaccgtaacggaaacaaccttgaacttgaatcatattacattgcagtaccacagtgggagcatttgac

SEQ ID NO: 18224 - DNA, 476 bp, Glycine max
  unsure (1)..(476): unsure at all n locations
  Clone ID: PAT_MRT3847_116460C.1
ggagagttagntattgntaatnttncaaanncctnccctttttttttgtttcatattgtttaagaaaagaaaatacatttttttttggggcccaattttttccatgaaagagagggggcccccnnngnnaanntgnnnctccaaaaaaaggggaaagtttttgtcctttacaaaaaaccccccccattgttccgaggggttgaagctaaagcccccagggtagaaagaaaataaccagttttcccaaccccttgggccaacaaaaggaaaagttttgggaaggtaaaattaaacaccccttccccaacttttttagagaaaaaaattaaaaccgggggggaatctttccttggggggggaaaaaaaatttaccccaaaaggtggggagtttgatatttctttcttaagaattttgaagttgacgctggggtgtcccccccttttgccaaatgaggggggcaaaacccggggggccc

SEQ ID NO: 18225 - DNA, 335 bp, Glycine max
  Clone ID: PAT_MRT3847_116461C.1
gcgcctcctcggcatcttcatctactcctgcctctcctacaactccttctacacactcaacttccaccgtggctgcacctttatcaccgccatgctgcgccacatctaccccctcaacaactcctcacatctccaaaggcatgtccccccccgaccgaaactacattaaacagaccatttccaccatgctcagattactaccatccgaccacttcactaacaccatcaccgtcttcaaacaccccctccacctactgctcttctactacatcttcacaagttacactatatggaatgcataatacatgatgtccatggcgaataatctacatatg

SEQ ID NO: 18226 - DNA, 457 bp, Glycine max
  Clone ID: PAT_MRT3847_116462C.1
ttttccacccaccaatccaaggtttcaggttgggagtacccctaccaacggtgcttctcctcacggcaaagatctcgccccggtcaacgacactgtcgcctgcgcctgctgacgacgagacatccaactaccctccatctccatggttggaagcgggcctccaaaaaggcagcatgttaaccgcggagtctcttggacggatgacttacgtcgctcataccattaatcactcccacgagacagatttgtagaagggaaatttggcctttgatacaaacctagctctatatcgccacaagctttctgaactaaagcacagtccaatacctgaaacagcatgaaatacgacctacttggggctggtacacatccttcacaagattttcctgcaaaggacgaacaacaataacccccccacgacagaggcccgactgagacaaataatagaccctcaaac

SEQ ID NO: 18227 - DNA, 325 bp, Glycine max
  Clone ID: PAT_MRT3847_116463C.1
atactataacaattaaattaaataaataaaaatgtttgatttatcaatgtaatattttcctttaaaaaatgttctatcgggcattaatttatacaatatcaactgagagcttcgaaatgtctaattagtttttcagagttacgaattaatttgcgcttagtaaaaatttgactttaatatattttagcgttcgcaagagtactacatccagcatcatttgatctatgcatagctttcactcttttacaggcaatctcattgtaaatagttcaataaattatgatttctaaaccttgaagagtgcaacaatggctcccactcatac

SEQ ID NO: 18228 - DNA, 985 bp, Glycine max
  Clone ID: PAT_MRT3847_116464C.1
gagattgcagggcataagcatcaatggaggaggaaacagcgaaaagattgtgtatattcaccaaaaaaaagaagagagaaacattgcgaatcgggggagacagagattgggggaagtggaagtgcagggcataagcagcatcgatggaggatgtaacagagaggttctcctgctccaagcttctcgttccaaaaggagaacccattttcgtgaaggccacttggtttcccactcacttccatctcgccgtcaccgacggcatcaccgcctggcactgccacccatcggaggaggaggtgaagcagcgtgctgctcagtgggaccttcctgtttcagagtacctgaacttgtctgagcgctatttggggcttcaacaacccggctctgtctatgcattggatgatgctggtgatggccataagaggttgtcgtggacgtttgagaaggaaggaatgactctgctttggagatggaaatgcttgctgtctcctgattctaagaaaagtaatgtcgaaatattggactttctcatgggctcaaacataaatctaagtgtcagatttttcagcctaacttaattgtttgataggcgtcaatccgaccttgaaactcgcgggtcccggcttaatgtatgctgctaacttgtcttttttatgtgtctctgtttgtttgtttatgatggccattgtgttggatatgtctttcttaccctctatttattccagaggaaagaaaatgaaggaggatgaaaatttttgaattgaagaaaatatgacagaaaataagattttaactttgtttctaaaagtttattttattttgtttttctattttgtcttctaccaaataaaaaaaagtattattatctgtatttcctgtattgtttattttctttcctatcatccaaacaaaacattaaagaaattgtatagtttatgcttgaccaggaaagtaagttactcagcagatttttatttttttttgc

SEQ ID NO: 18229 - DNA, 301 bp, Glycine max
  Clone ID: PAT_MRT3847_116465C.1
gcgttctggcagaacagcaaataatgacattagaaactccttctacagaccatgccgtgagaggcaaatgtttatctcgcagagcaaccaaaccatcatgatactcggactaatacatcaactcaaagctatgggtgcttttctgtatcaccatcaagtattgcgtaactcattcatttttccaaccatggtaaacggcatgacctgcaaataagaaaacgacatgcatgtccctagtttaacgaccaagttcaccgacaactggtgaagccacatgcccaccgcggcgacttgggcatgg

SEQ ID NO: 18230 - DNA, 293 bp, Glycine max
  unsure (1)..(293): unsure at all n locations
  Clone ID: PAT_MRT3847_116466C.1
tcgcangcacgcgtacgtnagctcggaattcggctcgaggtggcggtggctatggcggtggcagagaccgtggtnatggtggtggtgntcnaccgtggttactactccgtggnggcgacngtggtgatgnnngcnngngaaactagggcttgatntcgttgatnagggnttatgattnngctcagtaattnnagntgtgtttgantttgagtatctttatggtttngtnncaccgnggtncgngcttntgaccagtatatcngggtngttatngccnatttaatgaataaaac

SEQ ID NO: 18231 - DNA, 353 bp, Glycine max
  Clone ID: PAT_MRT3847_116467C.1
attcccggggtcggacccacgcccgtccggagcgaccgagcgcgacgagaagcggcggtgttacccaaaccttgggctgaagcgcgaaccgtcgcgctgaaaactctaaccgaccatgaagacgcggggagcagcgtgaagctctcgaacgatggaaccctactagcctcaggcctccctgtacaaaaccctaatcatatggtccttcgccaccctcaccactctgccacctgcctcgtgtggccactccgagggcatgtccgacctagccgggtcctccgactcccactacatctgctccgcctgcgactaccgaacccttcgcatgtggtacgccaccgtgggcgtaggct

SEQ ID NO: 18232 - DNA, 725 bp, Glycine max
  unsure (1)..(725): unsure at all n locations
  Clone ID: PAT_MRT3847_116468C.1
atgtgaactaaatttttaaccagcttctttggcaggcttgcatttacatcatacaacaaacgtaatcaattctattctgttacttttattctcttaaaacacacctttctttgaagctacttgatggagtttttctgttgaatttatagaacatactttgtgtcgaagctataaaacagcaggtttcacagttttacctaagatcatccaacagtcatcatggttaaacataacctccactaaaccatagggatattatagaatttctgccaaaaaataaatatcattgtccaaaatcagggtacatgaaaagatggtttatcctatgtcctgtatgtcaaaatttatagcttgtttatgttcgacgattttattactttttttgcaagataagttgatataaactattagacaatgtgtaccttgccgacaagatggcaaaactgagaaatcaaaactaaaaaggagagacaaagttgtgaggaaaatgttgtatagaacattacatcctatttaacacctaggatgagaaagagatagaatattaagtaatataataagtgatataatgtgataggaagagactaagagaagtgatgagtgctaatggaatgtttgtaaacagaggtgttcacatatcacttcgcaagtatgaaatgagaacattttgatcaatntatccaccatgaatacatatgggttcatatacatacaataaatcaagg

SEQ ID NO: 18233 - DNA, 613 bp, Glycine max
  unsure (1)..(613): unsure at all n locations
  Clone ID: PAT_MRT3847_116469C.1
nnnnnnnnnnnnnnnnnnnnnnnnnagaaaaaaatatataatataagtgtaaaacaataagttattttaagaatttcataattaccgttccaagactagaaactaaaataagaacggtaaactaaataaacagcaggtccaaatccaatccttgtgttgtgtctgtgttcggtaaaaccacacccatcatttacgccactaatccaagaaatcataatcaaaataaagtgaggaaaattgtaagagaaggcaatgagtaaatataccaggtagcagtggtaaattattaaatgctattaactacgacagctggcataactaggtaaaaacactagttacactttacaccgctaaaagctaaaaaaaaaaaaaaaaaggaagccaaaaatttgataagtaaaaaaaaactagcggccattaacgagagggttgacggcggaatccttgcagggacttgacggcgggcttggttttccggtagcaacaaaacgttgcacgaagctatctattctgtttccattagtctccgtcagtaaccgcttcccgccaaacggtaacgattcgagtcccctctcttggagaaactcttccttcttcattgcttcatttccca

SEQ ID NO: 18234 - DNA, 2473 bp, Glycine max
  Clone ID: PAT_MRT3847_11646C.1
ggctcgagagcacgaagtagcaatcttaatctttcacaaagtatttttttaaagttgtctgaccagcggctccccaaaaactactttttcattccatttctcgtccttccttctcaccatctcccacactccaccacaacgacggacaacgaccgcgtctcccgccgcaccgaggtcctcaccaaccacctcctccgccgcacacccccaccctcccttctccgccccctcccctgcctgagctactcccccccggagctctccaacaccatctccttcgacactcgcgagatgcgaaaactgatggactgccacaaccttgaggaccgcgactggatcttctcccttatcctccagagccccctcttcaatccccgccaccgcgccggaagattcttcgtctgccccgactacaaccagcccatggagcaccagcgccaggccaccatgaagcgcatcgcctatctcctcgacaaaggggtcttccgaggctggctcacgggaaatggccccgaacaggagctcaggaagctcgcgctgcacgaggtcattgggatgtacgatcattctctcgcggttaagcttggcgttcacttcttcttgtggggtggggcagtaaagtttctgggaaccaagcgccatcatgacaagtggttgaattctactgaaaactatgatatcaagggattcgttgcgatgtcggagttaggccatggaagtaatgttcgaggaattgaaacagtcactacttatgattcaaacaccggggaatttgtcatcaatactccatgtgaatcgggtcagaagtattggattggtggtgcagcaaatcatgcaacgcacactatagtcttttcacagctctatataaatggaagcaatcaaggggtgcatgcatttattgcccaaatcagggattcagatggaaacatatgtccaaacatccgaatagctgattgtggtcacaaaattggtttaaatggagttgataatggccgtatctggtttgataatgtgaggatacccagagagaatttgttgaattctgtggctgatgtttcaccaagtggtgaatatttgagtgcaataaaaaatgcagatcagaggtttgctgcattcttagcccctttgacttctggtcgtgttaccattgctgttagtgctgtgtacatctccaagattagcttggccattgctataagatatgcatttgacaattcaagcatttttcattacaccaaacgggcctgaagtcttcctgcttgattaccctagtcatcaacggcgtctgttacctttacttgcaaaggtatatgcaatgagttttgctgcaaatgagctgaaaattatgtatgtcaacagaacacccaagtcaaacaaagcaattcatattgtttctagtgcttacaaggctactttaacttggaataatatgcgcactctccaggaatgtcgtgaagcctgtggaggacaaggagttaaatctgaaaatcgtgttggcaatttcatgggtgaatttgatgtgcattcgacatttgagggggacaacaatgttctaatgcagcagattagcaaggcactctttgcagaatatgtagcaagtcagaagaaaaagaaaccattcagcggtttgggattagaacacatgaacaaacctttgcctgttatcccatctcagctaacaagttcctacattaggaacagtgaatttcagattgatctgttccacctaagagagcgagacctattgagacgttttgctgatgaagaggtctcagaatatcaatctcgtggagaaagcaaagagtctgccttcattttaagttatcagctcgcagaagaattgggcagagctttctcagaacgagcaatattaaaaacattcatggaggctgagtcaactttacctgctggttcattgaagaatgtcttgggtctattgagatcgttgtatgctgtgatatgtgtggatgaagattctgcctttcttcgatatggatacttgtcaacagagaatgcttctgcagtgaggaaagaagtgccaaaactctgtgctgaaattcgacctcatgcacttgccttggtcagttcctttggtattcctgatgcatttttgagtcctatcgcatataattgggttgattcaaattcatggtcttctcaactttagtaagcttatgcaaatttatgcatatgattgaggtatgggtttggcgtgttgtggtaagcaaaagtgaataatgttttgttacaccatgtagaatattgctgaacagtgcaaataagtttgtactaatctaatcacgaaataacgtggttacatattattggttgaataataagttaaagaacaaaataaaagttgggcttgacgggaaatcaaggcaagatcattcggattgagtttcatcaataaattgctgtaccatttagtaatttcattatatataaatagcggttggatatttaaaaa

SEQ ID NO: 18235 - DNA, 146 bp, Glycine max
  Clone ID: PAT_MRT3847_116470C.1
caacatacgtcatcgaaaggatctcgatttaccaccaatgcacgaaagccgggatctttcacaaaatggattcctaggcggggggtgcataaccgcatggatcatctcacacgagcccgtcactttgggatccaattcggttcctt

SEQ ID NO: 18236 - DNA, 404 bp, Glycine max
  Clone ID: PAT_MRT3847_116471C.1
aggaaggtttcccgtcatcactgtatgacgtccccttctttggggggggggggggggggggggggggggggggggggggggggggggggggcccccaaaacaaaacaaaactttagggaggagggtaaggccgaagagcaaaaaaaggggagtaagtcccgaataaaaataggaaagtaaacattaacaaagggtaaatggggcaaggcaaatattaggattagaaatttgattttgtttaaaagccaaaatatggagggttgggggtgttagggtcgtttggccccttcaatgggcaccgatataaggaaagacacactcggaggaggcaattgaagttggccatggtagggtaaagattaccaaattacgtagcgtaaaccccctaaaaaatggggtaatag

SEQ ID NO: 18237 - DNA, 231 bp, Glycine max
  Clone ID: PAT_MRT3847_116472C.1
cggccggaattcggtcacccacgcggtgcttgcgtccgccacgcgtcgacaatatgcgttatatgggctcaaacctggtatgtcaggcactcggcgaacgggcaccattcctcagaccatttgacagcccactgggtgaaccacaaagtgcagcgagaacaccatgacttgtagcctagcaagccgagtaatgcaatccagatcgacctctcggggagaatcggacggaca

SEQ ID NO: 18238 - DNA, 126 bp, Glycine max
  Clone ID: PAT_MRT3847_116473C.1
ggctcgagctctatagaagcttatacattaaacggacttactctaaacctgacgggtgctagagtccacaccattcactatcccactctatcggcacactaccttaatgtcccaagtcccaagcac

SEQ ID NO: 18239 - DNA, 406 bp, Glycine max
  Clone ID: PAT_MRT3847_116474C.1
ccacgcgtccgacgacgatgagtatcatgcttaccttattattagcttggaggctcgaactatgggactagaaactgctgatcttcttagtgagggtactgaaagtgtggactattatgttcaaggaaaaacacttgctgcagggaatttatttggaaggcgtggagttatccaagtctatgaacgtggtgctcgaattctagatggttcttttatgacccaagacgtaagctttggagcttctaactcagaatctgggtctgcatctgagagtgctatagcactttctggttctatagctgatccatttggcttactcagaatgagtgatggaagtgttcgacttctgagtggagatcctagtacctgcactatttctgtgacttctccagcttcatttgagagc

SEQ ID NO: 18240 - DNA, 713 bp, Glycine max
  unsure (1)..(713): unsure at all n locations
  Clone ID: PAT_MRT3847_116475C.1
taggcttggtcctcttgaagaaaatgctgccatcacaggtgcagggtcaccaaaccttgtccccataaaggaaattgaagctgttggttttttaacagattgactatagcttctaatagttttacttgctgaagcccctaaggaagtggctggcaaaatatgagggtcagcgaaaagctcttctccttgatattcattgttgagtagtatcattcctgcccctcctgccactttcacttcctctcccttctcagttctaccatttatacctctttcacaagcaactattttcccatggacaagctttggatcaagggagcctccaatgcaatactgtgcttccttttttgcacctgctgatttgccatagacaaggggcaattggtttgtcttcttaccttgatataaagatgacccttcgaaggtttttccattcccaagttttacttttgtcggaaagcttcggtcagtggagctagcagcaactgtcgtgatccatggagcaccatttccaactgtcgatggaaaggggcctgaattgcctgcggagcaagcaacanaaacccctttcttggttgccccaaatgaagctatggcaatgctatcactataanaaggtttgggaatactccctaaagagagtgacaatacatcaaccccatcagaaactgcttggtccatggctgctaatacgtcggcattagtacaaccag

SEQ ID NO: 18241 - DNA, 186 bp, Glycine max
  Clone ID: PAT_MRT3847_116476C.1
aagctattgaagagacaccaccaccaccttcggcatcaaaggcaccagatgtagagagcgctacagctaccgaagctgcaccttctgaagccacgattaccgaagctgcaacggccaaggatgcaaacttagaaagcacattccctgacatagataatacacttccggatctcgcccccgaacaag

SEQ ID NO: 18242 - DNA, 187 bp, Glycine max
  Clone ID: PAT_MRT3847_116477C.1
tttttagaaaaaaaagaattacattattacctgctcatatttgcaaatgatttactatgatgaatttcatgggggaacattcactgcgatgtagaagccgtgagacacccattagttaaaaaaaattgtttttgaagagggaaaaactagaacgagggaggagggaccctcggtgtgaaacatgatc

SEQ ID NO: 18243 - DNA, 414 bp, Glycine max
  Clone ID: PAT_MRT3847_116478C.1
actcgggtcgagctttgactagaaatcttatatttgaacgatactctaactaactaaaccaactattctaagcggccggatggattctcttgggacttaaatgcgacatgtcgatagggtcaccggttcaagatagtccaaacctgggctgaaaaatatggacggtaatgaagaggacgtaagagcagtagccaacaggtacagcgagaggcagccagtaccagaccgctgcataggctgctgactacagagagccaacgtcgacgcctatcgtctaaccaggagagttggcacagcggtctctacataaggctggcatatcagagtccgtggccactttctagcccctgtacatcacagggccgactgcgacgggatgtggcaaatctaagagcaaagagtaccactgtgggt

SEQ ID NO: 18244 - DNA, 248 bp, Glycine max
  Clone ID: PAT_MRT3847_116479C.1
aacattaagctgatgcattgttgtttagcctttccaatttcacgttacaagttttttacaagtactactaatacagtttatgtgaaaatgtttaatgacaacccaaggtcgtttatgaagaaaaagacttttacaagataactagaatgaccaggcacaagaaagactattattatgtttttgcttcttctaaagaggaggatgacaaggtgtcaatgatggttgtatggagtgggtcactcaagtgg

SEQ ID NO: 18245 - DNA, 356 bp, Glycine max
  Clone ID: PAT_MRT3847_11647C.1
tttttgttctttttgtttttttttttttttttttttttttttttttttttttttttaaagaaaacatcgaaccctaatattaaaaatggcaaagataacccgaacaggaaaatactaacttgttgaaaagactcttttatcaaaacgaactcttcaaaaatgctgggttttgtgttcagaggcccaaaaaaactaaaccctacaatattttaaagggccaatgggattggtcaataacccaaagcctgacctttatacaaaaacacaactttgactttaacttttaaggaaatgagggctaaagaagcgagcaagcggtaacaatccaacttaattttttcctggaaaaacctttt

SEQ ID NO: 18246 - DNA, 333 bp, Glycine max
  Clone ID: PAT_MRT3847_116480C.1
actagagagtaccctgtgatggagtttaaattctaaataaaataaatgcacataatgtgtttactgttttaatattttttttattattcaaactccatcacagggtactcttctagtaaaaagaaaaggagtggtgtatacaaaccagccatttaagaacagaagcacatctaggagatactcttccataacaaatctgtctataggctgtagatcctgcatccaaaaaattcatttcatcgaacccacatatatatatgattggaaaaaatgaaattaccaaaaacctaaggtagctataacacatgaaaatgaacagttttacatgctacg

SEQ ID NO: 18247 - DNA, 277 bp, Glycine max
  Clone ID: PAT_MRT3847_116481C.1
ggttcagatctatctgttatttaatctatctagtaacaatgtgttgatagtgtacgtcgttgctgtcatccttgcgacaactttggtatcatggagttcacagttgtatgagatcttccctcacctaatgaccactgtactagtgatgcctgttctccggatgtgatctcaggtttttggctgcctgttgtggcaccacacagcatctctgggtttgagattattccagaatactatgttccagcaacagactagttcaagcacggcgaatattatt

SEQ ID NO: 18248 - DNA, 2323 bp, Glycine max
  Clone ID: PAT_MRT3847_116482C.1
ttttcgttttcgcccacgcgtccgcccacgcgtgcgcccacgcgttcgcccacgcgttcgcccacgcgtccgcccacgcgtgcgcccacgcgttcgcccacgcgttcgattggttgctgttgattccctctctattgcctgcccgcccaatttgtgcgtcgccttacacgccatgagaggagggtgactgagagatggacgctcccctgctgctggccaaaggcgagggaggtctcttgtgctgagtttgacggtgaatcagaggcaggcgtacgtatacgtgtagtagggtgattgagaggatggacgctcccctggctgctggtgaacggcgagggggcggcgctggtggcggagaatggtgactacgtggcggtgagggagctgaaggaggtgaagaaggtgttttggattgagaccaagagagtgtgggagattgcgatgcccatcgttttcaacatatggtgtccatatcggtgctaacactggggttccttcttggctatgaagcaaatttgggggttgagggactttggggtggtatgatatgcggaattgttatccagacgttgctgctcttgttgatactttacaaaaccaattggaagaaagaggtggaacaaacaactgaacgcatgcggatatggggaggacaagacattggagttgataagatagtggcttctacataatcctgtatatcttccacctccactcgagtcaaattctcaaagtcttttgttttttgtttttttttttatgtgttccttctctgtccattttacacgtaatgttgctctattccaattaatttctttcacttcccttcaattttccaacgcaaaagttccttcaagctcagagcaaggttaaggttattgcatggattgggttggtggctttaattctgcacattggaatgctctggttcttaatttatgtgttagattttggcttagctggtgcagctttggcatttgatatcacgagttgggggatcacagtggctcaacttgtttatgttgtgatctggtgtaaggatggatggaatggattgtcatggctggcttttaaggatatttgggcctttgttaggctctctcttgcatcagctgtaatgctttgccttgaagtttggtatatgatgagcgttatagttcttgctggccaccttgataatgcattggttgctgttgattccctctctatatgcatgaatatcaatgggtgggaagccatgctcttcattggagtaaatgcagctgtcagtgtcagagtttccaatgaacttgggcttggacatccaagagctgccaagtactctgtctatgtgatagtctttcagtcacttttcttgggaatctttttcatggctattattttggcgactagagattattatgccattatttttacaaacagtgaggttttgcataaggccgttgcgaaactaggatacctcctttctgtgacaatggttctaaacagtgttcaaccagtggtttcaggtgttgctattggaggtgggtggcaagccctggtggcctacatcaacataggttgttattacttatttgggcttccactggggttcgttcttggttatacagcaaatttgggggttgagggactttggggtggtatgatatgtggaattgttctccagaccttgctgctcttgttgatactttacaaaaccaattggaagaaagaggtggaacaaacagctgaacgcatgcggatatggagtggacaagacattggagttgataagatagtggcttctgcataatcttgtatatcttccacctccactcgagtcaagttctcaaagtctttttttcatgtgttcctagtctgtccattttacatgtaatgttgctctcttccaattaggtacagaacatagtttagctgtggtgtctgatgagatggtgaagataaaaaaacttcgttatttttccaatttagttttcattttttagttattgaatatctcagtgaaaaatgaaaaacatcaatcttttcttttactttggcctagagatgagttgatatatctctatgcaggactagattagttaataaaaattatttatagcataaaaaaaaaaaaaaaggacgacggccgactactgagccccaggatcactgttcctcttcttgagtttttcatgcacgagtggtggtggtggtgaaagaacacaaaagaggttttctggaatcagttttgcaagtggtgcctctgctttttcaagtgcattggcatctgacactttaagatcctcataagagagggtctattaaatggtgctgaatcaag

SEQ ID NO: 18249 - DNA, 885 bp, Glycine max
  Clone ID: PAT_MRT3847_116483C.1
ggctcgagattttgtggcagcagcaagcatatttgagcctgaaaagtctcgtgtgagactagcgtgggcacaaaccagtatcttacttgagaccataacatcctatgttagtgatgcagaaatgaggaaagctttcatgaaaaaattcagtgactgtcttaacaggcgagactactccattggctggaggttgaacaggaacagaacaggacatggactcgctgagactttggttgccaccatagatcaaatctcgtgggatatactcgtgtctcacggtcatgaaattggatatgacatgcatcgcaattgggaaaagtggctttcgagttggcatcgggaaggagacaaatgtaaaggacaagccgagcttttggcgcagacaataaacctatgtggcgggcattggatttccgaggatcaagtgtcggatccactgtatcagagtctccttcaactcactaacaatctctgcaataaacttcgttgccaccaaaaggacaaggaacttgagagcagcaacagcggcacgaatgtaaacagcatgatcacccaagaagaagagtcaaaaatgcaagaactcgtgcaattggtgcaccaaaaatctccaactggcattgatttcaatatcaagaatactttcctcacagtggccaagagtttttactatacagctttttgtgattcaaggaccgtcaacttccatattgccaaagttctgtttgatgaagtcgtttaaatcatattgtatttcttgaatagattttagactccaacttatcattgtgaatattttccgcctgcaatgataaaaaaaaatcagttgttgcggctccatgtatatatgaaacattcactagttttattaatggttaatcttccttg

SEQ ID NO: 18250 - DNA, 303 bp, Glycine max
  unsure (1)..(303): unsure at all n locations
  Clone ID: PAT_MRT3847_116484C.1
ncgcgggacgngtacgtnagctcggaattcgggnacgagctcagattnaagagagtgannnagtgattnccaaatcnanagnctcanantcccaattagnagaanccnnangnngngcatatcnnttggtanaggngnggtttccaatatgggttatgccngtgntcaggacatggaacccgntaatagtgacatggacttatcctaatggtnngaacagggncacaanttncggcnaactccnagtgattgcatggattgcntatnagatagtnctggtcntgattttncatnctgatggtg

SEQ ID NO: 18251 - DNA, 417 bp, Glycine max
  Clone ID: PAT_MRT3847_116485C.1
aagccattggtgagttccaacttctttcatgtgtttctttgcttttagcttccctgagggatatactatcatatatctcagtatatcctttttcttttgattttttgtttagttgaagttggatcagtgtgccaaaatgttaaacacacttcacttgtgattgggatcgggatctttctcttatatccactattctttgttttatttaatgtggatttagtgatttactgaggaatacacccttcattcttcctcacttgcttacttctcattcggttcaatgatctattggtttttgtagtcggtacttccccttctttgctttccgaatgcttttgtgattattactatagcaaatttggaatatttagttacttggaaaagctaaaaaaaactcaacttttggtatgggtaagt

SEQ ID NO: 18252 - DNA, 471 bp, Glycine max
  Clone ID: PAT_MRT3847_116486C.1
gcacgcgtacgcacgcttgcaattgctgctaagtcggcttgaggtcccacttgctgaggaacatgcctaggagatgtgtgaggaagatcgtgcatgttacgtggatgcgatgaacgaggttgttgatgctgtattcacgcacttatatatccagcctctcttagtactactaccgtatattgctgcttattatgacaaccctgcatctgagacttgatcatgcgtctatggataagaccgctggaactgctgcagaatcgatgtgctgcattcgctatgggggacaggatcaaaatctactacgatatcgatgaacctgacttaacttctcatataagtcgaagcacggtgcaatcgctatcgatgtgaggtcctattcacgagcttgcaaaagctagtgctggatgctgcgacttgataatgttcgctgtgacatgattccgttcgacatgagactatattcgctgacaa

SEQ ID NO: 18253 - DNA, 416 bp, Glycine max
  Clone ID: PAT_MRT3847_116487C.1
caaattacatattttgttttttttttaaccaacagggggctctccacaccctcccccacaaaacatttttcattttttttccatttaacccctcacaaactcccccaataatccaaattgcatgctcccccattcaaacttggcaacccaattacaacccccacttgccttaaccacctcctaaaaacaacaacccaatttctccacttcaccctacttgtactacctttaatacaacaaacccttttcctaaatctaggtcttactccaaaaaaagccttattgccttattacaacataaccccccacccggtacaacattacatcaaatagggagccccataattggcttactcaaccaacccaatttaccctctttacaaatccaaaggaggggctggtatttaaaaacctaa

SEQ ID NO: 18254 - DNA, 291 bp, Glycine max
  Clone ID: PAT_MRT3847_116488C.1
gggggtcccgggtggacccagcgtgcgcactattgttgtggcagatgaagcgtgtctcttagcccagccctctccggtctcaaagccagcgaccgcgcctccgtgccatggaagcaaaagtcgagcctctccttctccagcccgaagcccctaaagttctgcagaacagccagagcagcagccggcgacgagaccacagcggcaccagcgaaggtagaggctgcaccgtttgctttcaccccaccagaagtgggtccagagaccccttccccgatcttcgcgggcagcacc

SEQ ID NO: 18255 - DNA, 295 bp, Glycine max
  Clone ID: PAT_MRT3847_116489C.1
tatgagcggcggcggcgctcgactttttttttttttgtctacacacaacatatcactcttaaatgtatttatgtgtactacctaccgttcaacatgggaactgatccactataacaaggcaacctgtggaacagttatcttctccttataaagcaaaccgtttacttattagcgtttcatcgcacaaacaggatgatgtctttggatgatttatacatgcaacctttgcttgctaaatgtccaacagggcctgccatgcctgggaattgcgaggagtccagtgctttatcaaaaa

SEQ ID NO: 18256 - DNA, 396 bp, Glycine max
  Clone ID: PAT_MRT3847_11648C.1
gggttggttatacctaataattttattttactcctaaagtcgatccggtgaacatatgatacaaaaaacaagagcctcaccacgcggtttatggacttccgagtggtgtggagcagaaaaacctaacggcttgttataccgatcgacatattttcttgcaggggttttccaaacataaacgtggcagggtttgaatttacgtggggaggagactcccaagggggtttttttttcttaggggatttctatttttgtgcttcttggatttgaaaaggaacacatgaacactacccgttaaacatggccaatccccttcgaaaaaaatttttttgggaaagatttgagaccgcatcccatcattttttgttaacagctttatcttcaagctcccacaga

SEQ ID NO: 18257 - DNA, 482 bp, Glycine max
  Clone ID: PAT_MRT3847_116490C.1
aagctctgaatacggctcgagccttcatccatagacatgttcaccgccacttctgcagccgttgctacagggtcatttttaagcctcattgccgtttcacgcaaagggagcgccggacttaaagtctcagctccccaagccacaaggtagggcatgaaggctacgctgaaagacattggagtcgctgcagtggccactgccgcgagtgcagtgctggctagcaacgccatggccaacgaagtggtgctgggtggagatgacaggaccctggctatcgttcccaacaattagttcgaggcctctggggagaagatcgtgtgcaagaacaacgcaagggtcccccacaacgtgtgtgatcgacgaggacgagattcctagcggcgtggatgcagggaaaatctccatgagccatgaagacctactcaatgcgcctggcgagacttacagcgttactctggatgctaaaggaaccctacatttct

SEQ ID NO: 18258 - DNA, 634 bp, Glycine max
  Clone ID: PAT_MRT3847_116491C.1
acgcaaatatcaatatctcccattgaatcacgccaataattattttattaattacaaatttctcattaaaactgaggcaataattaagagattctttacagagagtagtttccgtcaattcgggtttcaaacgttgcagtgatttcctctttgcagccgatttcctgcacaacgcctacgcaaatatctgctgaatgactgtctccgcatttccgttgtactgtgcaagcagatgtatggcatcagccctaggcaaagccaaaaactccattactttaagtattgcaccttcgtcacagatgacatcccttgaagatgcttgagttggactactaccatcttctgacatcctggtccctgaagatactggggcctgagaagatccatttgtgcagctatcagcatacgatttggatgtagtgactggtgcaaggaagggagtgttggcttccttcaaggaatcaagcctcaaaagaccttcaaaacgatctttccacatttgaagtttaaaccactcattatgagtataaagagtagcttcgattattttcatgagttgagggtctttacacccagcctacgaccaactgcaacctggagagaaacagctagagcatgtagaggtaatgcattt

SEQ ID NO: 18259 - DNA, 2476 bp, Glycine max
  Clone ID: PAT_MRT3847_116492C.1
ccaacccacaaatcaaatcaatctcatttattccaatttccaaactacccttcttccacaccacactccactcagatttcttaatattctcacaaaattattctctccctcccgtaatggagtccacgccggtgaattgggaagccctcgacgctctgctcatcgatttcgccaaatcggaaaacctaatcgaggactcctccgcgctctctccgtcgtcgccgtcgtcatcttcgtatcactcccgcctcgtcatccgtcagatcagacgcgccgtcgagaccggagccattgacgccgccgtcgctctcctccgcctccacgctccctccatcctcactgacctcaagattctcttccgcttgcgcaaacagaaatttattgagcttctacggaaggggactgcggaggatcgagactcagctatcgagtgtctgaggacggctctcgctccttgcgcgctcgatgcttatccggaagcatacgaggaattcaagcatgttctgctcgcatttatatatgacaaggatgacaaaacttctcccgtggcgaatgagtggtcagaacacaggaggcttgacttagccggatttatgtcctctatgttaagggctcatttaaatgcctatgacccaattttttcaatggctctgggttatggtgtatgctttctccggggagatggttttcgtcaagctgcctcctcacccttctctgatcggcccgtctgccccctccttctagtgcgtgtccctcctgcatcacctctcggctgttgctatgtggttccaccttttgatgaggttgacatacaggctcttgcacatgctgtagagcttacaagacaaggggcaattgatagcttgagattcactaagggtgatgtgttcctggcatttcagaatgagttatgccggatgaggttggatgctccccttctcgatcagcttgttagagagtattgtgtttacagaggcattgttgactctgcatctgggaagcaacctattccagaaactgtgaaattcaacccacaagaccctgggtattgctcatcaagggattgttctcttgagctagactgtaatgccagcaagcattctgatggtgaaacttctgttaccaatgctcagatggatggttcccctgaaaataacactgatgtgacgagcatgagacgaattgattttgaagtacgatatgcttctgaactcgcaagcattcatgaagactgtagtaccagtggatcacagcaacatgaagatgcaagtgttttgcagcgaagcagattgtctgggaatggagaaaggagcaagcgcaagcggtggagaggacgatatgatgacaatagttacatgcccaatgcttctttggaagagaacagcaaacaagagcatagcattggtactgttgtttcaactatattgaaggagaaacagggctctgaaaggctttctgtacatgatgttagtaaggtggaacatagatatgagattctgttgggaatgaaggaattagctagcaaaggaatggctgctgaagcggttgaggaggtcaatgcgattgatcctaatttctttgcccagaactcagttttgctcttccaactcaagcaggttgaattcctcaagttggtcagctctggcgattataatgctgctttaaaggttgcttgcacccatttgggtcctttagctgcttgtgatcctgctttattaaagccgttgaaggaaactcttttggctttactacgacctaatgaagatgctcttggaaatgcattacctctacatgctctagctgcttctctccaggttgcagttggtcgtaggcttggtgttgaagaacctcaactcatgaaaataatgcgagctactctttatactcataatgagtggtttaaacttcaaatgtggaaagatcgttttgaaggtcttttgaggcttgattccttgaaggaagccaacactcccttccttgcaccagtcactacatccaaatcgtatgctgatagctgcacaaatggatcttctcaggccacagtatcttcagggaccaggatgtcagaagatggtagtagtccaactcaagcatcttcaagggatgtcatctgtgacgaaggtgcaatacttaaagtaatggagtttttggctttgcctagggctgatgccatacatctgcttgcacagtacaacggaaatgcggagacagtcattcagcagatatttgcgtaggcgttgtgcaggaaatcgggtttgttatttagaagaaaggtcaaattatttttttcaatattatttgattcaaatttgtgaattttttttataccccttgtacatatagctgcaaagaggaaatcactgcaacgtttgaaacccgaattgacggaaactactctctgtaaagaatctcttgattattgcctctcagttttaatgtgagataagttgtatttaataaaataattatggcctat

SEQ ID NO: 18260 - DNA, 782 bp, Glycine max
  Clone ID: PAT_MRT3847_116493C.1
cttgctgcctgcagttatacttacctacgcatcgcctcctttcttgccagatagaacgaacccaacccacaaatcaaatcaatctcatttattccaatttccaaactacccttcttccacaccacactccactcagatttcttaatattctcacaaaattattctctccctcccgtaatggagtccacgccggtgaattgggaagccctcgacgctctgctcatcgatttcgccaaatcggaaaacctaatcgaggactcctccgcgctctctccgtcgtcgccgtcgtcatcttcgtatcactcccgcctcgtcatccgtcagatcagacgcgccgtcgagaccggagccattgacgccgccgtcgctctcctccgcctccacgctccctccatcctcactgacctcaagattctcttccgcttgcgcaaacaggtccctctctctatccaatttattttctcactttttttctgttacaactaaaaagtctcacatcgcataggaattgaggcaaaggtaatttaaggtcaaaattgcgagccaaagcgacaatacctcggatgcagtattaggtcggaacaattactgtgattattgttctgattttttttttaaattgttttgcagaaatttattgagcttctacggaaggggactgcggaggatcgagactcagctatcgagtgtctgaggacggctctcgctccttgcgcgctcgatgcttatccggtatctgaatttgtgaattcaaattggcttttgtttgttggtttttcttt

SEQ ID NO: 18261 - DNA, 1310 bp, Glycine max
  Clone ID: PAT_MRT3847_116494C.1
ggctcgagattaataattaatttatgaagttgataaattttcagatatttagaatagattcaattgtctacgtcagcgtggaaatcctcatattaaaggaaggcaccaattactcaattggttattgctgttgcgcgagagaagagaggaacgaagactgaaaaatggcgtcatggaattcatttccgcttcaagttacctacgaggctctgggttggttcgccttcgtttcctggtccatcagtttctatcctcaagtcatcttgaattttcgcaggaagagtgtggttggactcaacttcgatttcgtggtgctaaatctgaccaagcacagttcctatctcatatacaacgcttctctctacttcagctctgctattcagaagcagtactttgagaaatacggttatggagagatgataccttttgctgcaaatgatgttgctttctcgatccatgctgttctactgacagcaattacattgttccagattgcaatctatgaacgtgggagtcagaaagtgtccaaggtttctattggaattgtctctgttgcatggcttgttgcagcagtttgtttctttattgctttgccgaataattcctggctttggcttctctccgtcttcaacacaattcaagtagttatgactactataaagtacattcctcaggcagtcatgaacttcctgagaaaaagtactgatggcttcagcatcggtaacattctacttgatttttctggaggaatagcaaattatggacagatggttgtgcaatcaatagatcaagattcatgggtcaacttctatgggaatataggaaaagtgttgctatctttggtatctgtattctttgacattattttcattattcaacattatgttctgtatcgtggtaaaaaatcctccaaattggagatcactacagagcaagaagatcaaatcagagagcaccttgtcagacattctgatcaatcatcaccagagaatgtgtaagatatgacttacttcataatgtatattaaacttcccattgtatgttatttgtatcaaaatccaattaggatgtttttcttatcccatacatcaggggcaccattttgatgggagcttcaataaatattgtataagttttaagaattttaggccagcattcttttatactattttgtattacaaatttgtatatgaccaagtgactggcatgtattatcaagctactcaattacctactggtgtttgtggccgtttgaaattttcccacgatgtgagtgtttgaattcaaattagattatctaaatttttgtt

SEQ ID NO: 18262 - DNA, 422 bp, Glycine max
  Clone ID: PAT_MRT3847_116495C.1
ccaatctaataatttgtataaacttgcaagactaaaaatttaaatgcaacatgatgataatatacaaggattcacaaattaggacgagtacaatagtccattagctgcagcctcgatgtacagaaataaaaaaaataaaataaaaaaacaaataaaggtggggcacagcagcaagaacctcctgaatatttcacaatgctaatctagtttaaactggctgataaagtatctatttgaactacacaaccacttgatgagagttaatcaggaactgtttaaattctgaaagagctctggaagatgagcattggtaagcttcggtcttttgctgatttcactcttcttcttcttaggctttggcttggaagaaatgccttgaatttgagctgcactcctcctctgtgcagggttggtagcgggct

SEQ ID NO: 18263 - DNA, 326 bp, Glycine max
  Clone ID: PAT_MRT3847_116496C.1
ttttttttttttttgggaccaaaaaagtccccttaattaccccggggcccgtggggatagaataaaatatggttcgccccccttttccataaattgggcccctttgcgcgcctttaccaaaaaagggggttatgggtattaaacccagtcccagaattaacttaaccaccctttatataaaactatatatttttcccttttgccctcttggggtacataaaacccaagggggggcaaaacttattaaggtggagaaccctttttttttgatgggggccggcctttttttttgtaggccccctcccccttaagggggggttgccatt

SEQ ID NO: 18264 - DNA, 206 bp, Glycine max
  Clone ID: PAT_MRT3847_116497C.1
cgatccatctacacggtcaaaaagaaaatcgtttgccttgggaaaatacggacacagagacagagagagggagagagagaaggaaatggaaagcccaaagttctaatggttggtaatggggttcttggcattgtccttgggaccatccaggcctggggttaataaggtagttaagaatgaaaagaaggccaaccttttgcaagcaa

SEQ ID NO: 18265 - DNA, 212 bp, Glycine max
  Clone ID: PAT_MRT3847_116498C.1
ttttgtctatggaacaagatggtgtcttaaaactgtgtgatcctatttgtacttgaaaaaagttgtaaccattttgatgagagttttatatgactcaactaacatgggttttaggagtgatgttttttgagtattcaccagaatagaatccatattttttatcatagcctaccctatctttactactaactgttctaactgatagtttagtt

SEQ ID NO: 18266 - DNA, 287 bp, Glycine max
  Clone ID: PAT_MRT3847_116499C.1
ttcctcgtccggaaagcctagacttcattggcctcaatcactatgcgaactctcgtatgccaaggactgctccctctctactagcactattggagcagaccatgcactagcaggttgcctagacagaactgcaacacgagacggcattccaattggagaaccgacaggagatccagacttatttgacggctcaagcgattgggggacgcttgatgaggacatgaaaacaatgattacatatgggggcttgtatatgccagaaaagggagctactgaaccggctaagc

SEQ ID NO: 18267 - DNA, 365 bp, Glycine max
  Clone ID: PAT_MRT3847_11649C.1
accaaaggaaaaggaaggaaaccttcaaataaaaatttatgggaaattggaataaaaaaagaataggaaaggggtgtcccattatggcccccccccggaaacatgaaaaatgaacccgcgctaattaattaacccctcgtctaaatctcaagagggaacaattttggaccccccacgggggggccctgatgaagatcccaaaaaaaaaatcttttaactggagaaaggggggggcttaggcatatccttgacaattccccaaacaagctgggtctttgggagggtgtacccatccctaagggacctgttgggaaacaaaacactcacgtacaattggtggcccaggaaacgattctttgccctct

SEQ ID NO: 18268 - DNA, 1157 bp, Glycine max
  Clone ID: PAT_MRT3847_1164C.1
gtacccgtgagccatgcaccgacagttggattacatctcttagttttgtccgtggaaggagctttttccgcagcatttggcagggcgtgagcgtgagggcgattttgctcacaccgatatctagagtggtccagctccaaacccgaacgaggctgcagtacgcaacaagaagaagcacagtcgtttagggagaaagagagaaaaaaaggctaaaggtacacctacatacactactacacctcatctagtttttttttttttttcgttgggaaggaaaagattacaaacacgccacgagggcttttaatttcggaaaaattgacgctgatattcaagaacccgtggagttggattctgccagcagactctatccattacgggtgtattcctgatgataagtttggtgggttcaaagatgtgggcaccaatgtgtcttgtgttgtttcaaggaaggacatggcaacccatatgagcccacagggtagctcacgctcctctcctaattaggggccttctttctctgcctccacctcatcaaccttgcctgtcactgaattgcggaccattggttcctctaaagtggatattagggatgtgcaggtagatgaacacttaccgtgacaagatggtccaagaaacatagggccttattcactggctgaggctcataacaagtcaaaagctggaaaaaagaaaaaggcaaaaagtgaggaagccaaaatctctgcatgggagacttgcaggcaaaagcggaggcagcaatacggaaactagagtggatacaagtcactgagacaaaagtaatggtgactgagatgaaatgtcgattttgattggagtatgatgaaattggaaaagaggcgagcatcctctatggataagattatgaacaagcgtatattggcttagagaaaagctcaggaaatgagaagttcagttccacacaaccaaactgatcgggttgtaagaacttcacacaaggcttcatgatttcttagaaccagccagatgcgttctttgagtggttgtttgacttgccatgccttttaagcattctttcatgtttgagtgatgtttggattgtccaatacttatttgttatattgaactgtccttttctattatgaagcttccacctaatatgtttcctggaaaaa

SEQ ID NO: 18269 - DNA, 451 bp, Glycine max
  Clone ID: PAT_MRT3847_116500C.1
tttgggctgagttgtgtgcttgattatgtgcttgcatggtccgtgagaagatgctccaagggcatggtcgtgagaagatgatagaggtgcatccccgtgagaagatgggagaagggcatggtcgtgagaagatgatagaagggcatggtcgtcagaagatgatagaacggcatggtcgtcagaagatgatagaccggcatggtcgtcagaagatgatagaaggggatggtctctgaccctgcctccgcctcggcccacagactcccgtcaacgacgcccatagtgtccaattaaagacgtacactgaggaacgatagactatcgagtcccataccttcaggaagcgtcctcctataaatagaccgaccattgccaacgattacgctccggcctagactaataccgcgtacgcggacgacaacggtgcccataaaggttacccccctaaccc

SEQ ID NO: 18270 - DNA, 260 bp, Glycine max
  Clone ID: PAT_MRT3847_116501C.1
ttccgggcctacacacgcgtcaaaccggtcgacagaaagggacttacgggtaaatgtttccgtcactcttcgtctcttaccgactactgtacacgctctccctatacgatacaatactacatacgtgtacagtctacgttatcatcactcaagtgggtctcgttgcgtcttctcctggctctccgttctctattgtcttcccagttttattcacttgctcgccatttccaacgctcgccagttgcacatctctcattgaa

SEQ ID NO: 18271 - DNA, 251 bp, Glycine max
  Clone ID: PAT_MRT3847_116502C.1
ggagagagtatgcttatctttttcacactgttacagactggtgcaacgcttatggatcttttagagggactggtctgcctaatccaccacatttgatctttgcagacggccatagagcggtatgcatgaacagatgcggttatttgggtccagaaaaacttaatcagctatggtggaggtggggcttattagaagacatatacagtgtgaactcctgcagaacgattgggaggctggattggatacatttt

SEQ ID NO: 18272 - DNA, 443 bp, Glycine max
  Clone ID: PAT_MRT3847_116503C.1
ttacctcacatatgctgtaaaataatataatgatagcagaggctctattactgttgcagagaccggtactttcgtctttaactatgagctattacggcatacattactgggcaatactaaatccccaaaaagccctgagaattgaagacaagggacccttacttaccttattccccgactctttctgcttaggctgagcgtccacaaagtagggagctcataggaagactgtaataactgttaaacagcttgagcacaaccagggaatgcaagctcgggcagggaactaggtcatctgggtgatcacagtggatggcgaacctgccaggaagttcctatggcagttctccgccttcataccagtaacgaagaaaatcacaatcgaagagaggaacaccacaggtggataacggggggggaacacaaatatatggtgatcaaac

SEQ ID NO: 18273 - DNA, 271 bp, Glycine max
  unsure (1)..(271): unsure at all n locations
  Clone ID: PAT_MRT3847_116504C.1
tctactcaaactgaaatttattggattaaattacctcccaggggggacaacatccgtnttntgatctatacacccacaggtgtaacaactaacaagccttgaaatatgaatttgagggctaaatcgatcctaaatacatatatgactgtgtcaacgttgctagattaaacataaacatgtacgctgagcaactacaaaacatcttgactatgaaaacaaaataaaggacccggtgttttcttacataaaatgcctgaactttcttcagtcc

SEQ ID NO: 18274 - DNA, 399 bp, Glycine max
  Clone ID: PAT_MRT3847_116505C.1
tttttgtcgcgtgggttctttctttcctccaaggctctttttctcttttgttttctgagcccaaggtagtctttttattttgccattctcgttgcgtggaagattctaccaagtgggtgtgtgtgtgggtgtttgactttttctctgcgttgatgggttgatgatgtctctgggcattgcgaaagacatgggttttgatgacaaattgaaagacaatgagggtgcaggggatgttgatgcctcttggttgcacgcggcaaaagcttggactgatcatgaagaaagtgaagatgaacgatgaggacgaggaggaggatggacactgcagagttacgggagcgggtggtccattgctgattccgttgatgattatgctgaagacgtggaatggtacattga

SEQ ID NO: 18275 - DNA, 399 bp, Glycine max
  Clone ID: PAT_MRT3847_116506C.1
cccttacgcactcctagaagacgaaagggtccacatattgtggaggtgatatagccatcttgcttgcatcatggacaaatgttggtccaaaataaaagtaaagagcagaaaaggttgcaacaattatgaggatccttacgcactcctagaagacgaaaggatatctcagatagcacctcggctaaactaaaggcaagactacagtacacatacttagctcttaggaatgtagttgcatatatcaaatttctgtttactttgcctttgttgatttagttccattgtaaaatgtcatccaggatcaacttgttatctattttgccttcatcattgactcaaaattctttccaactgccttttccgttttgcatagatatatgtataatttaaatctaaatg

SEQ ID NO: 18276 - DNA, 1298 bp, Glycine max
  unsure (1)..(1298): unsure at all n locations
  Clone ID: PAT_MRT3847_116507C.1
tctctacggctgcgagaagacgacagaagggggtggctggctgtagtagtgctttgctgtccgagagtaaagagtaagcctctttctcactctctaatctatttgtgaactaggttttggttgcagagacatgggagaaaggattccgtgtgggagtggcatgtatttccccttccctcctccgccatctcccattcgcccttcttcttcttcttcagatcgcgataggtatttggccgaactactcgctgagaggcaaaagttggtaccctttctccaagttcttccacaatctaccaaactcctaacccaagaaatcagacgcatgtccgttggtggcggcggcggcggcggcggctttaatcatgagcctgcagcagacactcctcctccatattttaggcctatggatctcgagggatgggcaattgaggtgcagcaggacaaaccaaatccccaaaggatgatggcttggcctgctcctgtagtcaagagagttatcaggcttgatgtccctgtagacaaatttccaaattataattttgttggccgaattctcggacctcgtgggaactccttgaaaagagtcgaagccatgactgaatgtagggtttacattcggggctgtggctctgtcaaggattctattaaggaagaaaagcttaaagagaaacccggatatgagcaccttaaagaaccattgcatgtgttggtggaggcagagtttccagaggatataatcaatgctcgcttggatcatgcagtggcaatactagagaatcttttgaagcctgtggatgaatcccttgatcactataagaagcagcaattgagggaactggctatgctcaatggtactttgagggaggaaagtccaagcatgagcccaagtatgagtccaagcatgtcaccttttaacagcactggaatgaaacgagccaagacaggaagatgaccctgaaatgatagcaaacatgatctcttagacttttcacacccttgggctcaatctccacaggatgacacatggtttacgcttgacgcctattcttttggccactagaacctgactgtcgctttgcttagttatagtattaactattttgcaggtgctacttggttatggtagcgtactcctagttcaataccttttttcctttcttcttttttatttattattttgcatttatcaaattattaaattatatacatgcatatgcatggtattgactcaaactaaataagcagcaaatggagagtctttcattattgtgatatgaatatttnnngcatcactg

SEQ ID NO: 18277 - DNA, 477 bp, Glycine max
  unsure (1)..(477): unsure at all n locations
  Clone ID: PAT_MRT3847_116508C.1
cttggctgttgagtgcatgctggtcgtgagaagaccatagaagggggcctcccgtgagacagaagagaaagttgctgtcgcttcagctctcctgcttttcggctttacgctagccctaggacggaactctaggcgaagtatgtttccgccgctaaagccacgggctgcatcgggctcagggggtggccgatctaggccagagcgaagcccccggacgactaaaattgatgtactacgaagaatgcgaagggatttgcgagagaaggagatacctctatttcatccgagctcgaaagagaagtaagaaggccgtgtcagaggactctcctacggcccggtctaagatccaaataaaatacctgccgccccgccgcagccaaaggacgctaaacgccaaccgctacggattcgaaccacgtattcatcacngccgataccacgttaccacgcccgcggtcgagccacgatcaaacccac

SEQ ID NO: 18278 - DNA, 288 bp, Glycine max
  Clone ID: PAT_MRT3847_116509C.1
cccacgcgtccggcctttccatggactgcttcataccccctaaggaactccacaaggactacccacaagaagatctagattggagatcacccttgcatagatgatgatgatcatgaattcgtgatcccaaacaaaccttggttggaggagtttttgtattttttttctaaataactgttgttattgatattgctaactgttactactattacttaacatatatatgtagattgctttgtaatagtgtattactgattttgggcatatatttaacagatctcatctatt

SEQ ID NO: 18279 - DNA, 401 bp, Glycine max
  Clone ID: PAT_MRT3847_11650C.1
agcattaaaatgtcatggcccagcaggttggcgcatagctgggattcaggtacagtggtccacgttgaggccaagctatatggacaatatggtaccctcatttgattgtagacgtcccatgaaacaaataccgactatactggtacccaccaggatgtcctactccctaaaacattaacataaacccaatgtggctaaagcagttagcctgttaaacaacctaaataatctggacccatacatccataatgaccaatgcacagaaagaccctgaaaaagcttcaagccttgtgggatgtttgattccttaccctgtcctaaccctcattaagaccctaccaagaggctgcacattgcctcctgatgtgacaggctgcctcattgagataatggcgacccag

SEQ ID NO: 18280 - DNA, 826 bp, Glycine max
  Clone ID: PAT_MRT3847_116510C.1
gagaatcaagcagtgttaaagttgaggctttagaatttggagatagtgaatttggaatatcagagttggaaatgttagctagggaaatgcaaggttttggaaagggagggatagaccgggaggtaggacctgaggcactagaatcacaagagaggctggatagagtacttgatgaagagttttgggaagaactattgtttagtgagaaatttgagggtcgattagatattccaacttgctgaagataaagatgaagatgttatcaaagtgttggccaatcaacttgatcttttggattcaagtcattaagtgccccactgaatcatttaaccctttccattccgttcactactaggttcaagacttcaagacctgccaaagtcaattataaaggaggcgcatatggtggagtcatattatataatgctataatctttggtgtttataattctagctaactctattatatgtccttttgtagcacatggtgaaaccccggattctcacttctctcacttcaatagtttgatgaggtaggttgctgctggtgcttggataagagtatttggtagtgatagcgatcactatatacgccaaggttcaattttttaaacccccttcatgtacctatgtatgtgtagttgatatgaatctgtcaaggtctaattatttcaaaatatcagtagtgctaatgcatcatatcaacccagatatgttattgattgttgtaggtaatttgtttattacctcaatgaatgtagaatggacaagaagtagctgttctcgaacaatagtaactgaagatcaagagccacctggtggttaa

SEQ ID NO: 18281 - DNA, 274 bp, Glycine max
  Clone ID: PAT_MRT3847_116511C.1
acgacagaagggctatctcccttacttaaactaagagaagatcattgtaacaataacaagacaaaagtggttagttccctttaccgaaacgaaagagggtttctctcgaactttggcgacgaggttacaccatgatctggaagtatgtcttataacgacgtagttcaaccaactttcccttttctttttggctgtctttacttgctttaaagaatatatgtcaatttctaataaattctttcacgtctcgtgtggagattcattaactagataa

SEQ ID NO: 18282 - DNA, 2576 bp, Glycine max
  Clone ID: PAT_MRT3847_116512C.1
tactgctgtgattaggctgcgagacgacgtcacagagagagaagggaaggaaaagtggtgttggtggttgtcctcctcattggtatggcaaccctttcctccatcctctcctcctctcttcctcttttccatcgctaccctaaccctaacccttcgctctttcgcccctccctttctctctctttctctcgcactaaaccccgttcccccttcctcgttctcgctgcctcttcccatgatttcgcctccaactccaagaaatcagtgctcaccgagttgatacaagagatagaacctctggatgttagccacattcagaaggatgttccaccaactacagcagatgccatgaagaggactatatctggtatgctgggcttgcttccgtctgatcaatttaatgttgtcattgaggccttgtgggaacctctctccaagttactgatttcttcaatgatgactgggtatacactacacaatgttgaatataggctttgtcttgagaaaaaccttgatatgtttgaaggagatatagagaagccaaaggcagaaagtacgaaagtggacttacaagggttgatgcatgacagtgtaaatgcaattgagtttggtagaaataagaatttgtcttcaaaagagcaaaagcttcatgaggaagttgacattcaagagcttggtgaaatatctgcgaaagctcatcaatatatttttaatttgcaatctcgtttttctttctatgaaatatgagctgcatgaagtaaagaggaaaagtgctgctcttcaaatgcaacagtttgttggagaagaaaagaaagatttattgggttacttgagatctcttcaacctgaacaggttgctcagctatccgaaatagctacccctgagtttaagaactctatcctctctgttttccgtggtctccttgcttctctttcacctaagattcattctaaaccttccaccatgtcagaaaatacaacagttggagcaacaaatgctgggaatgaggattgtgctgaggttcttgagaactctgctcttcaatttcagcctgttatttcattaactcgggattatcttgctcgcctgctcttttggtgcatgctgttgggacactatcttagagggcttgagtgtcgattggagttgacggatttgctttccttgacaagtgatgccgagaatgatgtttctggcagtcaaccaattgcttgaagttcaaattgggtggttcaatctgtatatagacgtgttgtttcaacatgatttttgcgatacagactcaagtaccaatcacttctgctgaggagctatctttgcttactgaagaatattgcattcctgccatgtaccaattctcggtcttctagtgttagagcatatcggtaggatcgaagatggtattttgttttgactgggtgataacatattatagattatagaaaatggaaatgtcgtggcgaactatgcagtaccagttctctatttaaatactaaaacaatttagttaggtgatctagattttattttccatttatctcattcgatgtcttgatccgggtaataaacagctaatagttttgttaaagcaagacattgtattagtacttatagaaaatgtttaaaatttctgcaatttttactttagattaaaatttccacttaaagctgaaaacatacaagctagtgggaaagcaagagtcaatttttttcttcctctcgctgtgtattaacaaatgaccgcaaggatgccaatgagcttaccacattcatgagcacatcctctggggggggccccagaaagagttatcttttctgtttaactggctgcccaccctggaagtgctggggccggagttgttggtggtggtggtggttttggagccggtggtggtggttttggagccggtggtggtggggttggtagtggtgaccctgctcaaattgtctccaaagccttgctctgtttcaatgataagaatatttatcgcagctgcgaagagacgtgtagattgaacgagaatggaaacctgaatgtgcctgtagagaaaactgatacattctgccaaggaccatgtttgtcagagacaaacttggtcctcaattgcctggacaacgttttcagcaacttcatattttacaacagggcaaccatacaagacatcagagaaacaattgaagctggatgtggctatggccgtcaaagaggaaacttcaatgtggctgagcacattcagagagaagaaagcaaagccccaaaggctactagccatgttgtaatgggacttgctattgtcatgatgggacgcgctctattgcctctgaattttacatgatattacgttgataataattatttatgcatgctcatcagtttcatgtgtacttatttactgatatgttcatatgtagctgcttatagaagggaaaatattttaggttatggagttgtattatactagcttttcccttggtcgtatatataagttatagatgtgtggaacacattacagataaataaattttgtagtatatgggcatatattaaacaaagaactaccccagttttagtttt

SEQ ID NO: 18283 - DNA, 948 bp, Glycine max
  Clone ID: PAT_MRT3847_116513C.1
tacggctgcgagaagacgacagaagggggtgaaaaatttagataattaagcttggagaataatggcattcttccaagtgagtgtcaggcgttggattttaacctttgctatcctttacgtttgtgtatttgggaaaaactttggaaatgctgatgaggatgagtccgaggcacagacaggtggtggtgggtacggtggtgtgggaggtggttttggtggtgctggggccggagttgttggtggtggtggtggatttggagccggtggtggtggttttggagccggtggtggtggggttggtagtggtgaccctgctcaaattgtctccaaagccttgctctgtttcaatgataaaaatatttatcgcagctgcgaagagacgtgtagattgaacgagaatggaaacctgaacgtgcctgcagagaaaactgatacattctgcgaaggaccatgtctctcggagacaaacttggtcctcaattgcctggacaacgttttcagcaacttcatattttacaacagggcaaccatacaagacatcagagaaacaattgaagcaggatgtggctatggccctcaaagaggaaacttcaatgtggctgagcacattcagagagaagaaagcaaagccccaaaggctactagccatgttgcaatgggacttgctattatcgtaatgagacgcgctctaatgcctctgaattttacatgatattacgttgataagaattatttatgcttgtcatcagtttgatgtgtacttaattactgatatgtagctgcttatagaaggggaaaatattttaggttatggtcgttgtattatactgtattttcccttcgctgtataagttatagatgtgtacatgtggaacacattacgataaataaattttgtagtatatgggcatatattatacgtcagttttagtttaattagttatacct

SEQ ID NO: 18284 - DNA, 274 bp, Glycine max
  Clone ID: PAT_MRT3847_116514C.1
ggaggcactagcggaggtgcctcatccacggcgcgcatcccactatacttcggagtccttgcggactgcacaggatccgcgggctcatactagctgactaacacacccttacagctcgatggcaccatacagacacccaccagcacctgtgctggagacaaagggctacatcaatgtgcgtgatggtataagctaaagccaagccccatccatgggctgggcatctatgatgatagcgggccaccgtgatggatccacgagcgatattatgact

SEQ ID NO: 18285 - DNA, 208 bp, Glycine max
  Clone ID: PAT_MRT3847_116515C.1
tgttgtggaacccttgaaagggaagatttgcctgattgcttatcatgcgccatccactgagagaaccttcgtacatatatatccgcataaccacaaggcatagtcctacttgctacataccatcggtggaaggcaaaagatgaataacctaaccgtattctgcacaccaaagagtaaatgttaggcgagccttagacagaccagagca

SEQ ID NO: 18286 - DNA, 483 bp, Glycine max
  Clone ID: PAT_MRT3847_116516C.1
gacggctgcgagaagacgacagaaggggacacaaagacaaagacaaagactccaacactccatcttcccggacttcacttcactgcggctcctcaaaaaggtaaaaccaactctgctattcgcgcttagttagttacattcgaggtgtgctgcacattcatgacttggtggtgctcatagtcatagatggggaagggaaaacctaggtctgttgaaaaaggtgtggtaggacctagtttgagtgttacatcctcgactatacctttggggcctgtgtattaccctactgaggatgaattcaaggatcctttggagtatattttcaagattagacccgaggctgagccttttggtatttgtaagattgtgcctccaaagagttggaaacccccttttgctttggatctagactctttcactttccctaccaagactcaggccattcacaagctccagtctcgccctgctgcctgtgactccaag

SEQ ID NO: 18287 - DNA, 555 bp, Glycine max
  Clone ID: PAT_MRT3847_116517C.1
cgacgttgtattggaaagatcaaaaggccacatctccggttcgacggattcattgaccgaagcaaccaaaggcacgatggtgaatgaaacatccttggacactgccatcgagatctaaatccttgggcattgtcgttgagatctgaaatacctaaatcagatttgaagatccataatccctggacattgtccttgtgcgccggcaactccttgaacagctacaccactctctcttcctccaaatccctcccccacaccgaacgccatcatctccctccacttgaccgtgagtcgcagcgtcagatggtggaggtggtctcatcggcgacgacttatctgagtttgggtttcgaggtccaaaatatctcagatctgagttttgggttacagtaaacatgattttattgatttgtggctgaatattattgcatacagaatgtggaagctgaatatgtgtttcaattttttatatggcctatggattctgatatttcaatttggtcgaagggagatttgggctttatgaaaaaggtgagaatgaatttactaggtttt

SEQ ID NO: 18288 - DNA, 410 bp, Glycine max
  unsure (1)..(410): unsure at all n locations
  Clone ID: PAT_MRT3847_116518C.1
gaagcaaggacagcggcgctagcaagaagaagaaccttctttccaacaccaacaacaggaagcanggggaggacactaacaataaagagggcgcaaagaccggngcagagaagaaagccaaaacacccgcaccaagagagccccagcctaagaatgaaaccagcggaggcgacagctgcagccagaacaacgacaccacggcagagaacccccaaagacagcacgtaggaccgcctccacaacacagagactcagcaagaacaagaacgccagggatgcccaaaggacggaacaacaactccacacaccaactccaggggaaaccggaagaagcaaagggaggaggagccaaaaaagaaccaacggcctgggaggacaagaagggccccggggaaacccggagccccgcc

SEQ ID NO: 18289 - DNA, 429 bp, Glycine max
  Clone ID: PAT_MRT3847_116519C.1
ctcgagccgcagtggcattgtttgtgattattcatcgttctattttaatcgttaacgatgtcgggaggaatggattttttaagcctgaaggaagaggatgtgaccaagatgttaagtgccaccacacacatcggaagtgacaatgttgatttccagatggagcaatatgtctacaaacgtcgagctgatggtgttcacatcatcaatctccgtcatacgtgggagaagctgctcctagctgctcgtgccattgcagccattgaacaacatagcgaggtctttgttttctcagccaaggcctatggacaacgtgccgttcttaagtttgccactcatactggcgctactcccattgctggtcgattcactcctggaaccttcaccaaccagattcagaccggtttccgagagccgcgtcttctgatagtg

SEQ ID NO: 18290 - DNA, 138 bp, Glycine max
  Clone ID: PAT_MRT3847_11651C.1
atttcccttcgaccgcacgcggccgatcaatctgccccctattccctttaatggatatcgtttctcgacacccaaaatgatcactggatcggtgattttctacggcggcgaggtctactctagttcatctatccaaaa

SEQ ID NO: 18291 - DNA, 1081 bp, Glycine max
  Clone ID: PAT_MRT3847_116520C.1
gaaacatgtctgcttcaagcttacaccataacctgtctccatggtgcttctctccagtccttactatattcttctctctgcgcttcttttcaggcaatttccatcttccatgatccaaggaaggtttcatctatctttcttgcaaaataaacatttgtttgaatttccattgttcagctcaaacctctgttgttttttctcttttgtttggtgggtaccccactgaacatggcaactgaagctgcaggctcttccaaggacaacaataaccaaggccatgtcaccactgaaaatagggctgatatcccaaaacaaaagggtccagcaccatctgaaataactgaggaactcccaagagaacaacatggggcaaggcaaaaccttatcttggatattcctgcaatatctcaggaggaagcaagagaagattacgtgaggataaacatgcctctaactccgcctccaagaagagtgattttttctccctgtccaagtcctgttttccccagaagcaaagaatccccaggtccctcctcatcaaaaagtaaatcaaatattaaaacctttcttcccaaactcagtttgaaatttcgtaacacaagttcggagattgaaaaggctgccttcctagcactagaaggatcaacagtggcaccaaaaaagccttttctttcaaggacattatctcttgtcacacctagagggaagaaaacatcatccttacctgtaaccccaattgctcattcaaatccagggtctgtacatggagggaacttggtttatgcagaaacagttgagaaagaactgaacttaccaatccatcgttcccgttcagtacctgtgcttaacaaagaaggtaactcacctgtacgtggcatgtttcgtatagttccgaccacactacgattagatgagaaaattgccagtgcaacgcctatgacatctccaattcatgatactgttaaaaatgaggatggtggtgaagatattcccgaagaagaagctgtttgtagaatttgttttgttgaactcggagaaggtgctgatactttcaaattggagtgtagctgcaaaggtgagc

SEQ ID NO: 18292 - DNA, 1049 bp, Glycine max
  Clone ID: PAT_MRT3847_116521C.1
ggggatcccaattcacggaacctactctctactctccagggttccttctttcacctctgcaatttctactccgccacgccctacgacattgttcgtcgtaaccctctcttcgttccacttaggaagagaaaagggtttgtttggatatggaaggtgacgagcacatgaacgaggttccatcagagaacagcaacttgggaagtgattctttggaaaaggagaacattttggaagatgaaaaggaggatttgcaagatgggttgaagttgaaggtggtcactgaggaagtgagtggaggattgctcgctgagaatggttgcatttctcttgaggatgggagtctcaaaagaagccttgagactgttggaacatctgtatcaggtgctaaaagagctcggattacagttgatgaatatcaaccttcagttcattttacgtataattccctaacaagagctagtagacagaagcttcaggaacttctacagcaatggtcagcatggcatgctaaacatgtttcgtcatccaatgatgctagcgaagtgttggaatccggtgaggagacattttttcctgctttgcatgttggacttgaaaagacttctgccgtgtcattctggatggagaaccaaacaagaaatgataagaacaaagatttcattcctttagctgataatactgtgcctctatatgatcgtggatatactttgggattgacttcagctgatggttcaagtaatgtggatggtggtctggagattattgatgctgctgctaggtgtttgaattgtggttcttacaaccactcattgagagagtgtccaaggccccgtgacaacactgcagtcaataatgctcgcaataaacacaagtcccgacggaaccagaattcttcttcccggaatccgactcgttattatcagaattctcctgctggaaagtatgatggtttgaggccaggtgctctggatgatgcaacacgtcaacttttgggcttgggggagctgatccacctccgtggctcaacagaatgcgagaattaggatacc

SEQ ID NO: 18293 - DNA, 342 bp, Glycine max
  Clone ID: PAT_MRT3847_116522C.1
gcaacacatggacagtctgaaaagagacaatagagaaactaatttcctttccatggcattgatctaatcggtacaaattttgatcgattcttgtatgaatttcacttcctacttctatttctttaagtcttgtcaagagatttcctggctgttgatgatcaaccatggtggtggtttctcgttgtttctgttcaaggagcagaagacaaaactcgatacctggtgatggatcgagtagatcacttggtacttaagaatctcacttgaatatattaggaaggagaaaaatcaaactatatatatttatggattgatataacaagataaaaatcacctataaat

SEQ ID NO: 18294 - DNA, 263 bp, Glycine max
  unsure (1)..(263): unsure at all n locations
  Clone ID: PAT_MRT3847_116523C.1
ggaattcggcacgaggtaattaaatacactgagaagtttaatttcagaatatataaatagttttccaaaaaaaaaaaaaaaaaaaaaaaaaaaaaaaaaattaaaaaaaaaaaaaaaaaaaaaaaaaaaaaaaaaaaaaaatttttttttttaagaacaaagtgggggcttcaagnaaaaaaaatgtggggccgcgtaatggccccccccccccccacctttgtagactggaaaaacctgggcgtttcccagtttaacccaaa

SEQ ID NO: 18295 - DNA, 251 bp, Glycine max
  Clone ID: PAT_MRT3847_116524C.1
gtggaaaattaaggttgatgtgccagcaattgccaaattgcgattgtgatgcagttattgagaccttgaaatatatctgtgtagttgccaagctactttcttgtcatttcctttctcaacaaggagttaggatcacaacaacagaatccaattcatgacgtcaaatatttctgtatcccaagctcatggctaatttcaaacaattccccactgttgaaagaatcaactttacattcatggaatctgagata

SEQ ID NO: 18296 - DNA, 198 bp, Glycine max
  Clone ID: PAT_MRT3847_116525C.1
aacttaaatttcagctatagttatccaccaccacgaccgtgtatacttcgactctacgcgcttcaactctacttctatagactctctgctgctaatgatcggctcaaactctgttctgtgcgctgacttaagcactgtcactatcgataatcgtctagtgacggttagtaacatgaacgattcgctgtagatatgcct

SEQ ID NO: 18297 - DNA, 532 bp, Glycine max
  Clone ID: PAT_MRT3847_116526C.1
ctatagtataattatcaagttaacgtaaagcacccaattaacacagtttgatacaatagggttgcataacctcatttttacttcatgtaaccctatagtataattatcaagttaacgtaaagcacccaattaacacagtttgatacaatgtaacatgaagtaaaaatgaggttatgcaaactatgtagaaaatgattgatggaattaagatgtcaatcatccttaagtacataattaattgcaccagttgttttctaattgtattgtttaaccccagttttaattgcaacaattgcaccatttctaatcgtttgatgattatatccaaatagtttgtagcttttgttgtatgtccattatccatcttcattcataggaagtatttgtgttcctaaaacgtgctgcatgttctaatttgattgatttgcctgtaccaagtatttttgttctgaaccaatgatgttacaatcccacttgtgagtctgtagttacccaagaccctcttttgagggagaacctacttggtgctgct

SEQ ID NO: 18298 - DNA, 218 bp, Glycine max
  unsure (1)..(218): unsure at all n locations
  Clone ID: PAT_MRT3847_116527C.1
gnaaaaaagccaaattgaaatacttttttaaaggggtacccaataacccgcctttaaaaattacttactacccagactccccccttttaaaaaacaattaatccctactttaaaccgcaagattttggagccctattaagccgggactgacattaatacactactatttttcccaactggtttcaagggtaaaaaaaaccctttaacaaaaaagaaaa

SEQ ID NO: 18299 - DNA, 310 bp, Glycine max
  unsure (1)..(310): unsure at all n locations
  Clone ID: PAT_MRT3847_116528C.1
tcncntgcacgcgtacgtaagctcggaattcggctcgaggtnannannctgagnatgctcaagcacactcttancngnannnannanangcaatnnntntgttgtncattncnttntccctttcatcncncgttagtngtanatgcganccatntctggttnnncggaatctgancttnagggcaagtcactgagaagnnggctatcantcccaaatntctggcagcccngataatatcccaantgtatatcacgataggtctatcaggcaagacccttnnaggttccatttanggtanatngantcnta

SEQ ID NO: 18300 - DNA, 328 bp, Glycine max
  unsure (1)..(328): unsure at all n locations
  Clone ID: PAT_MRT3847_116529C.1
cccacacatccgcttattgtcttctatatctcaaactcactacatcccaatgccataatcatggcacctgcttacctaattccacgccaactcatatacacctctactaatactcttatatctcccaatctcctatatctctattcactacttcacctattccaactctatacacaaactaaacttcactactaatcacatccaatcttagatgccaccctatcaaanaatttataccatcatccatgacccatacattgaaaacctaaaaacttcattttcatacatcccattacacccattgtacttgatcaacacgccctaatac

SEQ ID NO: 18301 - DNA, 143 bp, Glycine max
  Clone ID: PAT_MRT3847_11652C.1
caggattctgatcctattgtgttggccttcgggatcggagtaatgatgcagggacgtgttttctacgcctttagtatttaaggtgaaaaatgggcgaataaaccttttatcagcccagaaaaaaacaaacgaaaagaactgaa

SEQ ID NO: 18302 - DNA, 195 bp, Glycine max
  Clone ID: PAT_MRT3847_116530C.1
gccactccaagatcatctttggatggaggtgagaagaaaacaggatgttacattatagaaaaatatcatggacctgcactcggttgtaatggtcatgcttctgctgtcaaacaagaacatgattttcaattactttctgctcctaacaataaagtatcttcaatagcttatatttcaacttcttcactggaaaag

SEQ ID NO: 18303 - DNA, 125 bp, Glycine max
  Clone ID: PAT_MRT3847_116531C.1
ggctcgagctccatcctattttctgctacaaccccctttactctaaacatcacggttaccagattatccctcactaactattacactcgactgccatacttcctttttttaaacacttcccttca

SEQ ID NO: 18304 - DNA, 352 bp, Glycine max
  Clone ID: PAT_MRT3847_116532C.1
aaaccaaacaaactaaaagatcttgccaagacattaacaggaacagcagatcttatttggattagttaaaactaaggcaaaccacccgggaaagaggaacagtttcctaacaggggggagcaaaaacaggaatcttttttgcttcaggctttaaacaaggccaaaaatcgggcccgaagggtcaaaaaaaccccccaaaaaaaggctactaagctttggaaaacaacccggaaatgaaaaggcctgaatttgggatttatcccccccacaaaaggccaaaccggccatgagggaaaccgcccggggggaaaaaccttcttaactttagctttcacattcacccaaggggggc

SEQ ID NO: 18305 - DNA, 352 bp, Glycine max
  Clone ID: PAT_MRT3847_116533C.1
tcggattctcctcgagctcagccaatcggctcgagatataacaaattaaataaaaatttattttaaaaaaaccaacaacttataagggaaggataatttaaaatcccggtgggcaaaaaaaaactttttaccaatacactaatctttgaccccatcccttcttttttctttcccccatttttactatccttcaccccctttttttatttccccccatttctcgtagaatttccctcttttctcatatttctatagcttaaaaaactgttcctcttatatttaattaactcttcccttatccaatctattcttcccatactttctctcactttcatttgtgccgtattctcaa

SEQ ID NO: 18306 - DNA, 335 bp, Glycine max
  Clone ID: PAT_MRT3847_116534C.1
cacacgcgtccgcccactcgcccggatttacggctccttcactcacatcacagccgcgtggctcatctgtgcgtgctcttgttctttgtcaggtctgtcgcttcttgatccacaacttggatccatttcattccgatcctgccccttcaccggcactgcatatcgatctgatcaatcatacaagttgattgctctcgcctgtatgttgctggttggctttgaggacaagaacttttacattgttcacacatgtgccatcattgaatgcataaagggactggtgtttgacagtgcagcgatgacatttggcttgacgtactgtaatttatgcaatg

SEQ ID NO: 18307 - DNA, 800 bp, Glycine max
  Clone ID: PAT_MRT3847_116535C.1
tacgttccagatcgcgggccaagagaatataggaatataagaactaagatggattggatcggagcgtaccgcggaggccagagaagcagggactggtgcgacccttcatcaccattcactgatttgtgggaccctcgtcgtgtcggtgacgctgatgatatcacctcctctctcgcccatgctcacgttgactggcgtgagactgataaagctcatatcttccgtgctgatcttccaggggtgaagaaagaggatctgaaggtgcaggtggaggagaataagatcctgcagataagcggggagagggtgaaggagaaggaggaccagaacgacaagtggcaccgcgtcgagaggcagtgcggaagcttcctccgccgcttccggctgccggaggatgccaaccccaaccagatcagctgcacgctcgaaaacggggtgctgaacgtcaccgtgcccaaggtggagaagaagccggagaacaagaacgtgaggcagattgatgtggtttgatgatgatggagcatcatgaggacttgtaatgtttgaatgagttttgtgttatgtgtgtgtgcgcaactgtgcatattactgtacaagttagtaactacgtgtctgccatatgaatcaatgtaagtttgatatgaatgggaggaaactttgtttgcatagtttgggaattttttttctttttcttttctttgttttcatcttattaattaaggtgggagttgtgcactgtggtctgtcttgatgcttgttctcttcaataaatggtcagactttttttcttttgttaaaaa

SEQ ID NO: 18308 - DNA, 401 bp, Glycine max
  Clone ID: PAT_MRT3847_116536C.1
gtccggtttggctcgttttgggggggctctttgacctattgctgggaaaattgctttgcacaggattaaacaggcactgcctgctggatgtaaatttggccgtggttgggtttggtgagtatgaaccacttctaaccccaattattaaaggttaataattgggcccaaaaagaaactagtttggttatgaagtttccttcctctactgaattaccaaacagtaaccaaaattgtaagaatgtgaaatccagcatcgtgcatcctttaaatggacagatgcttgagggaaaacattcttcaatgtctgattttaaaggaaaacctctctttggttctgctggagtcagacttactgctcttgcaacatccttaatcaggagcagaatgcccattcatgaaat

SEQ ID NO: 18309 - DNA, 254 bp, Glycine max
  Clone ID: PAT_MRT3847_116537C.1
ggctcgagctctaggaggcaaaacttgctataggagtaagctatgacgcatttgaggctctgtgagaattgagaactggccaaagatgttgagggtcaacagcaaggaggagagtactctgccagagactaccatgacactcgtccagcaggctttgatgcgatacagcggagctcacagagtggtcagtctatagagcgctcatcgctgagttgatagcaacccgtctgcaccgatatgtcactgtgctcacc

SEQ ID NO: 18310 - DNA, 367 bp, Glycine max
  unsure (1)..(367): unsure at all n locations
  Clone ID: PAT_MRT3847_116538C.1
ccgaattcccgttcgaccctccgtccgcccctcgtcgcccacgcggcgcccacgcgaggggggacactttcaaacgggtggggagacaacaaacgggggggcacagccgaaaaagaaatacacnggctnccaaaccataacaaacaatcatcacatctccggattctatatattatcaaccgctgtgtcccgttaaaaagcaccaccaccaccaccaccacaacactattttttttcccagcaatggcgctagtggatctggacgggaaccccatgaaggcacttaccatctgcatgatccgctcttccggcttctaggcttccatctcttcgaaaagctcatgtccgaaacccctcacaccgtcct

SEQ ID NO: 18311 - DNA, 207 bp, Glycine max
  Clone ID: PAT_MRT3847_116539C.1
atggcgcctccaacaatcaagcaaaggagggaaacaacgcaacatcaaagagaggaggaggggaagagatttattattaccgtttttggagagattgacaagggcgtgcgcggcgtgcttggtggcgggccgattgggttcgttccagaagaaagtggaatcgaggagggaaactgttccttaacgtcggagaggagggcgcttgtt

SEQ ID NO: 18312 - DNA, 513 bp, Glycine max
  Clone ID: PAT_MRT3847_11653C.1
gatcttgaaatagtgttcaatagaggtcgagttcctattgccacatggaacaagactctattggcatcaaatttacaaccatctagtgagagctgcgggaatgccggatttctgatgttcaactcaaaatttcttaaaccaaatggaagcaagttattgagcaatcaaaatcaacatatcatcacccatggtgagagaaacattgttactgaacacacaacacaacttgcttgtgtttttaccgaagaagtgtgtggagatggagattgggctcatggaagttttccgcttgaggaatacattcaggctctggatcgttccaaagatgagatgtactataatcactctcttggtatgcgctatagtaagattacagagcaaatatatgtgggatcctgtatacaaacagaagatgatgtagaaaccttgtcaaaagttgagggagttactgctgttctgaacttccaaagtggaactgaagctgaaaattggggaatcaatgcaaaatcaatc

SEQ ID NO: 18313 - DNA, 1438 bp, Glycine max
  Clone ID: PAT_MRT3847_116540C.1
gcgtggactatttctctgtaagccttgctttcaattttctccttacaaaaaaatcctttcccttctctagtccccataactagcaaaagaagccaatagaaaactgttccatatagtttcccattcaagttcgctctaagctttgctttcaatcttctccttacaaaaaaaaatcctttccctctcttgtcccaataattagcaaaagaagccaacagaaaactattccatatagttttcaattcaaacttgttttgattttcattttaactcaatggagaacagaacaagctctgtactcccacctggcttcaggtttcatcccactgatgaagaactaattgtttactatctttgcaaccaagccacatcaagaccatgccctgcatcaatcatcccagaagtggatatctataagtttgatccatgggaattacctgaaaaaacagactttggagaaaaggagtggtacttctttagtccacgagagaggaagtatccaaatggggtgaggcctaatagagcaaccgtgtctgggtattggaaggccactggcacagataaagcaatctatagtgggtctaagcatgtaggggtgaagaaggctttggttttttataagggtaagccaccaaagggtctcaagacagattggattatgcatgagtatagattaattggatcaagaagacaagccaatagacaagttggatccatgaggctagacgactgggtcttgtgtaggatctacaagaagaagaacattggaaagtcaatggaggcaaaagaggaatacccaatagcccaaatcaatcttacaccagcaaacaatgacagtgaacaagaaatggtgaaatttccaaggactagttcccttactcatcttttggaaatggattacttgggtccaatatcacatatattatctgatgccacatacaattcaacctttgattttcaaattaacactgccaatggtggaatagacccgttcgtaaaaccacagccggttgaaatcccttatgcagcagattcagggaagtaccaagtgaaacaaaatagcaccatcaaccccaccatatttgtgaaccaagtgtattatcaaagaggataatgccaaaaaaaatattaaaaaaaatgaaattggattatttggacatgacgataagcgtcaccaattaaaataatcctgaagattctttgtaaatatatatatatatatatatatatatataaatataagaattttcagtgatatccaatcagatagctcccatagaaattgtatatatatatatactctttgtaagaaataccattcattaagtaacacttttctcaacacttttttttatattatttagtaaaattgcacatgagtcccattattaagagtaatcaggttattcaataaaaaatctaattattgtgaaaaaaa

SEQ ID NO: 18314 - DNA, 382 bp, Glycine max
  unsure (1)..(382): unsure at all n locations
  Clone ID: PAT_MRT3847_116541C.1
gcggacgcgaggggacggaggggggggctttttaggaggaaaccccccggtccaccgggaagagagggnncncngagacngacgacccgaaacnnaancnncaanccaaggaagaacngaangagaancngaagaangncncaaaggagaagacccnccngaaggaaccggccaagccaccggcnaaggcacaagcggnaggaaggccaccagngaggncanacaggaagaacaaganggcagnacaaaagggnagcacngaggangnggcagagaagacaacaagcagcacngcnaaaacnggggcaaaaggcaagganaccaagganggagcaccaaacccgcgcaagggggaccncacaangnacaaaagcnacaaaga

SEQ ID NO: 18315 - DNA, 216 bp, Glycine max
  Clone ID: PAT_MRT3847_116542C.1
gcacgagttaaggttatgactggctgacttgtctcataagaccaaatttttatgtcatttggccattcagaagaatataggggaatgtttttattgagatatttcacgtattgtaatttttttatcagtttatattttgaggtagggatccttaattaggttgattttgaagtatggtcttcctattaattgtgatgtttagatggttattatatt

SEQ ID NO: 18316 - DNA, 372 bp, Glycine max
  Clone ID: PAT_MRT3847_116543C.1
gctggaattcccggtccgaccacacccttccgaaaggtagttttatataccaggggaagaaagtgggtacccttccggcaaaggaaattgggaggagaatttttttccctttcctccttaataacattaacatttaagggctttttttttttcccagcctttgcccctcaccatttgaggaggaaatgggtggccattgtttcgttttcggatttcctggaatttccggtcaagccggttcaaaaggttggcaagatttttcgaaagggcttttaccagaccaaaaatgtggaccccaaaggccaggttgttttggtcccagaaacctgttaaagcttgtgaggacctaatatttaatcatttgaaccagtt

SEQ ID NO: 18317 - DNA, 276 bp, Glycine max
  Clone ID: PAT_MRT3847_116544C.1
ttctcgatttcgcgaccgagggcttgtcaaaagggagttggggagcatgtgatacttatcacctcactcatcggatataaggaatgatcaaaatggtggccactgtggtgtttttcttaactttcaggtattgcattgtcaagtgcctcgaatagtctttcccgggggcagcgcctacactgatatcatcactatctgcccataagactgttaattattggaatcctgctcgcactatgtcgtagactttgccatttaattccaaacactaggact

SEQ ID NO: 18318 - DNA, 515 bp, Glycine max
  Clone ID: PAT_MRT3847_116545C.1
cggctcgagttgcatttgtggtcatatcaattggttataccgacacatacccggttgatattaagcagtttatctccaaaaaggttggtgttttacaaatagattaataccgatgtattccttcatgtgatgcatattccccatgttcatccgtacatggcattatatctctgcgacatgggaatctattgagtcaaagtctaacctgccaaccttgtttccatacattggatatattgatttgacatgaatccccatcccctttcatccccattcattattacattcattattagtaattattattaccgattgccccgcctcatgccttcagcatgaataagtggatgatggccgcctgtttgccttcaaccgcctagccttttaacgtatttttcctcgtaagtaacaacccatgtataactaattaccgagtggtgaattttcctacagggaaaaaattcaattctggtcaaggaactttcaccttcatcaaaataaaatttttaatttat

SEQ ID NO: 18319 - DNA, 317 bp, Glycine max
  Clone ID: PAT_MRT3847_116546C.1
tccgtgtcttgcttcttctctgcatcctttgggatctcttgcatagaccaaccccagaagaagaaggaaaaaaataaaaaaaaataaaaatcaaccctttttgtaaatccccaccttttgttctgctaaagattttatttttcatttttagtttctgcaatttatctttctggatcttaattgggtttgatctttctctttcaatttgttggtgataatgttgttgtgtttttggattgtaattctcccaagaaaattcatgaatttttatggtgattgaattttgttcagggtttggatatgggggttaggtttag

SEQ ID NO: 18320 - DNA, 1508 bp, Glycine max
  Clone ID: PAT_MRT3847_116547C.1
gcacgcgtcagtaaggtcgcgaaaagccgacaagagtttcaacacgaaaatagctagtcccaaagagctaacaagagattcaagaccggcatggctaatgaagaggaacagaaaaaccacctcttcggcatcaaagatctcggtcacaagactctccttcagagtgatgcactctatcagtatatacttgaaaccagtgtctatccaagagagcacgagtgcttgaaagagatacgcaagatgactgcaaaacacccactgaacatcatggcaacaccagcagacgaaggacaacttctgagcatgcttgttaagctcacgaattcaaagaacgccttggaaattggtgtattcactggttactctctgctctccactgccctggctcttccccctgatggaaagatcttggctttggatgtgaatcgcgaatactatgagttaggattgccaataattcaaaaagctggagtggctcacaagattgatttcagagaaggacctgctcttccgtttcttgacgagatgcttaaagatgaaaataaaaaggggtcgttggatttcgttttcgtggatgctgataaggacaattacttgaactaccacaagagggtactagagcttgtgaagattggaggactgatcggatacgataacaccctatgggctggatctgtggctgcaccacccgatgcaccattgatggattacattaagcctcttcgcggccatgtgatggagctcaacaagtatctggctcaagattcgaggatcgagatttgccagctccccgtgggtgatgggattaccctgtgccgccgcatcatctgatcattttctcttcatctagatttttcatgacagatattcctttcattaaaacaggttgcgtgaatggtggagttctcaaatgttctactgtcttttctagatctttgtgtgtttcttgtcacgctagaaatttagctgaaaggatacaaatcaacatttatcttatttatctacttgctaatcctgtattcagctttggaatagagttgcaaaaaaatgattttaataaaattaagagagaagctatgttatccatccccttttacctacttcacctcccacatatggaaaaaacacaaccttctcctattttacctaatccttaaataaacataatgtgtgtctgcttggatagttactttttttgtttttccaataaaattcaaaatgtttttttcccttaattaggcaaattggcaaaaacgttgttctcaccttctcgctaagccaatctgtcggtttagcgagcatacgctaagcgcgacactcagtggctaagcgcgaggaagaatctagaagaagatgagctgtcaggttcgctgagcgcaccgctccaggtcatcaagcgcactacttcagctcaactgctaagcgagagaagcgcgctaagccacaatccacttatgcgtgccaagcgatccagatctgtgctaagcacgcgagcatggaccaaccca

SEQ ID NO: 18321 - DNA, 772 bp, Glycine max
  Clone ID: PAT_MRT3847_116548C.1
tacggctgcgagaagacgacaaaaggggacaccacactactatgagttcaccgctactccctgttgccacctcctccgacgcccacgcgccaaacccgcgcgtgctgccactttatgacatctttagttttctcagcaccacaatcagcagcggcatcataacctacctcgcctacaccaaaaacgacaccccaatgctcctcttcgccgccttcatctacgtcgtttacttctccgtcgacttctccccaccaccacaacaacccaaggcgcgtgggctccacgccgtgaaactcgcgtcgtgggcgttgctgagttccacgatgttgggattcgcgtgttcgttctcgacctctttaacgccgccggagtcgctgtgcttcttctgggtggtgctcggtggcagcgcgttgctacacggcgcgtggatgggggacgagaactttgtttcgaagaaggaacagtacgcggacatggttcggtcgtttgctccgattatgttaatgtttttcggtctggggagacattacctctcgactcaactcatcctacatgctgccatcatgaatgcgaggaacctcgttcggccaacaacaatttgtgtaaatataaatactaaacaattaagtggttgattttcggttttcgtgttcttgagactttaatttggactcgtgtgttcagtcatttgaatgaataatatggaccttgatcatttaagggttccaacttttttgagttaaaaaacttcgagagtactttttagaaccgg

SEQ ID NO: 18322 - DNA, 774 bp, Glycine max
  unsure (1)..(774): unsure at all n locations
  Clone ID: PAT_MRT3847_116549C.1
aaatccatatttctagtcccaaagagctaacaagagattcaagaccggcatggctaatgaagaggaacagaaaaaccacctcttcggcatcaaagatctcggtcacaagactctccttcagagtgatgcactctatcagtatatacttgaaaccagtgtctatccaagagagcacgagtgcttgaaagagatacgcaagatgactgcaaaacacccactgaacatcatggcaacaccagcagacgaaggacaacttctgagcatgcttgttaagctcacgaattcaaagaacgccttggaaattggtgtattcactggttactctctgctctccactgccctggctcttccccctgatggaaaggaaaataaaaaggggtcgttggatttcgttttcgtggatgctgataaggacaattacttgaactaccacaagagggtactagagcttgtgaagattggaggactgatcggatacgataacaccctatgggctggatctgtggctgcaccacccgatgcaccattgatggattacattaagcctcttcgcggccatgtgatggagctcaacaagtatctggctcaagattcgaggatcgagatttgccagctccccgtgggtgatgggattaccctgtgccgccgcatcatctgatcattttctcttcatctagatttttcatgacagatattcctttcattanaacaggttgcgtgaatggtggagttctcaaatgttctactgtcttttctagatctttgtgtgtttct

SEQ ID NO: 18323 - DNA, 531 bp, Glycine max
  Clone ID: PAT_MRT3847_11654C.1
ttctttgggcattcggccactaaacaaaatcaagcctcaaaatacgactctcagcctcaaaaagaatgccaaacatttcttaattcttaatggaagaatccaagtggttttgataacccgaccagagttttcaaggacaaccctgcaattaaaaaagatgcatggcctgcatactgttaaaatccaaggtcaaagcttccaaatgtttcgctttcacacgagaactcctcaccaaataaagtaaggctgggttgacaatcacaatctgtctcactcgtatttgtcggggcatccttctgagagtgggactggtgagacatgttgacattctcggtgaattggaaactaccaccactacatgctccggaagacgtaatatcaagggatttcgcagtcgcagctgattccctatccccaatattttggtgagacccattgggcgatcggtctcctgttacataactctcctgaggcttcaaataggattctgtaaaatggacaatatttgattggcatcgcgtaaaggcttga

SEQ ID NO: 18324 - DNA, 2355 bp, Glycine max
  Clone ID: PAT_MRT3847_116550C.1
aagagattcaagaccggcatggctaatgaagaggaacagaaaaaccacctcttcggcatcaaagatctcggtcacaagactctccttcagagtgatgcactctatcagtatatacttgaaaccagtgtctatccaagagagcacgagtgcttgaaagagatacgcaagatgactgcaaaacacccactgtaaaatataatctatgactatttactatttagttacttttcgtcatcaacataatattgttttgtgtgtgaaaatatttttcataaataaacttgccagagtaatactgttatttgttagtttgttacttgttagtttcaattttttggaattcttgatcaatttaattatatttatatgtatattgtaaattaaacaggaacatcatggcaacaccagcagacgaaggacaacttctgagcatgcttgttaagctcacgaattcaaagaacgccttggaaattggtgtattcactggttactctctgctctccactgccctggctcttccccctgatggaaaggtccttacctagcttgattagctcataattgacttttaaatcatttactccttccctcctaactataagatgatttttaattaatttgtactccttaaaaaataacataattatttaattaatcatattaagtttatcaattttttatattatcatttaaaaattatatttttactatctctttttctatttaattatttttattaatattttaaaaaataattaagtaaaaatatgtgagaaaaaataattaatatgtctaaaaattaaaaaataatcttataaaaaacaaataaatttatgaaaaaaatttataattaagattaaaggtattacactatcatgtattaagtcatgaatttaatttaatatttatagcttatttacttgcatggtttacatattagatcttggctttggatgtgaatcgcgaatactatgagttaggattgccaataattcaaaaagctggagtggctcacaagattgatttcagagaaggacctgctcttccgtttcttgacgagatgcttaaagatgtgggtgtacagtttctcaccatctcaagttttatccatgattttttgttaacattgggaaatatttttcgatttggttgataattaatttttacggaaaaatttaaatgaccacttttaagttttaatgagatcttttttctagatttacaaactcaatttaagatgttatttaagaagattaaatcaatttcatttgaatttaaaatatgatttaaagagattaaatttaattcaatgcgaaccaacgaattgtgctgatgatttacaaataggaaaaacatattttgattatattggctttgtcaatttagactgatttttttaaatttatttgttaaaaatgtttattttaatcaaataatttttttattgttttagtgtgtttattaaaactgttttagtttttttttttaaataatttttgtttattttaagaagtaaattttatgtgtttcttgaaaaaaaaaacttatataaaagtatttattttaaaattactttaaattttaaatttaaataaactcaccctaaactatgtcaattttgcaggaaaataaaaaggggtcgttggatttcgttttcgtggatgctgataaggccaattacttgaactaccacaagagggtactagagcttgtgaagattggaggactgatcggatacgataacaccctatgggctggatctgtggctgcaccacccgatgcaccattgatggattacattaagcctcttcgcggccatgtgatggagctcaacaagtatctggctcaagattcgaggatcgagatttgccagctccccgtgggtgatgggattaccctgtgccgccgcatcatctgatcgggagcggatcatctagcccccctcatgacagatattcctttcattaaaacaggttgcgtgaatggtggagttctcaaatgttctactgtcttttctagatctttgtgtgtttcttgtcacgctagaaatttagctgaaaggatacaaatcaacatttatcttaattatccagggcggccgcagcttacgcgtgctacttgctaatcctgtattcagctttggaatatagttgcaaaaaaatgattttaataaaattaagagataagctatgttaaaaaagcatacttttcatggataaaatatggaaattaattttgaaccgtagatctaattgtccttaatataaaaaggataaatgacaccgaattgtatccgatcataacatgtacaatattgtcgtggttggagttgctctgggtctattgaaaaattaa

SEQ ID NO: 18325 - DNA, 379 bp, Glycine max
  Clone ID: PAT_MRT3847_116551C.1
ggctcgagcgccaactttctactccattcactcatgctcgaccatcctgacacggcaaccagcggagacggggacattttgcaactaaccgtaaatccatgtcccactggggctggtaggagacggttcttaaacccaaaacatgcctcctcctataggcctgctagtggcctacttcatggtgaccgttgaccagcctgtgtatatcgtatctatacacaaagaggacctacatgcccagtttgcatattccgcgatttctatggccccacattcttagaggggtcacgcagactgaggccctgaaacgggtgagatgcagactgcgcaaacatatactataatatagccccaagtacgctgtgacaaccaccctatt

SEQ ID NO: 18326 - DNA, 732 bp, Glycine max
  Clone ID: PAT_MRT3847_116552C.1
acataatccaactctgaaacggtgaacaaatccaccgtgccgtcacacactacttgttcgccgcgaaaagcaaaacgctaattaactcaaaagaaaaaaaagggaagaagcctttttatcggactttgtctcttttccctcaaacactccccatttcctccatttttcatcatcaaaacgcattttgtgtctcctgacgaagttcttgttatatcgtctcaccatggaagaacggtggagattcatcacttggttgaagctcttccgcgtgtttgtggctgttgtgtctctattcctgttcatcttggaacctatttggtgttcgactctcaacaacgaagggttggccctacaaaagatgagggagagggtggtgagagatccattgggtgctttatcaagttggaatagcaaaggagagattgatccctgttcctggtttggagtagagtgctcccacggcaatgttgtatccttgaacttgaaagatctatgtcttcacggaacactagcacttgaaattgggaagctggttcacattaaatcaatcattttgcgcaacaattatttctacggagacatccctaaggaaatactacaattagagaacctgggaagttcttgacttaaggatataacaactttagtggacaattttcatttcatgacctttgcacctatccatccctgactacccttttattggacaaacatgaccatctgccagcttac

SEQ ID NO: 18327 - DNA, 287 bp, Glycine max
  Clone ID: PAT_MRT3847_116553C.1
ccacgcgtccgaattcctcttattcaacagaatgtagagtatacagatatcaaggcaggatacaccagtggccatgaagatatagctttttctatgattttaatctgttagcaacaccatgctgcttattcagttcagcactttgccaaacactgctagcacctgccctctgctgagacccatactccaacagccagctcgccgacacacaagacattcgaggaacgctcacgtgaccatactacacggcatgctagcagcacggaacagcaccttgccttatgata

SEQ ID NO: 18328 - DNA, 998 bp, Glycine max
  Clone ID: PAT_MRT3847_116554C.1
ctctctctcatcctttttccctttttcctctctcacccactccctcactccaccgttttccctactactcctttcaacgtcaatgctacccccaataatctaacaacatgactgcgccaccatccaagtacactcaccactccaaactactcattccctccgaagaagaccctcccaaacacccctatcccagactcgtcagaataaccgtcacagacaccgaggccacagactcctccagcgacgaagaacagcatacttccacgcgccaccgacacagaaagttcgtcaacgagatttctagatagtcgtcgtgcgccagcgagacccacggcgccgcttgaaattcgaggattcgaggcagaggcaccctgacgcccaggtccggggagataggcactccgtcgctacgcggcgttcggaaatggttcggagtgagcaacactgcagaggaagctgctttggtctacgacaacgcccccactcggcgccgtcggccccgcgcgcgcacctacgtcaccgcgccgctggcggccgtggtgtcccacaacgcagccctcttgccgcccgctcccctcgcgctcacctcggtcattacgccccctgcccgggaggaaactcattgcaatagcaagaatatcttttctcccacttccgtgcttcactgttgctccttgtccgaggaagctgagtccgttacggccaaagacgatgactactcctcggtgtcggagaataaggtcaaagctgagtcagcgtttccgcccgaaatagattttgagtttcgagcttgttcgactgtgccggagagtctgttgttctgcgatgatgattggtctagtgagtttctcaattcttatgaagatttcggtttcaaaagttggcatacggacagaaatcgtgactttttccaagatatcgacgatttgtttgtctcggatcccctccttgctctctgagttcttcacttcttttctataacagactattctcgtcgt

SEQ ID NO: 18329 - DNA, 274 bp, Glycine max
  unsure (1)..(274): unsure at all n locations
  Clone ID: PAT_MRT3847_116555C.1
tgaagtgttcggnttgcngcgacgtgagcngttcgctgcccncnacgtngtgagangtccactgaaccttatcatttagaggaaagagatgtcgttggtttcaagcatgttcgggtgtggagtggtgatggcggcgtcncaagcnatgggcattggaaggngaancgatggtggnttgacgatngtgtgttcgtctaggccncagaagaaancgacggcgcatcacatgaagatcgncctcgaaagacgcagcatgggatagaaacgcaanccc

SEQ ID NO: 18330 - DNA, 1093 bp, Glycine max
  unsure (1)..(1093): unsure at all n locations
  Clone ID: PAT_MRT3847_116556C.1
tggagatgtacctcaggctcatcgtgctgcatgcctgttgaggaaaattctgcaagtaattcagttgcgcttttcaaatcaagcagaaagcatgaaaaatcaaaaccatcttttcaaggctcgtgagggaaagtatcaaacaagaataaatgcacttgaaaccttggcggtagggacaacggaagagaatgaggttgttacaagttgggttcagcagttgaagtatgctttgcaggttgaacaaactaagtttgaggagaagaagaaacttgaagagcaggatttttctcgtttaaagaaagaaaaagttcatagtgaaatcaaaatttctgaattgaagcaagatttggaaatagccaaaagaacatatgaagaacatgtttcagagttagaattgcaagctactgaatctaaagctgaatatgaaaaaagaatagagggacttaagcttcatcttgcagatgcaagaatgcaagtgaaggaactagaggcattttccgaatccagatttttgaaatggaagaataaagaggatacctatcaaactatcgtaaatttccaagttggagctttccaggaactgagagctgccatgaagtctgtcaaagatgatgtgataaaaacaaaaagaaactacttagaggaattcaagtactttggaatcaagttgaaaggtctagctgaggctgctgaaaattatcatgtagttatagctgaaaataggaaattgtataatgaagttcaagatttgaaaggtaatataagggtatattgtcgaattagaccatttcttccggggcaaagtcaaagtcatacaacaattgagtttgttggtgatgatggagaactaattgttggcaatcctcttaaacaaggaaaagaaaaccgcaagctttttaaatttaataagggttttggtcaagcaacaagtcaaggggaaatatttcaggacactcaaccattgattcgatctgttcttgatggggtccattgttgtatatgtggttatggtcanacccgctgcgggaagaaatatacgaagaatgggactggcctatcattataatcagaatggggagtgcactattgggca

SEQ ID NO: 18331 - DNA, 305 bp, Glycine max
  Clone ID: PAT_MRT3847_116557C.1
ggctcgaggaccttctctgtgctgattggaaaccgtgagtggctgaggcgcaacggtttaaccatttctagcgatgtcagtgactctatgacggaccacgagatgaaaggacagacatccatcctggtaactatagactgagtgctctgtgtgatgatcgcaatctcagacgctgtcaagcaggatgctgccctgtctgtgcacacgctgcatagcatgggtgtggacgtggttctgatcacggtggacaaccggaagacagccatagctattgccacccaggtggcatcaacaaaatctttgca

SEQ ID NO: 18332 - DNA, 500 bp, Glycine max
  Clone ID: PAT_MRT3847_116558C.1
gcgacttaaatagataattaacttgatttattaaaatatactttttaactaaatgtaattttaagatcattattctaaatttaaaatgttatattttccaacaattatctctgttcttgaagtattggctgttactgtacctgttttattaacagtagcttttgtaactatagctgagagaaaaacaatggctagcatgcaaagaagactgggacctaatgcagtgggttgatatggtctacttcaagcatttgctgatgctcttaaacttttattaaaagagtatgtttctcctacacaagccaatatagtattatttttcctgggtccgattataactttaatcttttcattattaggatatgctgtaataccttatggtcctggtttagtgctactagactataatctgggtatattatatatgttagctatgtcttcattagctacatatggaattctgctggctggatggtcagctaattctaaatatgcttttt

SEQ ID NO: 18333 - DNA, 285 bp, Glycine max
  Clone ID: PAT_MRT3847_116559C.1
aaaaacttgcagcacacatgtttttttatgataccaagggtaaacaagggggagtaaaaccacaaaaacatttaaatgttcaaaagccaccggaagagggttaccccaatttagtttccccaaaattaaaattgaaaaaacaaatggcctgcttgtcccccttaaaaaaaaaacagcccccagggaggggacatcggggtaaaaaaaccagagaggtcatgccctttttttgggggacctaacggaaagactgggcccgacttttccaacattggaaagggggtt

SEQ ID NO: 18334 - DNA, 1203 bp, Glycine max
  unsure (1)..(1203): unsure at all n locations
  Clone ID: PAT_MRT3847_11655C.1
nacgctcaaattgaattcctagctagtacttaacataatgcagtgagattcacactcccaacgcttcctctttctcccttaaatatcttcattcatctcaacaccaccaccacttccccacttttgttactcagtatgcttggagcccttctcctcaacgccaacttcaagattcatttctcactcatatcatgccaagcccgtgtccccttacccgtcaagcccgcaccgctcagaatgccctctccccactacccccactgggcctccttgcaggccgacattgaagcccacctcaaacaaaccattcccctcaaagaacccctcgaggtcttcgagcccatgctccacctcgccttctccgccccccggaccaccgtcccggccctatgcctcgccgcctgcgagcttgtcggcggtcaccgccaacaagccatggccgcggcatcggccttgttactcaacctcgccaatgcacacgcccatgaacacctaaccgacgggcccatgtacggccccaacatagaactcctcaccggggacgggattgttccgttcgggtttgagttgctggcgaggcccgacgggccagcaagtgcgagcccggagcgagtcctacgtgtgatgattgagatatcacgtgcggtgggttcggtggggttgcaagacgcgcagtacgtgaagaaaacgttgtgggacggtggtgaggaggtgcaaaacgtggaaagcatgcagcgctttgtattggagaaaagggacggtgggttgcatgcatgtggggctgcgtctggtgccatcttgggaggtgggagtgaggaccaaattgaaaggttgagaaattttggatttcatgtggggatgatgaggggaatgctacaaatggggttcatggaaaaacatgtgcaagaggagagacatcttgcactcaaggaactgcaatttttcatggacagagatgttcatgttatttctagttttatttattaatttctagccacttttaagttttctatatatctggaatctcaagtgggttgttgtccatcttcatatgtacggaacatgatcaactgtgcggttcatagacaataattgcacgatcatgtgtttcaaattaaatctgatggtatatatagcagaagtttttaacttatattttacttcataatttaatgtgtaaaatttattttcaaggataaaaaa

SEQ ID NO: 18335 - DNA, 567 bp, Glycine max
  Clone ID: PAT_MRT3847_116560C.1
ctttatttttactaatgttgctactggctatcgctttaaaggaattactggaaacaaaagccccagtgggggtggggtgtgcaaagtctgatccacgcctttttttacgaaagaatgatccggccagaaaatatctctcttacttacaaaaatgatgcaatactacctaatatacatggctcaacttacacatagaattggctctgacttggacccatccaccagtcaagctctttgcgggccattataacacacataagtgttgccttgggtgggattagatttaccaacctgcaggggggatccttagcattaaaaatcatctcttaggggacaacacactgtccattgcccaaaataagggcctgaactaatgctataaggaatgagtttcccccttctatggtttggccactcatgaaaaagtacccagccctggaaggtgatttgattttattgatcgataaatgcacctgctcaccaataaggtcctcaccacccgacatgaatgatcttccctggcatgaccaacagtaggacctgtatccctatgacagacataacact

SEQ ID NO: 18336 - DNA, 339 bp, Glycine max
  Clone ID: PAT_MRT3847_116561C.1
gattatgatcgcgatttgtcgccctttttttttgggtttggtttgaaaaagcgtacgcgtgggcaccgagcacccacacctcccgtagaatacatggttcttaaaactgaactatgccgactcagaggtgccaagatctacccagtaaagggcgataaattagctcgtggcgattcctaggttttcctgtccgtaaactcaaaatggaagaggtattcccacaatctcctgaagccttcaaagctaacctggactgtaatgcacagaaagaaacacaaaatggacattgcttaagaagctgtgaggaagaggagacgtgctgccaaaaagccctactct

SEQ ID NO: 18337 - DNA, 331 bp, Glycine max
  Clone ID: PAT_MRT3847_116562C.1
gctatgtttttttttacgcattctccgacaagtaaaacgggggttgattttgcattatctttattaagcacttcggggaacgatcttaccaagctcaatacttctaattgcagcacccctggtacaatatagtgcttcttcgttgaaagagacccacagattccgcacgaaataaggtggatggatatgaacaaggagatcgtcgaggcatctacagcacccccatagtcattcgaaatgccctagtagatctatgtgtgtgtatgaactcacatacgtgcgaacaccttctgcgttaagagcacctcctatgattttttaaaccccttcc

SEQ ID NO: 18338 - DNA, 492 bp, Glycine max
  Clone ID: PAT_MRT3847_116563C.1
caaatattgcagtgcggtctccttctactattacaggcaacgttgttcaagaccaagaccatggtcatggccaccaacctgatactgctcacggacttcgtggtttcatcgaacctagacatgtcgatgatcttgaacgacaacgtccaaaccatcgcgtctcacagggacgaggagctgatgtacatgaccgagcaatggctggttaagaactggatggtatacaacgcgcactgagagaaggtgaataggttccagatcttcaaggacaacctgatattcatagaccaccacaactcccaagacgaccgaacctacaagctggtactgaaccggtacgtggatctaaccaacgaggagtacagggccaagttcttgggaaccaagatcgatctcaaccggaggctcctcaagacccctggcaaccgatactcgccacgtgtcggcgacaaactacctggactgcatgattggaggaagtgaggtgctcat

SEQ ID NO: 18339 - DNA, 500 bp, Glycine max
  Clone ID: PAT_MRT3847_116564C.1
gttcttaacagcggactcctcatccttcacaacacaacagagtgccagtccagtcaatcaaacctgctttaacccgcttcccaacagacaagcgaggccttgtttgacgtggtcttcacattggcagcttgactcattaacaaccggcttcttcaattgctcaacaccactcggctcactagcgagcccgtgattactatagtcacggaccatctcatatccacgtatcatcaaaagtgagtccccaatccattttcgatccgagcctcctaaacaatctgaaccatatacttacccttacgaatgctccactagttcttgtgcttgtaatgcgtccgggcctgaagcgcagcacctaacctcaccatccctctccttcccatgtctgatgaatactcagccttaaatggctcaatctgaacctaaacagaaggaaccgccaggacagaccggctgagcacctcgggctagcattgtacacatgcagacaccggacattg

SEQ ID NO: 18340 - DNA, 2055 bp, Glycine max
  Clone ID: PAT_MRT3847_116565C.1
ctttcgcgtccgaattcaagcaaccccattggagatcaaactacattttgcgccatttccaagagactattgggggaaggggaaattttctccattgtctgaaggtctgttggagattgtatccaattgaaaacttgattgtggctgtccttatcaatttgcctcaagaattgcgaatgatcttctgccacacttcatctttaatatcaaatataggaaaagatgaaggagtatatggttgtcgcttcggcgtcgtcactagcatttctaatttcataataaacggtggttggagtttgtttaattgtttatccctctttctttctcttttgacggctcctactaatcccacttctccatcgccgcctcagagtctttcgtcgaatacgatgctgttttctcggatatcgagaaacctcagaggcagcttcaactcatgtcggtggtttcggtccatcggagaccacaaccactgctttctttccctgcacaattttcattcacgtggtggagactctactcaacaggttatgagaagtttaattttttcaaagggcctgccagcactgcatagtagtagatatctgatccatcatcaaagcagctccatagttgaggatgaacatgatccattttcactggttgcagatgaactgtcacttcttggtaacaagttgcgagcaatggtagttgctgaggttccaaagcttgcctcagctgccgaatacttcttcaaaatgggagtggaaggaaaaagatttcgccctacagttttattgttaatgtcaactgcactaaatctaccaatacatgaagcacctcctcctatcgagataggaggtactttgacaactgatgtacgttcaagacaacaacgcatagctgaaataacagagatgattcatgtggcaagccttcttcacgatgacgtactggatgatgcggattctagacgtggtattggttcattgaattttgtaatgggcaataagttggcagtgttggctggagattttttgctttctcgggcttgtgttgctcttgcctctttgaaaaacacagaggttgtatctttattggcaaaagttgtagagcatcttgtaactggggagaccatgcaaatgactacaacatctgatcaacggtgtagcatggaatattatatgcaaaagacctactacaagactgcatctttaatatcaaatagttgcaaggcaatagccatccttgcagggcaaacagcagaagttgcaatgcttgcttttgagtatggaaaaaatctgggtttggcatttcaattgatagatgatgtgcttgatttcacaggcacatcagcttcccttggaaagggttctttatcagacattcgtcatggaattgttacagctccaatattgtttgccatggaggagttccctcagttgcgtacaattgttgatgagggcttcgaaaaccctgcaaatgttgatcttgctctggagtatctaggaaaaagccgaggtatacagaggacacgggagctagccgtggagcatgctaaccttgcagcagcagcaattgattccttaccggagagtgacgacgaggatgtaagaaaatcaaggaaagccctgatagatctaactcacagagtcattacacgaacaaagtgaaaggaagactctcccctccctttttttgtttttgtgggtagctaaaggataaaagatcttagtaaaatcaagactaaaaattgttttgttaccatcaatttttctataatggtccccccaagcccgaatgtgtgggggaaaataagctgtttctaggattaatgtcgtcattcgcttttcttatttatttagattaaatctccttccctctgtttgttctccattgttgtaataatgactttgggctagttttgcctcccttgattttcttactagtttatcttgctgctgcttgtatttggatttttggagcattgaacaactgtggagtttttattcataaatttatcttgtaaaacgtatggttataatcaattaatccgtgaaactaaaaggatttctc

SEQ ID NO: 18341 - DNA, 428 bp, Glycine max
  Clone ID: PAT_MRT3847_116566C.1
aaaaaggggggcgggttcaaaaactaaaaaaaaccaaaaaattgttgtccccccacatttgggggccccaaaaaaaaaagaaaaaaaccttttaaattgggggggtcaaaaattcaaaaggggggattggaccggaaacaaaacatccaacggtggggaaaaaaaaaaaaccacagaaccccccatggccccccttggggccacccttttaaaaaaaaccggggtggttcctttccccccgggggggtcctaaacccaaaaaaaagggccaccccccccccggctttaaggggggtaattggacccaaaggggaaaaaggagggccccttttttttccaccccttaaagggaagattccccaccttcccgtggcttattacaaggggggacagggacccggcttggggcccctcaaaaggggcccccc

SEQ ID NO: 18342 - DNA, 247 bp, Glycine max
  Clone ID: PAT_MRT3847_116567C.1
cgctaatcctcctactattttaattttcttctacctcctaaaatacccctttaagagaaccctttacaacaagagaaacaaccaccaaccctttcttttctacttatctcaacataactccatctatttccatctttaactcacaatccattatttccctattacatcatttataacttatactattcctacttacttaactaacttaattaaaaccctcttacctatttttaaactcaccttcatt

SEQ ID NO: 18343 - DNA, 627 bp, Glycine max
  unsure (1)..(627): unsure at all n locations
  Clone ID: PAT_MRT3847_116568C.1
gacaaggtgaggccagacttggaggaacttaataagatcagaagggctcaaatattcacctatgaggagcttgaaactgcaaccggtggattcaaggaagagtccatagtagggaagggaagtttttcttgtgtgttcaagggagttttcaaagatgggacagttgttgctgtcaaaagggctatagtgtctcccaacatgcagaagaactccaaggagtttaacactgaacttgacttgctctcaaggttgaaccatgctcatttgctcaaccttctagggtattgcgaagaaggtgaagagaggcttcttgtgtatgagttcatggctcacggatctttgcaccaacacttgcatggaacaaaccaagtgttgagagagcaactagattggataagaagggtcacaattgcagttcaagcggcacgtggaatcgaatacttgcatggatatgcttgccctccagtgattcatagagacatcaagtcctcaaacattctcattgatgaaaaacacaatgcaagagtggctgattntggtttatcattgntaggtcctgcagacagtggttcccctttggctgaactcccagcttggactcttggctatcttgatcctgagtactat

SEQ ID NO: 18344 - DNA, 416 bp, Glycine max
  Clone ID: PAT_MRT3847_116569C.1
ttctctgcttaaggtctgatttgaaatcacttgcctttgcatcaatgacttgcaagcattggagagctactgtaaggttcatacaaaaaggcctcaaggcacgttaatttgtcatccttgggtcattcttgcactgattccataatgtggaacattttgaatgcctatgaaaaagacaagatagaatctattgttctaattggttgcaccaatattactgctggcatgctcgagaaaattgttcttttgtttcctggcttatctacagtagacattagagggcgcacccagtttggagagctgactctgaaatttaccaatgtgaaatggatcaagagccatagttcacatataaccaatattgcatcagagtcacataaaatgagaagtgttcaacaatttgctgtgcaaactca

SEQ ID NO: 18345 - DNA, 132 bp, Glycine max
  Clone ID: PAT_MRT3847_11656C.1
acatattgaaagaccctgcccgcccattggaatgcgctgatttcaggtgaataaggtcttacatccttgtgcgcgaaagggaagaagccccctatcaaccactttcttgagacttttacagggctcaggaaa

SEQ ID NO: 18346 - DNA, 368 bp, Glycine max
  Clone ID: PAT_MRT3847_116570C.1
agggtggtattatatgacagtgttttggagacttggtaggaggttattactggctaataacctttatgatacttttttgggtgaacccagggtatccccagctgagaatcacatactaatttcttgaaatacggagatccatttaaggggttgacttctcccaacaaatgtttttccatatacacagacctggagattggaccgtgccatatgcttaaagagcatggttatctgtgaaccatgtcacaccatgctgtcaagtggtacgatactagtgttttggagaccattttattggttgagtggaccactgaggagaaaggttgaggactccagaaacaatctcatatgcttgggacttatgctga

SEQ ID NO: 18347 - DNA, 201 bp, Glycine max
  Clone ID: PAT_MRT3847_116571C.1
cccacgcatccgcttattataccctatcactcacttcacctatcttcagtcacctttattgaaagaatgatccacctcaacatccctcttacattgactcgaattacccactccccacatcttacacattaacgttccacgattcagcactgaagacataaatctgcacattgagcatgataatattcttcacatcaaact

SEQ ID NO: 18348 - DNA, 119 bp, Glycine max
  Clone ID: PAT_MRT3847_116572C.1
ccacgcgtccgattgaatcttgtcttctctatcacccgcagtggagactcctttatccacatcaagagaaatgacacttatcccaaaccggctccagcaacatgcaacgagctaactta

SEQ ID NO: 18349 - DNA, 250 bp, Glycine max
  Clone ID: PAT_MRT3847_116573C.1
accactcgtacgtaccgacggaagaagacgactgaaggggaatccttaaaatcagcttcagccattctatctaactgcctcactcacactaacaaataagcaactgcggtgtaaggaggtaaggagctaactgcatcgtaaaccaccgctgataacaaggacaaagacaaggacaagaaaagtcctatttgtcgttcatctcgggacggaatccattttcctgcgtgacgaatccctacgcagctgaaac

SEQ ID NO: 18350 - DNA, 526 bp, Glycine max
  Clone ID: PAT_MRT3847_116574C.1
ttgttgtttttttgtattttatttttttcttttttttttttttctttttttattgggcccattttattttttaatttagagttttatatgaaatgcttagtatataatatttaggactatactaaggatgccccaaaaagcaaaaaaaacggcatacttaatgctgcaagcttttgattacaacactcaaacctaccccatagaagcgacatacagcaagagtgcctaaaagggggtaaataatgagcaaactcaagaggagcaaaacttgcaaagccaacctaatgagccttacaaagcaaactcgtcttgaaaacatgcataaccgacccaaagtctgccttcacttgcatgggcagcttagcatagcggcaagccaagaccttgatggccttaaaaaggctatcaaacttggactgagtgaacttcaagccaagaacagtgctaaacaccacagtcctaggcagggccttaataaccccggagaaactgccttaaacaatgcacccaaagcaaccgcgggggg

SEQ ID NO: 18351 - DNA, 531 bp, Glycine max
  Clone ID: PAT_MRT3847_116575C.1
tttgtatcgattgaattcaataccccttcaatgggggtatcatgcaaatcttcgggagggctctcaccgggaagaccatcactcttgaagtcgaggcgagtgacaccatcgagaacgtgaaagcgaagatccaggacaaggagggcatcccgccggaccagcagcgcctcatcttcgctgggaaacaactcgaggacggacgcaccttggccgactacaacatccagaaggagtccactcttcacctcgtcctgcgccttcgtggagggatgcagatcttcgtcaagacgctcaccgggaagaccatcactcttgaagtcgaggccgagtgacaccatcgagaacgtgaaagcgaagatccaggacaaggagggcatcccgccggaccagcagcgcctcatcttcgctgggaaacaactcgaggaccgacgcaccttggccgactacaacatccagaaggagtgcactcttcacctcgtcctgcgccttcgtggagggatgcagatcttcgtcaagacgctcaccgggaag

SEQ ID NO: 18352 - DNA, 2589 bp, Glycine max
  unsure (1)..(2589): unsure at all n locations
  Clone ID: PAT_MRT3847_116576C.1
caaaccccaagggcagaggaaacaagaacaaaagaggggcggccaccaacnccaagcgaacaccacggccagaaagcggcgcgacgaccangcaaagaaagcccgcacacaaaacgaccggncaaaacccccagaaacaggttattaataacctagtccttgaggagctgcgaaaaccaggttctggtacctttcggactaagtttcatgggatatttggatgaagttatgttacttttagaaccctctatcatggctgatgccgaggacacatcgatgccattcagagtctcaagctcgagaactatgcaattacagaatctaatcaaaagcttcagaatgggaatttctctcctttgtacataatgttatgctccgttcatcatccaaaagtggaagcagatgccgatacaatggatgatgggccacaaacatacatacaaatgcttgatacaacaattatggttagttatcacagccttgtatatgtgaattctgagtcgaagcaagtgcattgctagaagataataatttctaaggatcaggttcttagatctgaaaacgaaaactcaaaaggcaccgaacatcttgcatttcatcgggttccttctgtggtgaacttgaaaaatctaacatctaaactttcagacctcaatttgtctgaggtttctaccagggagtctgataatgatactaaggtccaatcccagacttttcctttaactggaaacacaggccaagatgtttctcaagaatttcccccagaagctaaatctagacctacacagggtgacattctgattgataatcgaggacaggtttccccgcgatttcctttatgacatgttctccaaagcaataatttctgaagattcctcaagcattggtccattaccaacagatagagcaggtttgagcttaaatatgggcaatcatgagcctaaacgttggtcatattttcagaacttggctatagaggggtttgataatgtatctctaattgatcaggataatcttggtttttcgtctgctgtgagaaaagtacaagagggggatagtaaatctcagccatctgctcctctaccagctggtggtgttttggcaggacgcacagattcccacctaaatattggtgaagaaaatcagaaaaatgtacctgtagcaactaaaacagaagcaagtatctttcaccaaaaatatgagcattcccaactaaagggcaatgaaaataagaacatggatgccataatggaaaacatacgaccacaggagtctgaataccaggatgacaagaatgaaccgaggaatgtggttgtagcaggggaatttgacaccagtactgtgcagttcataaagaatgaagatcttgaagagttgcgagagctgggttctggtacatttgggactgtgtaccatggaaaatggagaggatcagatgttgcaattaaaagaataaagaaaagctgcttcgctggtcgatcttcagaacaagaaagactgaccatagagttctggcgggaagctgacatactttccaagcttcaccatccaaatgtggtggcattttatggtgtagttcaggatggaccaggagcaacactagcgactgttgccgagtacatggtggatggttctcttaggaatgttttgcttcgtaaggataggtatcttgatcgccgcaagagactgataattgccatggatgctgcttttggaatggaatatttacactcgaaaaatattgtgcattttgactatcaatgattcagcgaaatcgcttggtgtctggtggtgttcgtggaactctaccttggatggcaccagagctgctaaatggtagtagcaataaggtctcagaaaaggttgatgtgttctcttttggcattgtcttatgggagattcttactggtgatgagccatatgctaatatgcactatggcgcaatcataggaggcattgtgaataacacattaagacctacaatccctagttattgtgatcttgagtggaaaacactaatggagcagtgttgggcacctaaattagcagtaacgatccccagttattgaattgttgactgcttgcgtgtatggtctactgttgggcgcccaatccagcagtcaggccatccttcaccgaaattgctcgccgcttgcgtgtgatgtctccagccgctagtcagatcaaaggacagggccacaaggcatctaaatgaaaatcaacagatttgatctgattgccacacacggttcattcaattatgctccaaaaagatatatattattgttatacaagggccaacaataattgtttgtattgtagttttctggtccctgctctttttgtatttgattgtgaatatgtatgtgtgcatgtgaaaaaccacatatatagactgtgcaaattaacatttgacttaatgctatttccacagtgaattttggactgccaaaaaaaaaaaaaaaccgagattagataaaaaactcaatctatcttttcacgctgtggattattcattctattacaatgtcttcattgagataaagctaagaaacctgttttcaccagggtggagaatttggccatcaa

SEQ ID NO: 18353 - DNA, 1138 bp, Glycine max
  Clone ID: PAT_MRT3847_116577C.1
gctcgagccgctaaatcacattcggaattaacgagaaagtatttcggactacaggctgtatttatgcgcatagcaacagcaagctgggaataaaatccttctctaaatcaacttcggaaccaatggctgccaccgaacacagactaagcttggaacctgagaaaaagaaccttctcagacaccacaccgagaagcacttcacagccggcgaaatcgtccgcgacatcatcatcggcgtttccgacggcctcaccgtccccttcgccctcgctgccggactctccggtgccaatgccacctcctccattgttctcaccgccggcatagccgaagttgccgccggcgccatctccatgggtctcggcggttatttggcagcaaaaagtgaaactgatcactacgccagagagttgaaaagagagcaagaagaaatcatcgccgtgccagatactgaagcggcagaggtagcagaaacactggctcagtacggaatagaggcacatgaatatgcacctgtggtgaatgctctcagaaaaaaccctcaagcatggcttgattttatgatgaaatttgagctgggactagagaagccagatccaaggagagcattgcatagtgcaatgacgattgccattgcttacatattaggtggggttgttcctctcgttccttacatgttcattcaaaaggcagcagaggcagttgtgttttcagttgtggttaccttggttgcattgctgatttttggctatgcaaaggggcacttcacgggcaataaaccattcaggagtgctttggaaacagctctaattggtgccatcgcctctgcagctgcttttggtttggcaaaggctttcaatccatagattctcgatactttgtacttggtggcaactaatctaataacttttgcattcttcccaaaaaaaaaagaagtttcttttcaacttctttgttgttagttgttacttgttacatattttcatttttttgtaccatacagttacctgcaagtacaaccgtttttattaaactttggtgtgaaatattacccttacattagaattgtctcttttgttgtataattgtatatttgagaaaattttgaattcaaaaaccgtgttttcacttttcagtc

SEQ ID NO: 18354 - DNA, 890 bp, Glycine max
  Clone ID: PAT_MRT3847_116578C.1
agcgaactagagagcagaggctgtatttatgcgcatagcatagcaacagccaacaaacataacaatggctgccaccttggaacctgagaaaaaaagccttctcagacaccactccgagaagcacttcaccgccggcgaaatcgtccgcgacatcatcatcggcgtttccgatggccttaccgtccccttcgccctcgctgccggactctccggagccaatgccacctcctccattgttctcaccgccggcatagccgaagtcgccgccggcgccatctccatgggtctcggcggttatttggcagcaaaaagtgaatctgatcactacgctagagaattgaaaagagagcaagaggaaatcatcgccgtgccagatactggtttccactttccactactctttttatcatgttgagtgtctttatttcattctcggattaaaaactcgttaacgggaatctgaacttgaaaaatgtaatattccgatttttgtttcccgagaaggaagtaataatacttgaaacaaatgccctttgttaacaattttctgcgcgcgctaacgaatatgttatttgtgggaaaaaaaaacagaagcggcagaggtagcagaaataatggctcagtatggaatagaggcacatgaatatgcacccgtggtgagtgctctcagaaaaaaccctcaagcatggcttgatttcatgatgaaatttgagctgggactagagaagccagatccaaggagagcattgcatagtgcaatgacgattgccattgcttacatattgggtggggttgttcctctccttccttacatgttcattccagaggcagcagaggcagttgtgttttcagttcttgttactttgggtgcactgctgaattttggctat

SEQ ID NO: 18355 - DNA, 314 bp, Glycine max
  Clone ID: PAT_MRT3847_116579C.1
aaatcgctagaatgaactatagaatatagcaacattactacctcgaacctttataggaataagatgataaaatcatttacaactcctgtttcaaagacctaacatcagaatgctgtgtgccttcacaatactgtttttgaaaatgaagccaaaatatgatgactgcgaaagtaacggaaacctgggcaagacaggccgaaagactctcttccaggctgccctgcgcgatgaacagcctttactgaataaaggcgctgtgccagaccaacccttgcagctcttgccgcaatatgcatgcccctcatgaatctgtg

SEQ ID NO: 18356 - DNA, 350 bp, Glycine max
  Clone ID: PAT_MRT3847_11657C.1
tcgcggacgcgtgggtgccggcatgcgaaatggacgctctttgcagatgggcgctggtttggcctgacgatctggggtctgaccgcaggtatgcaagcttttagagctgatgcgttgcaactttggaccaacgacgctaccgtactggcttcgcatggaggccccgtttgcggggatatgtgaaaagctgcaggtcggatgccgtacgctgcgctgcgccgctactgggctgtgtggggtgcaggctgggcgctcatgtgatgtggggctgctttgcatgccaagaaagtgctgtgtaacaggccaatgctggcaatgaaaaatgaattggtaaatgacttaaaattgtg

SEQ ID NO: 18357 - DNA, 275 bp, Glycine max
  unsure (1)..(275): unsure at all n locations
  Clone ID: PAT_MRT3847_116580C.1
gatttctaacaacgtgagatcagggagaagggctttcactaggggaatacaaganagcagtgtcatggtcaaagtatttggtctcttctggggcggccataaagggagaaggagaagaagaatggagtgctgatctgtctcagttgttcatagggtcaaaattncgcctctggcagggcatagcaggatctacagaggcatctacaagcacatgggatgttgcattaagctggtgagtcaacctgaggaggatgaggacttggctgttttgcttg

SEQ ID NO: 18358 - DNA, 1135 bp, Glycine max
  unsure (1)..(1135): unsure at all n locations
  Clone ID: PAT_MRT3847_116581C.1
gaccaaaactaataacaaaaactacttgtaaatttttgtgatacgtctaccgttgttgttctcagtctaagatcaccgaggctttccttgttcaatcaaaacacaaaaatggaggggactgttttcactcctgcacttgaaggaattaacttgtaaaatcagagcaaggagaaattttgacccagcctttcttggatgcttgcaagcatatactgcctgttatagacaagtttggagctgctatggcccttgttaaatctgacatcggtggtaacatatcgagattggaatctaagtattcctccaatccaaccaaattcaactacctgtacagtttggtacaagtagaggttgaaactaaaacggctaagtcatcatccagttgtaccaatggacttctttggcttacaaggtaaagaacaccaagcaactaccatttaacatgtaattcatactgttatggcattccaaaatttgttattttagagaactatttccttaatttgtaatgttccaagcccagagtctgttgtccatgagtaaacaaacaacttatctttctaaaggtgtagcatgataattgataatgataggtacgggaaacttaagaaagaagcacnaaggtcttgctcctgatagctttatgtttcgccttgtgatataatgcactggcaccatcaatgccattatcacgaaattttgtccaaccttttctccttgccttcaagagattcacaagtttctggctcgatttcgcttagatgatatgaaggcatcatgaatcacagattcagaagttcctgccgagtagctcttgcatgctcactctcatttcatatcaactttattagcatgataaataagcattggctttcatgttgtgccgttaagtactctattaacatcatgtagtgtttctatgtcaatttgttactatcagttggttgtttattatgaaggttaaggctaatggagtttagtaacttgttttctgcaataccgtatagagtatcttggtgattatagagtactaattgactagaatcaaactcatcaaactttggctcaacatatggatggctgcttggtcatataaatcttattcctttataaaacttactactgtttatgaaaa

SEQ ID NO: 18359 - DNA, 1265 bp, Glycine max
  Clone ID: PAT_MRT3847_116582C.1
caattttgtttgatttctcagtctctcaactcgatcttgaacctctctcagaatggaggtagtatctgatgaagaagccttcttgtttggcatggaactagcgggtgcctctgctgtctctatggttctcaagtcagctttggagcttggcatcttagaaactatagccaaggctggtcctggagcttacctttccccttctcacatagctacaacatacttacatactccctccatcaactgcctcatggtaaggctgaaaggcactatggtcttcacccaaaagccaaataccttgtcaacaatgaaggtggtgtctctgtggctgcttactttctcatggaacatgacaaagtccttaaagacatgtggttccacttgacagattcagttaaggagggtgggcatccattcagcaatgcttatggaatgactgcctttgaattccatgacacaaatcctagattcaacaagcttttcaataagggattgtctgatatctctagcatcacaatgaagaaaattcttgagacctataatggctttgagggtgttggatctgtggttgatgttggcggtgggactggagctattattaatatggttgcctctaagtatcccaccacaaagtgtgttaaattttgacttaccccacgtcatcaaagaagctccagcttatacaggtgtggaacatattagtggagacatgtttgtgagtgttccaaaaggtgacgtcatttttatgaagtgggtatgccatgactggaatgatgagcaatgcttgaaattgttgaagaattgttatgattcccttcctgacgccactggaaaagtgattttggctgaaggcattagtccagaaaccccagattctaacttagctgcaaggtgtgagtttcaaatggatgttatcatgttgtgtcatagcccaaatggaaaagagagttcagagaaagagtacaaggccttggctaaaggagctggattccatggtttccgaatagcatcttgtgttctcaacacacatgttatggaatttcttaaaaaggcttaagttcttatcttctgctacttgtattttatttttgagactaatttgttggctacagaggtatcctgctatatatccttgttttttttttttataatgacaaattaataattgtaatgatgaaaaagtttctgcaaatttagcgacaatttttttaaagcaaattatgcacagtcataataatacaatgataattataatttataaaataaaa

SEQ ID NO: 18360 - DNA, 310 bp, Glycine max
  Clone ID: PAT_MRT3847_116583C.1
gacgcactcgaccacacttctgtggatccggattctgccgtgaagttcgactcctctttcgcactttctactgtctcttatcgctttgaacgcattccttccctcgttgtaccgtgttcaggtgaaatgacaccgttttaccgttccatcttcgcggcacagtatacgccacgttcgtaaatatatagggaagcatcaacgtgaatgatctacgtgtcggaaatatcaagggactgtcactggactactgtactacaaatgttatggcaagtgtgtgattcgtgacgcatacgtgcgttcttgtacacat

SEQ ID NO: 18361 - DNA, 244 bp, Glycine max
  unsure (1)..(244): unsure at all n locations
  Clone ID: PAT_MRT3847_116584C.1
ccgcgcctggagtgagggcagtactggtgtcggtgttgccgnttncaccttnccatcgactttccactcaaaaccacaatcccaattcgcacctccgttttncttcttcttcttctgtcacttcctccacatcctccaacanaaccatantgtttgtttgtcaatcgggagcggctccaaaaaagacccttccttcttcgacgaaaatggcgccgcggcgacatggggggttacctntaccacc

SEQ ID NO: 18362 - DNA, 728 bp, Glycine max
  Clone ID: PAT_MRT3847_116585C.1
gaaaaaaataaaaaagtgctggaaccttttaacatcaaatagttcatatttgattcctgagtgagtcttgttaaggaatttagagagcagagaggaagagatttgtattgaggaattcaacccaactaaaaacagtttacaactctgtttatatgacagttacataactgtaactgtcaactaacctgagtgagttagtgacatctgtaacatagctgtcctaactaactactgaccatagttagacttactgacttagctaaacttcggtattctgcttcagtactggacctagccactactgattgctttttggaccaccaagagaccaaattgggtcctaggaaaattgctgcacctaaggtggaccttctatcatcaggatctgatgcccagtcagcatcacaataggcatgaacagaatagtgagagaaagagaaattaggctgcatactagtccaaaattgatagtccctttgagatacctaagtatcctcttcacagctatccaatgctggtcagtaggtttactcataaactggcaacctttgttgacagaaaaactgatttctggccttgctattgtagcatactgaagagcacccagaactgatctataaagagaggggtctgaaaaatattcataccctgtttgagttagtttgcagccaccaaccataggagaagagatagaattagcctcatccatagttggctttgcttggatt

SEQ ID NO: 18363 - DNA, 362 bp, Glycine max
  Clone ID: PAT_MRT3847_116586C.1
ttcgtccggctacgcacacggggggtcacagaggatacaggtgtgacaacaggcttagctataaccagtgctatgaagaggcgctccagggggggtgcctacactgatagttacaccaactgctattaagactgtgctgcttggacaactgcttggactatagcaatgactataaacccgaattcagacgcatgttgtgaggcatggatgaagggaaccgtgaatcattgcgaaattaattgtgacactatatggactagctgcatggactgacgatgcataggatgcagttgaggggacaattgactgacagaaatgcgctcacaagagctatcgcaggaccaattgagaaataaattcag

SEQ ID NO: 18364 - DNA, 160 bp, Glycine max
  Clone ID: PAT_MRT3847_116587C.1
gcctgatcagatccacgagattaatgattttcttttgactgctcgtaggaaggatgccaggtcggtgaataatcaatatgagcagggatgtacttgaggtaaggctcgatgctcctaagtcatgtacacactctgtgtctttgaccatgctaaagctgat

SEQ ID NO: 18365 - DNA, 315 bp, Glycine max
  Clone ID: PAT_MRT3847_116588C.1
attaacctgacctctacgcgagtattccaaatcacggattccctagcagcatagactactggtgcttgcctaagcgtatcagaaatgctagcaaacctcatcaacctaacaggaaccacaaggccagatccatctgcctctacccctgcctgattcaagactgaagctcctttatacaaaaacaatacttcacctccaaaagaatctgccgctactgctcctgccaatgataagcttaccaagtcgtatcctcctgacacaatgatcttctcgcctgactatctcttggacctatctgagatcccatactacttg

SEQ ID NO: 18366 - DNA, 716 bp, Glycine max
  unsure (1)..(716): unsure at all n locations
  Clone ID: PAT_MRT3847_116589C.1
caggcacgtgggctcagtctactattgcaattgctgctgctgttgaggaacctccagatgctcatgcatcagaatgcgggcctgatgtggatggagttaatgatcaccaaacagcacatttttcatctggtccgaagaagagtgaactaaggataggggagtcatcagccttcttcacgtatgttaaagcatcaatacttaagagcaacttggaaggggttgttaatgtagacaaaaatggtgctacacatgtgaggatggaagttatgcatcaaacatgtgctcaacaaggggtgaatgaccttcaaatacgggaaaatggagaggcatatgaaagtcaatcgcaagatgacttacccagcagcactagtatacctgattctttgtctattgagaggtcttgtactccacctgcatcaatggaagtttcacagcaaaagcactacagggaagaaaatttacatcagggtgtgatgcatccaagaaatgggactcattgttccgagcttgaagtatctggcatggcttcccaacaggtttatccatattatatttcaggggttgttaatcatgttatgatgccttcatcagcacaaatgtatcatcaaaagaatatccaggacctacagaatcatcctagctcagctatgatttcacagtacagccatctttcccaaggtggtcctcatggaaacggngatgacatccttccccat

SEQ ID NO: 18367 - DNA, 153 bp, Glycine max
  Clone ID: PAT_MRT3847_11658C.1
ccttttcgtttttaaatttggattcaacttacaaggataatggcggtgatttcggagggtacaacaacccaacctatacagaaggatgtactgaagcccatactgagtcgtacgtcattgatactctttccctcgcaccataacgactcctta

SEQ ID NO: 18368 - DNA, 367 bp, Glycine max
  Clone ID: PAT_MRT3847_116590C.1
aattcggctcgagaagttagtaacccttcctctcttcttcttcttattctggttcaaaaaccattttttattattttccggatggcggccggtactgtgaaaccttcttcttggtacccgtcctaccattcacgctccttcactttcttttatttcttcgaccctttcttcttccatgaattcaacaatctcaaaacccaaaccttttctttttttttttgcgctcttggcaagggccaacccttaaacaccggccagggggaccccacctttaccaccattgtcaagaaggttattggccgggaaaccaaattcttcttcttgggcggcggcaacggcaacaaggtggatatttccctccaatttt

SEQ ID NO: 18369 - DNA, 729 bp, Glycine max
  unsure (1)..(729): unsure at all n locations
  Clone ID: PAT_MRT3847_116591C.1
ccacgcgtccgcgaactgcgagtctgcgacgcaatatctctcaaccacaaccagtagcgacgctcactctctcaatctcacagtgagcgaaccctaattgcggattcacgaagaccctttttctgatttcgtaatgttcgtgtgatgtattcaagcctccaacagatattgacccttttttatgaattcacgatggaactctagacataattgggtctgtatctgaactatattcaggtttaacctcgaaaatttcctctctgcttccgatcaaaatagacgaaacaagggtatttaaccctccaagtagcaaaccctcaccgttgcttgaatttcagtgttgctgtgattattcagcaatagtgcatgctttctgcggaagtgttggctttgattggacttaggaactccaaggcctagttgctgcattttcagtgttttgatggatgtggagtggtctgattcacggtacgatggtagaaatgataaggaggattccccggtgagggagcaatatgacgatgatggggcggagaaatctagcaagcatagaggcaagaacaggaagaaggaacaccgtcgggaacagccaaaggatgcttcgaaagaaggaagggaatggaagaaggaagacagggatgagcgtgaaaaggaccatgtaaagataangcagggagaaggattatgatagggagaaatatanggagaaggagcgtgagagggataggg

SEQ ID NO: 18370 - DNA, 596 bp, Glycine max
  Clone ID: PAT_MRT3847_116592C.1
cccacgcgtccgatatttgttacggacaaaaaaaaaaaaaaaaaaaaaaaaaaaaaaaccaaaaaaaaaaaaaaaaaaaaaaaaaaaaaaaaaaaaaaaaaaaaaaaaaaaaaaaaaaaaaaaaaaaaaaaaaaaaaaaaaaaaaaaaaaaaaaaaaaaaaaaaaaaaaaaaaaaaaaaaaaaaaaaaaaaaaggggggccctttaaaaaaaaccaaatttaataacccggggatggaaaataaaaattttttaaaaggggcccaaaaaaaaaaataaagggcccggttttaaaaaaggggaaaggggaaaaacccgggggtaaccaaaataaaacgccttgaaaaaaaacccctttttccaaagggggaaaaaaaaaaaaaggcccccaacaaaaccccttccaaaaaattggccaacctaaaagggaaaaggaaccccccctttaacgggcaaaaaaagcgggggggttggggggtaacccccaaaggtacccttaaattttgaagggcccaaacccccggctatttggtttttttcccttcttttttccccaagttggggggttttccccgaaaaactttaaaaaggggggcc

SEQ ID NO: 18371 - DNA, 466 bp, Glycine max
  Clone ID: PAT_MRT3847_116593C.1
ttacttgacccggactataaataatatttaatggttggaacagaaagaaatcactgaattgttccaacctgcaccaactaatcttcgggcttggcaaatacttatctgcaacaaagaccgaccgaataataataatgactggttcccctacctaccaagaattatacttttgttctctccaccctcccctgaccccgtacctttattgaggatgtatttcatactctgaaggaacgaattatgaagaccgagtttccaatcaccactcaacatcaacttgaatgagagggcgaggaccaagcacccacagaaacatcaacaggccctcaagcggagacagcgttcaaaggctgatgtaaccaactaagggaaactcctgttgctcctttcttctttggtggcctcacactgcaactcttgcaagaatacattttggacaggttgtgggtctggctccaccctcttt

SEQ ID NO: 18372 - DNA, 419 bp, Glycine max
  Clone ID: PAT_MRT3847_116594C.1
acgagctcgcttcaaacaccagtcacagcaaacagtgatactttgatccgtgtcagattcagtcgtggatgtaatgaagctcattttttcattgaatctcgacaagaaaaccatttgggtctcttagtttactggatttctaaagaaaagtgattaacttttgttgcccggaatcatgaagtttccgttttcagccattgttgctctttggtttgtttgtgaccttgttctggcaaattcacgctaccttacgaactctggaattatttcaagctcactaacccaaattacagttactctaaaattaatttggctggtactgtcctagaaaaaaatgagcccttcagttttacaactgtcattaagaaatcattgcttacatttcccaaacttggagataatgaggcataccaagatag

SEQ ID NO: 18373 - DNA, 821 bp, Glycine max
  Clone ID: PAT_MRT3847_116595C.1
accaggcaacattgatgaatctattctgggcttctgcagaggtgtggctagcatgttgagtttcgtgttgaatcaccatggaaaagattctcttggttgatggtaaatgatccataagcaggacttcagagcacacaacagaaaatcgttcatccagccctttgagaaagtgaatgacaaaatcctgttgatggtaagttctgctcggacaagtgcaagggttcatgagtccataattgtctaattcttcccaaacaaatttgagcttagtgaaaaaatccaaaactgtgtgcgacccttgcttgagtctgtatatctcttcttgaagctctgcaatttgcaataaatccccttgtgaaaaacactccttcaaatcattccaaatgtttgtagcatggtcaaaatatataacaatttgagcaatggatggtgactggaaatttaagatctaggacatgatttaggtattgcaacgttcctacaaggggtgtgaaggatctgtggaagttggaatcgatatagcgctggtaaggtaacccattttgttctttgaataaggatcattttaactgatcatgaccaagattggtaattatttctagtcaaagatggtgtaacaataatggatgaaggactctcactagggtggatgtaatatggacttgagggaatctgtgaaaggtcattgttgctcatagttcctgcatagtgaagaaagtatcagcagggctctaggttggagctctgaaaacagttttttaaggtgattaaatatattctatttatctgtacttaggctcattacattacttgataatttt

SEQ ID NO: 18374 - DNA, 148 bp, Glycine max
  Clone ID: PAT_MRT3847_116596C.1
cattccataactggtaaaagggggcaataaactgttgcattttgcaaatccatacaggcaagtggaaagacattcaaggtggcgaaccctatccctcccattcattctttgcaaacagtctatgggaagattttcagcagataggacc

SEQ ID NO: 18375 - DNA, 634 bp, Glycine max
  Clone ID: PAT_MRT3847_116597C.1
aaaagaccaaaatggaaacccatataaaacaaaaaagggtgggaatgggaacattatttaagttaacaacaaaaaaaaaaaaggggaaatcccaacccacaggggaatctctaaaaaccccacgggctccctcaccctagataaaaaaaaatagataaaaaaataggggcaaaaattaaaaaaaaaaaaaaaaaaaaaaaaaaaaaaaaaaaaaaaaaatcttgactctttaaaaaaaaaaaaggagtacccctaaaaaaacaaggggaaggggggcccgccttaaaatggaaacaaaaccactaaatttcggggcgccactaactttggaaaaaaaattttctttttgggggggaccgaaatgggaaggaacaaaaggggcgggggcggaatcatcatctccagcaacaggactaggaggaaagggggcctcttcgggggattaaaaactctttggaaacccttggccaaagggcacatttattttgaaggggggcccactcttggatggggcaccatcataatcacctgaaaaaaaatatgtcatgccctccttcaccaaaggaacagccactgtcacaggaagggtttgggggttggaaggaacaaaaactgaccattggggggggcccct

SEQ ID NO: 18376 - DNA, 522 bp, Glycine max
  Clone ID: PAT_MRT3847_116598C.1
agacataaacattatccttttaagtatattgaaatatcaatgaagcttatttctgtttgtataaattataaagcactcaaaaggtcttcatatactataactataactataacaagaattcacattgaaagtcttatgtctaaattaaagtctgcgcctcttaacaaccagaaaccagaagggtataagcaagatgatgatgatagcaagtatttgagtgaaaagcatagagctgggcacttccatctgttgaatgaaaatgtggtctgcggagaaatttacttgttgaatgaaactgtgatctgctgaggtgtttatttgctgaatgaaactgtgatttgctgaggaatttgtttgctgaatgaaactgtgatttgctggggaatttgtttgttgaatgaaactgtgatcagctgaggtgttcacttgttgattgaaactatgatcagccgagctgtctatttcttgaatgaaattctgatatactgaggaagttattggggtgaccccaaacccttttaa

SEQ ID NO: 18377 - DNA, 538 bp, Glycine max
  Clone ID: PAT_MRT3847_116599C.1
gttttaagctttgaaattttgaaaactaaacccagtttcagttgagtttcaatttttttttaaatttttaaaaagttgttgcaaatgaaaaatggtaaaatgattcaagctactaccagggcaccggactataaacactgacccatgaaagcttttgcttccaaatttcaattttcaggtttgatagctaatcttcaaatcccatgcaaagcatgggagactagctagttagtcttcaaatactaaggaaagcaaaaaatatcaaacacttgaacttaatctcaagtatatagcctaagttactttaataaaattgcctctgccaagggagaaccattgattgctcctttgggtttggtttgtgagtgcacacagtacccaacgcaccaagccattctacaatattactttttaattgtatgctagttagggttttccaacctttacttaaaaaaagttggtggtaaatttgtgtttttaaatttgataatgttaacagattgataagtgtaccaattttatcacaagtagtaaagat

SEQ ID NO: 18378 - DNA, 3386 bp, Glycine max
  Clone ID: PAT_MRT3847_11659C.1
ggctcatgtattcagttctcattattcatttgagagcgctattgtgaacaattttttatcttaaatgaaaagaccccgttttcctctatgatcctctactttccagcctccactattcacacgcataacaacacaaaggtctgatcgagaaccttctggacttcgttttcacacacatcttacaactggcatgtattctctttaatgcagattaaatacttattaagttagttataaaaggacatatatagtaagtagttgatgtcattttgtatccttgaattaccattctccctcaattgattcccttccctctcaccaagttttattgatctcttctatttcgtcaactactttgattttccatttatatctactcacaaagcagacatcatttacactggcatttcacacgcatgtgtcacacgactccaatatagcatcacaaaagaatagaaaagaagctccatgtaaaggtataacaaaaagaatcctttttatggcttgatgttaatttacttaaaaattctaacactttcgctgtcggtttgctgccgtcttctctgttctggaaaacagaattttcttacccgcgtgttcgtcttttatccaaaaaggcaatgagaacaacacaaattctgttggttttgctttggttcttctgcatttatgccccttcttcgttttgagcaaatgtcacgtatgaccacagagcattggtcatcgatggcaagcgccgtgtcttggtctctggttctattcattaccctcgtagcactccagagatgtggccagacctcattcagaaatccaaagatggaggacttgatgtgattgagacttatgttttttggaacttacatgaaccagttcgaggccagtataactttgaaggaatcgggccgatttggttctgaagacagtggctgcagcaggtctatatgtgcatctccgcattggtccatacgtatgtgctgaatggaactatggtggtttccctctttggctacacttcattccgggaatcaagttccgaactgacaatgaacccttcaaggcagaaatgaagcgattcactgccaaaattgtggatatgatcaaggaagagaatctatatgcctcacagggaggacctgttatattatctcagattgaaaatgaatatggaaacattgattcggcctatggtgctgcgggtaaatcctacatcaagtgggcagcaactatggctacatctcttgatacaggggttccatgggtcatgtgtcagcaagctgatgctcctgatccaattattaatacatgcaatggattttactgcgatcaatttacaccaaactctaacacaaaaccaaaaatatggactgagaattatagcggatggtttcttgcgttcggtgatgctgttccttaccgacctgtggaagatcttgcatttgctgtggcacgctttttccagcgaggaggaacatttcaaaattactatatgtaccatggagggactaattttggccgggcttctgggggaccttttgttgctacaagttatgattatgatgcaccaattgatgagtatggaattattagacagcctaagtggggccaccttaaagaagtgcataaggccataaaactttgtgaagaagcactgatagctactgatccaacaattacatcccttggtccaaacctagaggcggcagtttacaagacaggatctgtatgtgcggccttccttgctaacgtagacaccaaatctgatgtaacagtaaactttagtggcaattcatatcacttgcctgcatggtctgtgagcatcttaccagactgcaagaatgtagtgcttaatactgcaaagattaattctgcatctgcaatttcaagcttcacaactgaatctttaaaagaagatatcggttcttcagaagcttctagtacaggatggagttggataagtgaaccagtgggtatttcaaaggctgattcattcccacaaactggattactggagcaaataaatacaacagctgataaaagtgattacttgtggtactcattaagcattgattataagggtgatgctggttctcaaactgtccttcacattgaatcacttggtcatgcccttcatgcttttattaatgggaagcttgcagggagtcaaacaggcaatagtggcaaatataagttcactgtggacatccctgtcacactagtggccggaaagaacacaattgatctcttgagtttaaccgtgggacttcagaactatggagccttttttgacacatggggagcggggatcactggtccagtgatattgaaaggtttggcaaatggcaacacacttgatctctcctaccagaagtggacttatcaggttggcctcaaaggggaagacttaggtctgtctagtggaagttctggacagtggaattcacaatctaccttccctaagaaccaaccattgatttggtacaagacaacctttgctgctccatccggcagtgatccagttgcaattgacttcacggggatgggaaaaggtgaggcttgggtgaatgggcaaagcatcggacgatactggcctacatatgtggcttcagatgctggttgcacggactcatgcaattatagaggaccttacagtgcatccaaatgtcgcaggaattgtggaaagccatcacagacactataccatgtaccgcgatcgtggttaaaaccaagtggcaacattcttgtattgtttgaggaaaagggaggtgatccaacacaaatatcttttgtcacaaaacagacagaaagtttgtgtgcacatgtatccgattctcacccaccacccgtagacttgtggaactcagatacagaatcaggaagaaaagtaggtcctgtgctatcactcacttgccctcatgataaccaagtcatctcttccattaaatttgctagctatggaacaccccttggaacctgtggtaacttctaccacggacgctgcagcagcaacaaggctctttctattgtgcagaaggcctgcattggatcaagcagttgtagtgttggagtatcaagtgagacattcggaaacccttgtagaggagtggcaaaaagtttagcagttgaagctacttgtgcgtagacagacatgtttcttcaataacacttcccaattttctgaagatgattccttctaataagcaaaagtagatttgtaattttaggaacatccaagaaaatatagtcaactaaaacagtttagtctcacatgcaataaaaaagaaaagtctctaagctgatgcaagatagtacgtgataaatggtatttttacttttgcttgctttcacaaaaaaaaataaccccccaaaatttaaaaaaaaccccaaaa

SEQ ID NO: 18379 - DNA, 498 bp, Glycine max
  Clone ID: PAT_MRT3847_1165C.1
ccggcacaagaactagtcctttttaattgaagaaacaaattctagtaccttgtaattctatcagatggataatagagaatcaagactcacttattgcatgtttattagattagaggagcactaatttacatgacacacaaatttataagtagaaacgtgacatttttttacttgcagttaaaagtaaatatattatatttttctttcttttttttaagcctttctttatattatataactttatcataaattattttataattaaaaattatattccttttcttgtttggatcttttaggcactgatttggatgcttcaactttctgagtatgagtgtatccaaacacgtcgttttgtaaatctttgaagtagcaaacaaatattgggtttcaccgtagatatatcaagatttacttttagtgtgagactattgccattgcacgacatttttcttctggttttaagcttttaacaatttggaagtaaattatttttat

SEQ ID NO: 18380 - DNA, 401 bp, Glycine max
  Clone ID: PAT_MRT3847_116600C.1
ccacgcgtccggactagttctagcaaggacaagcgtgccctgaagcttgctaagagaaagcttggaactcacaagagggcaaagaagaagagagaggagatggcgggcgtcctcaggaagatgaggtcggctggtacgcacactgacaaaaagaaatagagagcatttcaagttcatggagctggctgccagagattatgttccagtgtctgattttccatacatgtagaacctaatagacatgtcaaagtattatgtatcgaaccagctcatgggattttgctccttccaatgcatccagggtttatgtatcgaaccaatttatgggatcttgctcttattctaatgcatccatggtttgtgaaaaaaaaaaaaaaaaaaagggcggccgctctagagga

SEQ ID NO: 18381 - DNA, 271 bp, Glycine max
  Clone ID: PAT_MRT3847_116601C.1
acgcttgcgttcttgagtgagtggagtgattcacctggctctcatgtgatggccacacgctcctacattaacctacatgagggatatgagcaggggtgcctctactgttccatgggtgcttgtctatgaacaacctctaaagaagagttcacggcatgatcataatgcttcggacacatggtggagaaaggccagcatttgtgcagcaaccatggctacgaggtcttgagctaccacatacagcctgccatcatctgagtgcaatggcatg

SEQ ID NO: 18382 - DNA, 267 bp, Glycine max
  Clone ID: PAT_MRT3847_116602C.1
gctgattggtaatatgcagacatatctccaatcaactactgttcgcttagaagagtggagggtgaaaagaactgatacagagcaatggatgcatcacaggcaactacctccagagctaagagaatctgtgcgtaaatatgaccaatacaaatggctggctacacgaggagtagatgaagaagctcttctcaaaggacttcccgtggatcttcgtagagacatcaagcgccacctctgtctcgatctagttcgaggagtgccattatt

SEQ ID NO: 18383 - DNA, 335 bp, Glycine max
  Clone ID: PAT_MRT3847_116603C.1
aggcgtgcgaacggctgcgaggggactacacagcggtgagtcgaacgaagcgggcaattcgtactagggacgtgatcccgtcatggtaatcgagcgagtgcagtgtgcatatgactatgtggatgtactgttataattacagaatgagtcttttcaggagcacacgtgcggtccgatttacttcgggcgagttatatggggtcgacactggtatattacttaagcattaaatttcaacctatttttcccatgtgcacagttctgtgatctgttgatgctaaggagaatctcattttcttgagcagatcatattacatcaatcgctggcagtctat

SEQ ID NO: 18384 - DNA, 379 bp, Glycine max
  Clone ID: PAT_MRT3847_116604C.1
aaagaaacaaagggctttaccttatgatccccctcagggaatccgtttcaactaaaagttgcttaagttaccctgttttcacaaatcccacatttgaaaatgattgcaaaaaacatacaaggggccctgatttttcaaccccaaattcttaaaaaaagacagcattgtccaacgaaagcttttgctttcagtcacgagcaacaacaaccatttgtttaccaactttgcgaccactatagaggccaaccaaggttgggggacctttctaaaaaccttaagaaatattttccaaatacacaaccttcctttttttaatatgaggcaggacaaactccaaaaattttggatttaggggatagaattccccaacaataaaacc

SEQ ID NO: 18385 - DNA, 2917 bp, Glycine max
  Clone ID: PAT_MRT3847_116605C.1
ggctcgagggaatctttgcaaaaagatggcccctcctcttgtgacattactctctgcagaacctgagatacaatatgtagcattgcggaatatcaatcttatagttcaattcggaccaacaatacttgctcatgaaattaaggtgttcttctgcaagtacaatgatcccatctatgtaaaaatggaaaagttagaaattatgataaaactggcttcagaccgaaatatagaccaggttctattggaatttaaggagtatgctactgaagttgatgtggatttcgtaagaaaggctgttcgagcaattggtcgttgtgccatcaaattggagagagcagctgaacgatgcattagtgttttgcttgagttgatcaagataaaagtaaactatgtggttcaagaggctatcattgttatcaaagatatatttagaagataccccaacacatatgagtccataattgcaacactttgtgagaacttagacaccctggatgagcctgaagccaagagagaattgacaatgccgatgagcttcttgaaagtttcttggaaagtttccctgaagaacctgcacaagtccaactacaattgttgacagctactgtaaaacttttccttaagaagccaactgaaggcccacagcagatgattcaggttgttttgaacaatgccactgttgaaacagataatcctgatttgcggatcgtgcatacatatattggcgtctcctctcaactgaccccgaggcagctaaggatgttgtgttagctgagaagcctgtgataactgatgactcaaaccaacttgatccttctctacttgatgagcttcttgtcaacattgctacattatcttccgtttatcacaagcctccagatgcttttgtaactcgtgtgcattcagctcagagaacagaagacgaagactatgctgagggaagtgagacagggttttctgagtcacctgcaaatcctgctaatggtcctgcatccccacctactgccaggcaatcagcacctacatctgcaataggtgcaccagccacacctccacctgttgcacctgtgccagatttacttggagatttgatgggcatggataattctattgttcctattgatcagccagctactcctactgggcctccattacctattttactacctgctgcaactggtctgggtttacaaattagtgcacaactgactagacaagatggtcaaatattttatagtttgttgtttgagaacaactctcaggttccacttgatggcttcatgattcaatttaacaagaacacatttggtcttgcagctgctggaccccttcaggtttcacagttgcaacccagaatgtcagctaggacactcctccctatggttatgttccagaatatgtcgcaaggtcctcctagctcagctttacaggtcgctgtgaaaaacaatcaacaacctgtgtggtatttcagtgataaaatctcattacttgtattcttcaccgaggatggtagaatggaacgttccagttttctagagacatggaggtcccttccagattcaaacgaggtttccaaggacttcccagccattgtgattggcaatgcggacgcaacactggaacgactggctgcgtcaaacatgttctttattgcaaagcgcaagaatgcaaaccaggacgtgttttacttctcagccaaactccctagagggataccattcttaattgaacttaccacattgattggaaaccctggcgtcaaatgtgcaatcaagactccaagccctgaaatgtcagcacttttcttcgaagccattgagactcttctcatgggttaatgggttttaaatttagttttttcttttaatttttgtttatatattgtttttgttagaatatgtgattaatatcctggacaggtgtgtaatatcttatttggaaaagaaaaaaaatctgttgactctttgttgtccctgactgtattttaggccaccattttcgatgctattggcagcatagatgtcgttatgccctcgtagttaacttttattggtttccgactaatactcacgttaaacttgatggctttcatgattcaatttaacaagaacacatttggtctagcagctgctggacccctccaggttccacaattgcaacctggaacctcaactaggacactccttcctatggttatgttccagaacatgtcccaaggtcctcctagctcacttttgcaggttgctgtaaaaaacaaccaacagcctgtgtggtattttaatgataaattctcattccatgtactttttactgaggatggtagaatggaacgttccgctttcttagagacttggaggtcccttcctgattcaaacgaggtttccaaggacttcccagacattgtgattggcggtgtggaagcgacactggatcgactagctgcatcaaacgtgttctttattgcaaagcgcaagaatgcaaaccaggatgtgttttacttctcagctaagattcctcgagggataccattattaattgaacttaccacaatggccggaaaccctggcgtcaaatgtgcaatcaagacaccaagccctgaaatgtcagcatttttcttcgaagccatcgagactcttctcaggagctaatattaccgctattattatttttttatttatgttgtaattttttcatttaattttgtttatacattgtttttattagcatctttgatagatattttggacaggggttgtgagtccgaatttttttacactatatatagctgtggtcttgtggacagcgttggttggaaggttgggtggtttgtaatattctgctttatttgtaaaaacaatgattacttagatgctattaacattttgtatcaaattacatgttatttacataaaattat

SEQ ID NO: 18386 - DNA, 673 bp, Glycine max
  Clone ID: PAT_MRT3847_116606C.1
tttgcaggttgctgttaaaaacaaccaaccagcctgtgtggtattttaatgataaattctcattccatgtactttttactgaggatggtataatggaacgttccgctttcttagagacttggaggtcccttcctgattcaaacgaggtttccaaggacttcccagccattgtgattgacagtgtagaagcgacactggatcgactagctgcatcaaacgtgttctttattgcaaagcgcaaaaatgcaaaccaggatgtgttttacttctctgctaagatccctcaagggataccattattaattgaacttaccacagtggtcggaaaccctggcgccaaatgtgcaatcaagacaccgagccctgaaatgtcagcatttttcttcgaagccatcgagactcttctcaggagctaacattaccactattagtattttttactatgttgtcattttttcatttaattttgtttatacattgtttttgttagcatctttgatagataatttggaaaggggttgtaagttcgaatttttttttaccctatatatagctgtggtcttgtggacagcgtttgttggaaggttggatggtttgtgatattccgctttatttgtaaaaacaatgattacttagatgctattaacattttgtatcaaatgatatgttcttt

SEQ ID NO: 18387 - DNA, 216 bp, Glycine max
  Clone ID: PAT_MRT3847_116607C.1
gggtgtggggtttatggccacctgaaatgggcaaaaccccaatttgttgggaaccacaaatgaaatttattttttccggcccttttattccgaatacaatttgaaacttgggtgttgttggaaacaaaattgggaatttgtagcccaattttaatttttttattccgtccaattaaagaatgaaacctttaaaggtgaagggttgtttgaaactga

SEQ ID NO: 18388 - DNA, 2173 bp, Glycine max
  Clone ID: PAT_MRT3847_116608C.1
gtgcagttgtactatcagctgttaagatgatccttcaacaaatggagctcatcaccagtactgatgttgctcggaatctttgcaaaaagatggctcctcctcttgtgacattactctcggcagaacctgagatacagtatgttgccctgcggaatatcaatcttatagtacaaagaagaccaacaatacttgcacatgaaattaaggtgttcttctgcaagtacaatgatcccatctatgtaaaaatggaaaagttagaaattatgataaaactggcttcagaccgaaatatagaccaggttctattggaatttaaggagtatgctactgaagttgatgtggatttcgtaagaaaggctgttcgagcaattggccgttgtgccatcaaattggagagagcagctgaacgatgcattagtgttttgcttgagttgatcaagataaaagttaattacgtggttcaagaggcaatcattgttatcaaagatatatttagaagataccccaacacatacgagtccataattgcaacactttgcgagagcttagataccttggatgagccagaagccaaggcatcaatgatctggataattggtgaatatgcggaaagaatcgacaatgctgatgaacttcttgaaagtttcttggaaagtttcccagaagaaccagcacaagtccaactacagttgctgactgctacagtcaaacttttccttaagaagccaactgagggcccacaacagatgattcaggttgttttgaacaatgccacggtggagacagataatcctgatttgcgagaccgtgcatacatatattgggcgtctcctttcaactgatccagaagctgctaaggatgttgtgttagctgagaagcctgtgataactgatgattcaaaccaacttgaaccttctctacttgatgagcttcttgccaacattgctacactatcttctgtttatcacaagcctccagatgcttttgtaactcgtgtacattcagctcagagaacagaagacgaagactttgctgagggaagcgaaacagggttttctgagtcacctgcaaatcctgctaatggtcctgcatcaccgcctacatctgcaacaggtgcaccagccacaccttcatctgttgcacctgtgccagatttacttggtgatttgatgggcatggataattctattgttcctgttgatcagccagttactcctactgggcctccattacctattttactacctgcttcaactggtcagggtttacaaattagtgcacaactgactagacaagatggtcaaatattttatagtttgttgtttgagaacaactctcaggtttcacttgatggcttcatgattcaatttaacaagaacaccatttggtcttgcaactgtggaacccggaatgtcagctaggacactcctccctatggttatgttccagaatatgtcgcaaggtcctcctagctcagttttacaggttgctgtgaaaaacaatcaacaacctgtgtggtattttcagtgataaaatctcgttacttgtattcttcaccgaggatggtagaatggaacgttccagttttctagaaacatggaggtcccttccagattcaaacgaggtttccaaggacttcccagccattgtgattggcagtgcggatgcaacagtggaacgactggctgcgtcaaacatgttctttattgcaaagcgcaagaatgcaaaccaggacgtgttttacttctcagctaaactccctagagggataccattcttaattgaacttaccacgttgactggaaaccctggcgtcaaatgtgcaatcaagactccaagccctgaaatgtctgcacttttcttcgaagccattgagactcttctcatgggttaatgtgttttaaattttgttttttcttttagtttttgtttatatattgtttttgttagaatatttgataaatatcctggacaggtgtgttatatcttatttggaaaaaaaaaatccattgacttttgttgtccctggctgtatttcactactgccatttttgccgttattggcaccatggatgcagttgtgctcttgtagacagattttgttgaggttcgactgcttgtagtattacgttctttgtaaagtgattaaattgtgatgcttttagtttaaaa

SEQ ID NO: 18389 - DNA, 122 bp, Glycine max
  Clone ID: PAT_MRT3847_116609C.1
tttttaaagaaatcgtaaaatgagtggcaagaaccaacaaacgctaaatagatggggatggcctacctacctggatcatgtatattggtatgaacgacatagcttttgggttcaggccaccc

SEQ ID NO: 18390 - DNA, 548 bp, Glycine max
  Clone ID: PAT_MRT3847_11660C.1
ctttgctggatgtatatatattatgtatcattataaagggactgatagacacttctcccactgcatgactcagtagtctgactctgatggactgaaatcttggttctatggacaaaggacccatggattactcttttccatagcacttccttgtgtttgaattatcatacatattactgctaattctgttacaagtatcctacttataagcttgtatgtaactacatgccccagcataaaactaattgcgagaatcactcttccgtaaacttcatattctgatcctttatttactatgaagctactcagattggttttacacgaatgctacttggaaggatgatatgcctctatgatactactatggagtaatactgtaaaatgtgattcaactaatagttctggtagcggaatctagagcataggatcatccgaaagagtccttgagtgactttgtcctggaacaggttcttgtgctgacataatcgctttggctgctagtgatgctcatcaaattgctagaagctgtatgatcaatatccccacat

SEQ ID NO: 18391 - DNA, 511 bp, Glycine max
  Clone ID: PAT_MRT3847_116610C.1
aatatgatgattttgtgtttttatacttttgaggagtggggaggtagaacgtgcaaaggaggagatgtggttgcatggaagaagaaagtattgggttgggaaaaagaaagcctgtcccttaggggggagaaatcgattgcgaggacgaacaaaaagaccgcgatcaacttgaagctttgttgaatgaagaggtggaaaacatcgaggcccccggaacgggggccctttttgagatttgcaaaatgaaaaaagacccctttttaatatattatcggtaagtgatgggaagacccttgtctttttttttcccatggaggaggaaaaaacaagatgttttagatgatgaccccccttttgcaaaagaaggagaagaagagtacctttttattttttttttcaaaaaggtggggcaagtttcccccaccctttttttgtgacccccccctttttaacaaaaagagatttttttttcccattttttatcgtttttttaaaaccccccctttctttt

SEQ ID NO: 18392 - DNA, 216 bp, Glycine max
  Clone ID: PAT_MRT3847_116611C.1
gttgtggacgtagcaaaagttacactaacaagtgagaagtgttacataaccataacggtgcgtaatgggtaattagtaaatagctcacggttactgttacaagctgatactaaaatgtcgataaaccatgctaagggaacaaatgacaggcttcgtggttatgtgagtaaacagctagacaggctgagtaagggtatatatatatatatatatata

SEQ ID NO: 18393 - DNA, 521 bp, Glycine max
  Clone ID: PAT_MRT3847_116612C.1
gtacagcagccggtgcattaggcagatcttatcaaagaagagcccttacaacgctttgcagcatttcaatcatctacttcaagacctccagcacggcttcgaggcactttccaccatgctcaccctcacacacacctctcttgcccttggtgtctacggtccaccagcccttgaggccatcttcactgacgacctgatgcgccaaccctttctggccctctttccactcctcatccttgtccatgtggccctgctcactgatgacgacagcaggagcatcccgggatagcgtcggttcttgtcgcccgtctgagtgcgcaagagagcccgccagctgccgctggcgtgcgagtgcgaattgtacgtctcctgcagccgcgccttgaccgtgttctggttgaggctgagcgtcttgcctcgacgtcctggcgagaggatgcgcgagagcgagctgctgcggcgcaagagcaccgatgggatccgggcgagaaccagcggagataagacagaggggagaaggc

SEQ ID NO: 18394 - DNA, 150 bp, Glycine max
  unsure (1)..(150): unsure at all n locations
  Clone ID: PAT_MRT3847_116613C.1
cccattcaaagctatctgaatgggatgctggttacacantcgattngncatcatatatgtggattacaagaacaatttgaggncttagggtatctactcanattgttcttgtaatccacannnntgatgccaaatcgagctgtgtattac

SEQ ID NO: 18395 - DNA, 830 bp, Glycine max
  unsure (1)..(830): unsure at all n locations
  Clone ID: PAT_MRT3847_116614C.1
ataatcgannnagttaaagttnnnngnnnagaccaattntnnnntgaagattgnnnnnntgtgnnngcnnaacatgcatgtctttccgtagaatccaatgaggatacaacagcactagaaaaaatnngctgggagattgtaaaaaagtgtaatggattgccttnggctgcgatatcacttggaggtttattgagaacaaaacatcacgtatgggaatggaatgatgtattaaataatgtcctctggggactttctgaaagtgtgtttccagcattggaggctcgagatcattatctatctccacatttaaagcagtgctttgtttattgttcattgtatcctatagattatgaattttggaaagaggaattaatcttgttgtggatggctgagggccttttaaatccccaaagaaatggaaagactttagaagaaactggtgacgactattttgatgatttggtttcaagatcattttttcaaccttctacaagttggcctcaacacaaatgttttgtgatgcaccaactcatgcgtgatctggcaatatcctttggtggagaattctatttcagatcagaagaacctcgggaagaaatcaagattggtgtctacactcgtcatttgtcatttaccaaatttggtgatatagtcttggacaactttaaaacttttgacaaagtaaaatttttgagaactttcttgccgatcaattttaaagatgctccattcaacaatgaaaatgcgccatgtatcataatgtcaaagctcaagtacctgagagttttatcattttgtggcttccaaagttgaaatgctttgcctggtca

SEQ ID NO: 18396 - DNA, 120 bp, Glycine max
  Clone ID: PAT_MRT3847_116615C.1
cctggtcttactgtgtggtgactgttctctgctctcatctcattcatattcatgtggatggcaactcacagtcaaatcattaccctcaaaacttccgtggccttggaacccaacaagccc

SEQ ID NO: 18397 - DNA, 428 bp, Glycine max
  Clone ID: PAT_MRT3847_116616C.1
catcacgaaaattacttatatagatttaaaatgatgtggtgctagaggtgagattactccaaaatgcacacccacccatggtcataaaaacatacatcaaatcctccaatactgatatcaaaaacgactaacaacagtttactaataacacactacgttacagcatatgcacgatatcctcgcacaccatttccatgggaatcaaacctcatcttacacacgttgaatgcaatttaccaaatctataaccagatacatcggatgaaccaaaagaaattcaatggacctcaacatcctcatactcggacattcatccactaccattttcacagcacggacactggacaatacgcatagcactatgagggcgaccattaccaaatctgctgttcctcaatcttctccctgtgagaaccttttgcaaaact

SEQ ID NO: 18398 - DNA, 351 bp, Glycine max
  unsure (1)..(351): unsure at all n locations
  Clone ID: PAT_MRT3847_116617C.1
atantttttctttttcttttttttcttcctttggttttttttaaaattttttggggtgaaaaacacccaaagcttcttactcaaacaaaaaaagggaaacttttttaaaaacaagttttccaattccaataaaatcatggcaaatccttcattacatactattaattctttatttggaggatataagtgatcaatttctttaaccaaaaggcctttgattcatacaacccaaatttcctccggggtttattcccattatctggcccatccttactaaaaaccccttccgatcttagccccaataattctgtccccacccactttctaagccaccctttattattttggtga

SEQ ID NO: 18399 - DNA, 627 bp, Glycine max
  Clone ID: PAT_MRT3847_116618C.1
tatgtagtgattgacataatctttcctttactatgttcatcttctcttcataatgatatagatatgccctctttttccataaaggttttaaattatatttggggttgcagtgtggtgctgcaattgtaagaccaatggtgtggatttgagaatgttaactgcctagggtggcattcaaagcaccacacactgacaaggctattgatcttctgttttatttctttaaaaccaatggttagaacaatgctttgtttttcttatttgtgaatttcatctgcagatttcttatgttcttgacacacaagattttttcttccgaccaagaaagaaaagacgaacgccttcagggaccacaacctctcggttccgcagggacagagaggaaagattccgcaaattgttggcatgctcgtaatttgtatcttcatgaagagttgttctctaacatcttctaaaacagctgaggagactcatacataattctatatgtttgagtcttggtgtagcaacctaggaaccctttgggtttacaattttatttgttgtcagtacttgaattttcacatgaaagtggaggaggggtatatagatgggagagagtaatatgtttatgaggtctcatgcgtt

SEQ ID NO: 18400 - DNA, 420 bp, Glycine max
  Clone ID: PAT_MRT3847_116619C.1
ctcacacagtcacagcatgtcctccaaacgtgtagagtatgttagtggctccagtgaagtatagcactagctttgatggacccgtgtgcgtgacattttccacctacaaacatgatttgcaagatggtgttgaatatcatatcacataaaattgagcaattttgttggctgtttcaattgaagggtgtttcatgaaagagttcagtaattatatactgtaaatataaaataattttatattatattaataataaaattttaaaaataattattataaaaattaataaatttcttagacataaaaatttatgattaaaatgtacaattattttatattattttttttgttacggagaactgattaattaaaaaaagataatttgtactataaattagacttgataatcaagtttccaggtg

SEQ ID NO: 18401 - DNA, 351 bp, Glycine max
  Clone ID: PAT_MRT3847_11661C.1
agcagcaccaccaccaccctaccaccaccggattcagcagccaccaacggcatctcacccacagcagaggaaacctcacaaccgccgcgtccaaccccgccgccagaacttcgcgtcccaatatggtggccggaggacggcaccctcagcatggattgggtggagaatctgatgcggtgcttcgattggtgctctcggaacgtccctccgtcggagctcccttcggttctccccgtcgaagtcttcgactcgctcatcctcgtcgcctccaagatgctccacaaggagcccaattgtgtccccgtagaccccttccgccctaccctcgatgataatagcactccctccgac

SEQ ID NO: 18402 - DNA, 2650 bp, Glycine max
  Clone ID: PAT_MRT3847_116620C.1
cgcccacgtaagctcggaattcggctcgaggagtggagtaagtgtcgttcagatttcaataaagtatgggctgagatttatgctaaaaatcactacaaatcacttgatcatcgtagcttctacttcaaacagcaagattcaaagaacttgagcaccaaatctttggttactgagattaaagaaattaaagaaaagcagcagaaagaggacgatattattcagtctattgcagctggaaataaacagcctctaatttcacatctggaatttgaatattctgatgttgggattcatgaagacctgtataaacttgttcgttattcatgtgaagagttattctctagtaaagagttgttaaataaaattatgaggctctggagtaccttcttggagcctatgcttggtgttccttcccaatctcatgggacagaaagggctgaggacagaaaaactgggcataatcacctccattgaggtggaccataaagagggaagcaggagtggccccttctagaggcccttgtaataaattcatgcataccataaactgataaggatgtagctgattgtagaataactgttgtgaagatgtttcacgaccataccttggcgtccgatgatataagaaaatgggtctgttggtggtgaaattgttagtagagatgatcctttaatggataaaggacagaaaaatgtagaatacaatgataaagcttctggatttagcaaacaaatttgcctctgatgaggaaggagctaaaaacaatgtatcaattgcaattagaggagaaaacagcctgaacagaactaacttagatgcgtcttcaggccgtgctcttactccatcgcaacctactgatgttgatgactctgtatccaagtctcagggtgttaatgcaccatcggtggagggatgtgacatggcaactccagtaccagtggccaatggtgttctaagtgagagcagtaaagttaaaactcacgatgaatcagttgggccttgcaaaattgaaaaggaagagggtgaattgtcaccaaatggtgactctgaggaggataacattgttgcttatggagattcaaatgtgcaatcaatggccgcgtccggcacaacgttgaaagaaggaaatatcagtctagaaatggagaggatgaatcttgtcctgaggctggaggtgacaatgatgcagatgcagatgatgaggacagtgaaaatgtttctgaagctggtgaagatgtctcaggcagtgaatctgctggtgatgaatgttaacgcgaagatcatgaagataaagaagatatagaacatgatgatgttgatggtaaggctgagagtgaaggtgaagctgaggggatatgtgatgcacaggcaggaggagatggcacatctttgccattgtcagagaggttcctttcatctgtgaaacccctcacaaagcatgtatcagcagtttcatttgttgaagaaatgaaggattcaagggtgttctatggaaatgatgacttctatgtgctttttagacttcatcaagctctttatgagaggatcttatcagcaaaaacacattcaatgagcgcagaaatgaaatggaaagcaaaagatgctagttcaccagatccttattcaagatttatcaatgcattgtacaacttgcttgatggatctgccgaaaatgcaaagtttgaagatgaatgccgggcaattattgggaaccagtcatatgtgttattcacattggacaagttaatatacaaattggtcagacagcttcaaactgtcgcaaccgatgaggtagacaatgagcttctccaattatatgaatatgaaaagtctcgcaagcctgggaagttaaatgattctgtatatcatgcaaatgctcatgtcatccttcatgaggagaatatatatcgtttacaatgttcctctaccccctcacgactatccatccagctcatggacaatatgaatgaaaagcctgagttgtttgccgtttccattgatccaaatttctctttttatctgcacaatgattttctgtctgtctttcccaacaaaaaggagccccatggcatcatactgcatagaaacaaacgccaatatggaaaattagatgagctttctgcaatatgctctgccatggaaggtgttaaagtaattaatggattggaatgtaagatagcttgcagctcatctaagatttcttatgttcttgacacacaagattttttcttccgaccaagaaagaaaagacgaacgccatcagggaccacaacctcccagttccgtagggacagagaggaaagattccgcaaattgttggcatgctcgtaatttgtatcttcatgaagagttgttctctaacatcttctaaaacagctgagactcaaatacataatgtgagtcttggtgtagcaacctaggaaccctttgggtttacaattttatttgttgtcatagtacttgaattttcacatgaaagtggaggaagggaatatatagatgggagtgtgtaatgcgtttatgaggtctcatgcgttttgcccactcctttgtaaatagtttgcttcaatatatttgtagaaatattgtttaccaaattgtttattagttgcaacacagttgcttcctccgttccaaagcttgcgtgcc

SEQ ID NO: 18403 - DNA, 670 bp, Glycine max
  unsure (1)..(670): unsure at all n locations
  Clone ID: PAT_MRT3847_116621C.1
ttagatgtggatgacaggttggcatctcaatcggacacgtcgtttctgagtagatgaagaaatgaagtgaactaacgcttttggaactcgttcggctcgagcatgcgttttcgcttttccacccatcttaaaactacttgactttttgatacaacagcattctatcaacgcattctcaacaagccccacttagatttccccgttaaccttaaacgcagcaaccttaaactcagcatgacagaaattgagtccaacgacaaaacaacaaacttcccgtcagtttatgaagagggagcacccaatttggctgaaagagcaaaacaagaaactatgcgtcctaacaagcattcaagccatcatcataacagggaatctcatggactgaatagtgatattgatgagaacacctcagtggatgatgttagggcaccaaatgtatttgagcgagcaaaggaggagcttcaagctcttgctgaggtgttccatcacaagaaaagggctcctacttctgatataagggatgaagatcaaatcgccgagtcatcagaacatagacaagtatccccaagctctccatcagaaacaaaagcaaaggaagcgaacatatctgtgaaaagctanggagagattaaagccatcatacaccatgataagtcagacacatcatcat

SEQ ID NO: 18404 - DNA, 247 bp, Glycine max
  unsure (1)..(247): unsure at all n locations
  Clone ID: PAT_MRT3847_116622C.1
atcactcttcttccatagtttcgtctgtgtctgtaactctgcatttaccaagagcagatattataagatgggagacgctgaggatattgaaccccttgtttgcgaaaatggatctggaatggtgtaggcaggatttgtaggagacgatgcaaaagagaaatganatatagcattgttggtcgtcctcgtcacactggtgtgatggttggtatgggccagaaagatgcatatgttggtgatgaggcac

SEQ ID NO: 18405 - DNA, 432 bp, Glycine max
  Clone ID: PAT_MRT3847_116623C.1
ggggaaaaaaaaccaacccctaaccccccagggaggacccgggaacccaatgaaccaaaaaaggggggccccaagagggaaacccccgcaaaccccggggaggaaataacaggttcccctaaagcacaaaacccacaaaaggcttaaaatttttttaagcaaccccggggaaccacagaaaaaaccccgggccaattgggcctttaaataaaacaaaaaaaccccctgggggccttccaaaaaaaacaaaaaagggggggcaaaccgctctgaaaaaaaccccgcttcttaaaaaaaaaccgggggggaaccccgcccaaggggaccatccaggagccacaaaggccccccccttagaggcccccccaaggaacccgaaaaagccaaggaatgggaaacaagggaacccaaaccccccgaaaaacccccccc

SEQ ID NO: 18406 - DNA, 472 bp, Glycine max
  unsure (1)..(472): unsure at all n locations
  Clone ID: PAT_MRT3847_116624C.1
gttctgtgatcctttttccatttctatggacgcaaaagaattattctccacaaatttgatagatggaaaaataaaaataacatgagggaacaacaatatagatgaggctcagttaccagttaccacgctcctttagacaaaaataacaagctcatgggtcccattatctgtttcatatgatacgagattctatttgtttgagttggtttgtctgtcaatttcagacttccatattgaaaggaaaagcactgttacctcacacatcaagaggcaatgcaattctcctcctacacttattgttattggtgctggaatatcangaattgctgctgcgcgttgtctccatgatgcatcttttaaggtgattgtattggagtcaaaggataggataggtggcaggatttatactgattactcatttggcttgccaagagatatgggagcctcatggcttcatggtgcttgcaatgag

SEQ ID NO: 18407 - DNA, 348 bp, Glycine max
  Clone ID: PAT_MRT3847_116625C.1
gttattatcaaaatcatactccataaaaggggtgggcttgtttacaaattaattttagtataaagaatgaccagttttacaaattcacgtttgggtttaacaaggggttcttatgccgaggttttccccaaaacaaaacagcttaagaatgaagaaccttttccaccattttctgggccattttgttccaatttttccaaactaattacctcaaaggggtaaaaacaattctgggggccttggaaaagccttcaaagaagggcttcacaatttcaaccggaatttcatcatgaaactgggcatttccattattggacagcccacgaggtggcttgcttcatttttatg

SEQ ID NO: 18408 - DNA, 1701 bp, Glycine max
  Clone ID: PAT_MRT3847_116626C.1
ctccgtggcattgtccgtggcattttcgtctttctgtaatttgttcttccctctcacactgttattctttctttctctttcctctcttatgaatcagtctcatctcatccccaacaaccacacatgcaacaccatcagatgatgttgagtgaatgctactaccctttaaggtttttgacttcatagctggcgaatttcttgcactttgcttggtttttgtctcttgactgcttgtgttcttcggttgggatgaaagatgatgaagacttcggtttgattttacaataataggatattggtattcagtgaagttaacatttgagatacagaacaagagaaaagaaaatttggtgtaacttttctgattttttggcctgggattgtagaggagtttggttgaaatctgatcagggttattgtttactgattttcgatggattcaattcaaaataaagtttattactgctgtgtttctaagggtaacaatgtcatgtatgtgtatagtggtggagaccaagaagatgagaatgttgcagccttgtgcttggagagggctcctcctttccacaggtggtattttgagacaataggtaaaaggacttttggtttttttatggaagatgggtatgtttacttcacaattgttgataaaggtcttggtaacccggttgttcttcagtttctggagcatgttagagacgagtttaaaaagctgtctagaaaaggttcaagaggaattttgccaaacatgaattcaatttacattcaggaaaaactggttcctgtcatccgcggcctgatcacttcattggagagtgtttcacatggtagtagtaattggagagatgaaacttccttgtcttttcaagtggatctgtctccgtcaccaagtaatttgaatggacaaattgaaggtgctagttcaacaaaagccccgttattgggaaaatctaacaagccagataagaagaaagtaaaagatcatgtgattgctatgagagacgttgagttggaggagcatcggaaatctacagatagaggagcaagggtcgattcaggcaatctggatggtgtaagccaaggtggtgcaggtgcatcagtctctttgcaaaaggatatgggttcaatgaggatgagatcagcccctcaaaacattcgtaagaaatggtggcgccaagtacgcattgtcctagctattgatgcagctgtgtgtatattactatttatcatctggttagtaatatgtcatggtatatcctgcattcgatagaattcaaacttcttgtgtgactctgaaattgaatcactatcatatttggaacttgagattttccatgcatgatctgatcagcaacagaaattggtttctttgatggggcatgtaaatggaagttacatactggtcatgttgattagatctttagtgctatttgcaggcacgtgcttcttgtcacccatatataggcattttactttataaagtctactgtacagtttcattacttttagacatctgtacttgtatatgaattttgggaagattttaaaggttcttgattggcctgtttctatagaattttttttaaatagataattattttctaatatagcgatgaccaatattctcaaatctcaagttgtatatgcagaataattatgccaccgaaattctttaggtatgttttgaccaccttttataaa

SEQ ID NO: 18409 - DNA, 327 bp, Glycine max
  Clone ID: PAT_MRT3847_116627C.1
ctttcttttttttttttttgggggtttttttttatatgtggaaccgacttcataagcttcgacgaacatagacaaaaaaaagactaaagttcacagaaaactagaaacaaatagacgaaacaaacaatagaaccatgactgcctcggcaacacatgcgggcgtaaactaaatgcagctccccatccaacgaaaaaacccaaacgcaaattacccgaacaaaaaccgattaccactccaagataaaccgcaaaaaccattttttgcaggagggcattagaacaaagcactagggccaaatattcataagcaacttcctgcccacaaaa

SEQ ID NO: 18410 - DNA, 694 bp, Glycine max
  Clone ID: PAT_MRT3847_116628C.1
ccacgcgtccgtaattttccttaccaagatggggaaggatgttggttttcttctgagtctcagctagggattcaggaggaggacagagtccgtgtattgatcaacaaaatgatggtgaataattcagtcagtattgctggagaagggatagttggacgggcagcatttacaggaaactatcagtggattcttttgaacaatttcactagagatgcttatccaccagaggtatatcctgagttgcattaccaattttcagctggaatgcagacggtggcagttattcctgtgcttccccatggggttgttcaactaggttctttctcgccgataatggaagatataggatttgtgaatgatgtaaagaactttatcttgcaattgggatgtgtacctggtgcccttctatctgaagactattcagcaaaagtttctaatgaaaaattcgctggacctgtgaccgttgatccacctgtcattacttcaaactgcactccctcggtagctaatggttccaaccaacttactaattctcctcttgcttcaaggcctgttgctcagccacctcatcctctaaggggaggaataaataattaccagggttctttattgacacctcaagcctataacccgaaccaggtatttgatggcatttgccaaccaaaggctcattcaatgatcaaaacaaatgtct

SEQ ID NO: 18411 - DNA, 190 bp, Glycine max
  Clone ID: PAT_MRT3847_116629C.1
cagcaagcgccgcaagcgcggaattcagcacgagcgcacaattaagaacgcacgacttattacggccacagcgaaaaaatggccacggaatcagaggatgactgctaaagatgcctatcaataatacggactgaaggctcaaaacatagctctcacaaaaaaacggagctacagcaaaacagggaagaaa

SEQ ID NO: 18412 - DNA, 782 bp, Glycine max
  Clone ID: PAT_MRT3847_11662C.1
ggctcgagcccatttgattcccttccctctcaccaagttttatgatctctgtcatttcctcaactacttttattttccatttatatctactcacaaagcaacatcatttccacttgcatttcacacgcatgtgagacacgacccaaataacacacaaagcaaagtaaggttgctttgcattgtgttaacaaacaaggcaacctcattatttgttgccactttggttctgaaaaagtttcttactttagttgtgggtttgctccgttctctctgttctggaaaacagaaaaacaaaaaaatatgagagcgacacagattgtgttggttctgttttggttgctctgcattcacagtcccacgttgttctgcgccaatgtggagtatgatcatcgagcattagtcatcgacggcaagcgcagggtcttgatctctggttccatccattaccctcgtagtactccagagatgtggccagaccttattcagaaatccaaagatggaggattggatgtgattgagacttatgttttctggaatttaaacgaaccagttcgaggccagtatgattttgatgggaggaaggacttggtgaaatttgtgaagacagtggctgcagcgggtctatatgtgcatctccgcattggtccatacgtgtgtgccgaatggaatatgggtggtttccctctttggctacacttcattccgggaatcaagttccgaactgacaatgaacccttcaggcagaaatgaagcgattcactggcaaaattgtggatatgatc

SEQ ID NO: 18413 - DNA, 174 bp, Glycine max
  Clone ID: PAT_MRT3847_116630C.1
gggacttcaacatgttcccttttgcctgcgactatccgatgtgggacttttaacacaccccctctatctaggatgaccacaatttaggggaggtggagaagctaaaagaaaattactagtagctatataagcctttaaccggtttatatctatcaaataccacctaagatgggt

SEQ ID NO: 18414 - DNA, 432 bp, Glycine max
  Clone ID: PAT_MRT3847_116631C.1
ggctcgaggctcaatctacatacattataactggcacagacactaacaatgacggaacgataaatgaagcctgtgatgatgcacgatgcctcagggccttgccatcttggcatgctgacagctgcttaagcctctaaagcgctatcgcataccacgctattgaatgcattgctcggcacgcagactcaaagaccctggccatctaaaatatgctcgagcataccgcaaggctacggatagtctgacaccgctacatgcacctggcgagctcgacgcctagactctcagtacataccctgctcatgttatgcatgttatgtcatcatctaagtccaatgagaacttacatctgctgtacgacacctataccactgttcgtacacactcagtatcgtctgacaatgcttatatccagcttggtgcagatcgctc

SEQ ID NO: 18415 - DNA, 396 bp, Glycine max
  Clone ID: PAT_MRT3847_116632C.1
attttttataaaaaaattaagaaattaaatgcggctattatttatttgatagcctcattataaaatgttaaaaatatttgtacgaagagggataaggagatatataatgtcattcttaaagaatcatggaactgacctataaacgaattactaatcattatctggattataagggcaatataaacaaaagaaatacaatgaaaactatgtgtcgtatagatggataaaaatgagaagaaaataaactataacaaaaattcttcatttgcctgtatgaatggaaaacacagcagaaaaaatagatttataccattaaaatattaatttattccatttttcatttagtacaaattatgtattatgtttatattaaaaatatttaacttctcatgatgt

SEQ ID NO: 18416 - DNA, 897 bp, Glycine max
  Clone ID: PAT_MRT3847_116634C.1
tttatttttttttttttttttttttttttttgagtaactgttaagcggagtgccccttaaatcttaacattgctataaaacaaagatacaaacaaaatttcagctccacaaacatattcttctttatatcaaacccaatattcttctcaatcaatcccctttttccaatattttaaaaacacaaattacataaacaaatgattttagagctaaccaaaatttcctttgttttatattttcataatttttttatttttatttttgggtttacatgggagaatcttcaagtccaagttgagtgaagtgtgggctctggagggcctcttggagcagctcatgatcgtcccatgaatctcgatatgtctccaagttggcatcagagttaattaaggctgataggcatagctgtttcctccattcttctatacgtgggaaccccacattatccccgtatttgtcacagtacccaaagtttgcaatttcatgagtacagtgcttgggaatgcctgctgcttctcttgattggtagaattccttgatggatttcatcatttcctcccatgatggcaatacttttttcccggaaagcagttgagctatccatattgcttgtgactcaaagaaagggaaccctatgatctttctagggatgcctataaaagaaagggatggagcaagtgatgggggaaaagtgtgctcatacaatggccccactctgtcatcatctacaaccaccatttctttggtgtcaagaaaggggaatgcataggagtaccctgtacagtacaaaatggagtctgccaaaatggaagaaccatccacgaatgttacccgtccatcctcttgaagagtctctatctggggatgaagataaaagttggcatgtttggatatgac

SEQ ID NO: 18417 - DNA, 1018 bp, Glycine max
  unsure (1)..(1018): unsure at all n locations
  Clone ID: PAT_MRT3847_116635C.1
atgaacttgttcggttcatttacttcatgttacttgactagtggaccattttccaagaccgcagtgaattacaatgcagggtgtaagactgctatggcaaacgtggtacaggcaatagtaatggcactcacactacaatttttggcgccactatttggcttcacccctcttgttgctctctcagctattattatttctgccatgcttgggctcattcattacgaagaagtcatccatctctacaaagttgacaagtttgactttgttatttgcatggctgccttccttggagtcatctttataagcatggacgttggtctcatgctgtctgttggtctcggcgttcttagagcacttttatatgtggctagacctgcgccatgcaagcttggaaagttacctgaaattggtttatatagagacacggagcaatataatgtatcaacatacccaggagttcttgttgtacaacttggttctcccgtttactttgcaaattctatatacgtcaaagaaaggattatgaggtatattcgaagtgaggaaagctctactggagatgtagttgagcacatcatacttgatttgtcaggagtgacagccattgacacaactgctattaaaggattggacgagttaattaaaatattgggaaagaatggagttaaggttttgttcgtaaacccaaggctggaggtgatggagaagcttataatatccaagtttgttgagaaaattgggaaggagtcgttttatctaatattggatgatgcagtgatggcaagtcaatatacacttcgttcatcaaaggctgcaaataatgctcaagaggtggtttaagaagaaattcatgcctaagtagttaattaattagcctttcggttgcccaaatcaatgttgtattatagaatagtattattatacaactatatatttgtggaattgagaaaatattcgctaataaattaatgacttttcccattttttgaagaataaaaaaaaaaaaaaagagnccgct

SEQ ID NO: 18418 - DNA, 1295 bp, Glycine max
  unsure (1)..(1295): unsure at all n locations
  Clone ID: PAT_MRT3847_116636C.1
cggccgccagaagacgacagaaagggacccatttccttgatattcacaacttcttgtatgatggagaagatccagcacagtttcttgttcttccactgtgtttctctcacactatttactctttgataagctcatcattgtatgatggcgaagatccagcacagtgaagtggaagtgaagggactgaagctgcacgtggcagagattggaagtggctccaaggcagtggtgttcttgcatggattcccagagatctggtacacatggaggcaccaaatgattgctgcggcaaatgctggttatagggctattgcctttgatttcagaggctatggactctctgagcatccagcggagccagaaaaggaaaccatgtatgatctagttgatgaaatagtgggtcttttggatgctttaaacattacccaggctttccttgttggcaaggattttggtgcaatcccagggtatcttacagcagctgtgcacccagaaagagtagctgctgtcataactttaggcattcctttcatgcttcctggtccctctgctgtccaaaaccaccttctccccaaaggcttctatattactaggtggcaggagcctgggagggcagaagcagattttggccgctttcctgtgaaatcagtgataaggaacatctacactctcttctctagaagtgaggttccaatagcagctgatgatcaagaaatcatggacttgtttgacccatgtactcctctaccaccatggttctctgaggaagaccttgcgacctatgcatctttatatgaaaaatctggattcagatatgcattgcaggttccttacaggagtctcaatgtggaaactggcttaagtgacgtaaaggttacaattccatcacttctgatcatgggtgagaaagattatgttatcaagtttccaggcatggaggactatattcgtagtgggacagtgaaaaattttgtgccggacttggaaatcgtgtatattccagatggaagccattttgtgcatgaacagatgccagagaaggtgaaccagctcatcattgagttccttaacaaacaaagtatctgaatcttttgctttcaggcttaaggcaacttccttgaggtttggtgtaatatctaggcgaataataaagtttgattcgcgttatttttctttgtaacccttacagcttgtattatataaaattatttgacatggagtaatgagagaatctatttgcattatccacctctttatatgctgtaatgaaatctgcaacttcnnntcaaataaag

SEQ ID NO: 18419 - DNA, 662 bp, Glycine max
  Clone ID: PAT_MRT3847_116637C.1
cttctggaggagtgaggttccaatagcagctgatgatcaagaaatcatggacttgtttgacccatgtactcctctaccaccatggttctctgaggaagaccttgcgacctatgcatctttatatgaaaaatctggattcagatatgcattgcaggttccttacaggagtctcaatgtggaaactggcttaagtgacgtgaaggttacagttccagcacttctgatcatgggtgagaaagattatgttatcaactttccaggcatggaggattatattcgaagtgggatggtgaaaaattttgtgccggacttggaaatcatatatattccagaagggagccattttgtgcatgaacaaattccagagaaggtgaaccagctcatcattgagttccttaaaaaacaaattgtctgattctgatctatggccaaaagcacgtttcccttaatgtttgtgtgatttctagtctgcttaatccaataaacgttgtaatatccacctctgaacttctagttcatgaagggggtataaacattgcaatatccacctctttatatgctgtaatgaaatctgcaacttcatatcaaataaagtctgaagttttgtgccgagaaaaaaaaaaaaaaaaaaaaaatgaaggaaaaacaccggttgatgatat

SEQ ID NO: 18420 - DNA, 339 bp, Glycine max
  Clone ID: PAT_MRT3847_116638C.1
ataagacaacacaatgtggactcctcattctactaaaacttaaaaacacatttatagtggcgaatatttattttgtatcttatgaacgaagattattatgcagtttgaatactaacaagaaatctatacatgaaattttaaagagatatatttatttatctggacatttatattatgataactactactataaaacatttatgaaatgcttggtttaataaaatcatctctggaattcatatataattgattgttttaaaaattacaaataacttaaataagctttttaagaaattaaacatttattttataccaaaacttccgacactaatattttta

SEQ ID NO: 18421 - DNA, 400 bp, Glycine max
  Clone ID: PAT_MRT3847_116639C.1
ctccataatttgcttctattctttaataaagttcttcaaccctgaaggttcctgaagacccttcttaaggtttggtctccaaatacatgaattggagagcatggaaagtgaccagaaagttcaaatggcatctaggagtgaggtcgtgtcaagtgttgctggggtggagtttcaaggggctcctaatttgggacaaggtggtggtggtggtggccttcagagacaacctagtatgaccaagagcaattgtctttgttctccaaccacacatgctggttcttttcgttgccggcttcaccgtgcccctagccttcagaggaccaaaagcatggaatcagagtcccttcaggatcaggcatctacggttcattctttaattgttgatgcttgtgctggtgct

SEQ ID NO: 18422 - DNA, 510 bp, Glycine max
  Clone ID: PAT_MRT3847_11663C.1
tgctccatccggcagtgatccagttgcaattgacttcacggggatgggaaaaggtgaggcttgggtgaatgggcaaagcatcggacgatactggcctacatatgtggcttcagatgctggttgcacggactcatgcaattatagaggaccttacatcgtctcaaatggggtaggaattgtggaaagccatcacagacactgtaagtgttggatatcataaaagagaagagctgaaaaatgaagataatcttgagtttatgatgtcactaagacacttatcctgcagataccatgtaccgcgatcgtggttaaaaccaagcggcaacattcttgtattgtttgaggaaaagggaggtgatccaacacaaatatccttttgtcacaaaacagacagaaagtttgtgtgcacatgtatccgattctcacccaccacccgtagacttgtggaactcagatacagaaccacgaacaaaacgccggcctgtgctatcactcacttgccctcatgat

SEQ ID NO: 18423 - DNA, 244 bp, Glycine max
  unsure (1)..(244): unsure at all n locations
  Clone ID: PAT_MRT3847_116640C.1
aacccccacgcgtgcgaacaggtgagagaggacgacagaatggtgcacaagaagatgacacaccacagattgctagggcagtttttaatgcaaagagatggacgaaaatagctgagttacttgctgagagatcttaagttcttcctcttcacagatgggaaaaagancagaatccagaaccgggcaaaggacccaggacacaggacgttgaaactaggccctattctttttaagtcaagctaca

SEQ ID NO: 18424 - DNA, 365 bp, Glycine max
  Clone ID: PAT_MRT3847_116641C.1
ggttttgctttatttgttaggcaaaaaaactattctgtttgacatttttaacagataacctgcaaaagagatattatgggttatccaaaggatacacccttacacaatctaatgtcagcttgctgttctgcttgggaatttgaccttgaaacgggacatttgagagcatcaaaggggcccaaggaatgccaaggaccattctttcctgcgggagttcccattgtgcacacccctaccaccttacattaacggttgcggggcatttctcgctttcacctaccaagtgttcacagcacaagcatggtcgtttgctccgactttcacgccggaaagcctcttcggtgcttatcacacgagggatattc

SEQ ID NO: 18425 - DNA, 272 bp, Glycine max
  Clone ID: PAT_MRT3847_116642C.1
cttcccctataggctcgtcactcgttgctcttagcccacctgctattcgacgacgtggccaccggcaggatggcggaggccgcgtacgacgccagactacgagctgatccgtcaggtggtgccagaagagggcgaagccgaagaggatgacagcctgctgaacgccgagcaccagtctgcgagctataaggccaagttagccaagacctaagccaacaaggaggagcacgaccagagctagggcgacactaagtccaacagtggcagagcca

SEQ ID NO: 18426 - DNA, 416 bp, Glycine max
  Clone ID: PAT_MRT3847_116643C.1
gctattaaatgaaaaatagttggcatagctcaaaattacattttgcattcgaaacattgctaaacgtttaatcctattatcatgacaaaaaatgctactattattctttaatcagatgcacgaaggtacaagctcaaatagctaaccacttccaaaaaaccaaaaactaaactcctactcctcactcacggaaaatagtccccatctttagaaaattggcctttgagggcttgtcatactcataccaatatattgtctgctgaaattttttcatcaaataacctctttcttgccttgattgcctgcttttcccaatttatgcaacctgttatgatagaaagtagaatacattgaacaaaagcaccactttgtatgccaatccatagtccttttcctcccaatcgcaccaaaaatgc

SEQ ID NO: 18427 - DNA, 448 bp, Glycine max
  Clone ID: PAT_MRT3847_116644C.1
gaattaattagttgggcacagaggtctagtgtgtttttctgccttttgggttgggtttgaagttgctttttaattggtgtactggaagttgattcttaattttatacctgtgttgattttcagcaggagtcttctgtgtttagagagattccggtggtgatcatgtcatccgagaatggtttgacccgaattgataggtatgctcttgattagtttacacttattgaatctaatggaattttacgaagaacaatggttttattatgaactcttgaaacaatttcttaattttggtaacatttacaatttggatggtgtttgttgatcgtgtttattaagtgactagttaactgactagataaagcatcaaatgtctcatgaaagtcgagatctaccatcatattgcatacacaatctgaataatatgcggatttggatatgattgatg

SEQ ID NO: 18428 - DNA, 794 bp, Glycine max
  Clone ID: PAT_MRT3847_116645C.1
ccacgcgtccgcccgtttaaagctttttccttttttctttttaaggtaatcaaaatcaaataaaaggaaaaaaaacaacaaaaagtaatcccagtaaagtgttgattttcaacccagaaacaaactgaatgatgtatgaaattaataaatcattgactgaaagtgatgatttttgtgtgtgcctgcttgcatgtccatcacttggccttaagcccttgaatttgggtccgctgagttgtttgcagctagagtgagtcttagggctataaaaaacggttttttagagtgcgaatgtgcagagcttgaggcacaaaatggcttctgctaatgatttgacagagacagagaggagcacagcaaagagccttagacatgtggggagaaagctcctcaagtgctcttcggttcacaagcttctgcaactccttgataaattggagctgctattgtcaaccctggagcaagaaccaactaagcccattcaagaatcacttgtaccttcaatgaaagcattgatttctgacgaacttttgaggcacacagatgaggatgttaagatttcagttacatcttgcatcaatgagattacaagaatcactgcaccagatgtcccttatgatgacgaacaaatgaaggaaatcttcaagctcacagtggcatcttttgagaaattgtctcacatatctggccgcggctattaaaaagcacttaccatactcaataatgtcaataaagtccgattatgcttggtcatgctggaccttgagtgtaatgacctggttattgaaatgttt

SEQ ID NO: 18429 - DNA, 256 bp, Glycine max
  Clone ID: PAT_MRT3847_116646C.1
cacaacgcaagcaacacagagaagagaagattggtcttccttccttctgaaacgagaatcgtaatactagctttctttctcaacctctgtaaccaagcaagcataaatcgaaatattgtatagaattaggggagaatccattttgttgtttctctccttcatttcatagtaataatctctcaaaccaatacagcggtaataattaacctaaccctaacagaaaaatggtgaaggttcgcttgaacaccgccgatgt

SEQ ID NO: 18430 - DNA, 180 bp, Glycine max
  Clone ID: PAT_MRT3847_116647C.1
ggcccaagcatccatatttcatctcacctatccgtgggggaattcataaaaggtacacctctcataaaaatatacacaccaccctaacctttttgaaggttctattacccacttctataaattcattcctagcataaaagttctttcataaacgtttactaaattttacccattgacaca

SEQ ID NO: 18431 - DNA, 343 bp, Glycine max
  Clone ID: PAT_MRT3847_116648C.1
tgcaggcctgtggcagtgaatgtatggttccaggaatggcctgaaaatttgaaatggccattccttccaatttgtattgaatgatgttattttgagggaatgactgattccttttagtagttactattgtaaacagttgcagctcatttacatttcatttccattcctttgaacatgattctagcaaaccaaatgtcacttttaagatttggggcataggaattgtttgatagaaactaaataaattgtttatataaactcttcccacaaatggaaaaaaactttgaaacccagacctatttacagcgactatgtctacaagtttctctggatctatgtatag

SEQ ID NO: 18432 - DNA, 509 bp, Glycine max
  Clone ID: PAT_MRT3847_116649C.1
agacagtgtcttcttcataaaaggtgagcgtagagtatcaatcacgtttgataaaaaataccatttccatttcaaatggattacgaaatacaccactataaggtagtgagcgttatcgacgccaatcgtttcatcagttcgtggctggtcctaacctcctaggagaaggagaaccaaagctaacatatataagctaccatctttccacggctccgacgactcacaattatttaacctccacccttacgcagccagccgacttaaccttttaccaaacgaccaacttagaagccatctcccttttcccgcgctattaccgacttgactgcgaagtattccacgtgggcttcccctgcacccttcgaggaccccacaaacccccaaaaaaacttatagaacccgctgttcaaggcaaccctgaaacgttctaaccgacgcaaggcgcgtgggcgtgcggcgcgtggagctcaaccttcctcgatctacgcgatggtacctaacccggggtg

SEQ ID NO: 18433 - DNA, 528 bp, Glycine max
  unsure (1)..(528): unsure at all n locations
  Clone ID: PAT_MRT3847_11664C.1
gagagttttcttatcaccttagctcgaatcaatggcctaccaaaactccatccccttctatgaaaaatactggtacaagcacaattataaaagggtaacagatagcttgcttttaatcctcctcttatcgctgcttggttaccgcgttatctctatcaacaactactctttattcccttggtttgttgcctttttatgtgagtcgtggttcaccttctcttggtttttaaccctaaccactcaatggagtccagcagtaactaaaacctacccacatcgtctcttgcaaagtgttggaagaacttccaccagtggatttgtttgtgacaacagcaatcctgaacttgaaccaccgattatcacagtgaacactgtgttgtctctgttggcactgatacccactccacaactacttgttanttcctgannanggtggtcccccccgtacttctatgccctccaggaactcnccattgcaaatttnggttccttctgtaaaatacanttcaattaaacccatccaaactc

SEQ ID NO: 18434 - DNA, 744 bp, Glycine max
  unsure (1)..(744): unsure at all n locations
  Clone ID: PAT_MRT3847_116650C.1
attcgagctctttacccggggatcctctagagtcgacctgcagcctacttcctgcctattggtcccttcggcagaaggtaattcttgttgtctttccttttgttatctatttattatcccaattatttgagtgtattgtgatttatctgcccgcatacagaaattgatggaactatttaaaattatatattaacttgaatgttgaggataaataattctagatatttaagttaacacaacaaggagacaaaagatttggattctcaagaagtagttatatgcttgattagagaatattgcatctaaatctaattttttaacaaaataaattggctttgttaaatagattttgtgttgaaatggaacttgtgatttcctatttgcaggcatttgcagaatggattttgttcacatccagtggcattgctagtgggctatatcatgcatgtgacgttggcacctggtgtgcattgaactttaatgttttacaggttactgctctcttcctttagtggtctctcttacttgaatagctgtgacaagcttcaacattgttctgtgacctgagttccaaataagattctcattcttaacgggattattttatgctgtgaattactcccaggaccttgggtgtcaatgatagtagcatgtataaacactcggatgaaaagctaaaatcacttagaaatgtgttttagtttgcattttcattntgctgttttcattttcaaaagaatagaa

SEQ ID NO: 18435 - DNA, 443 bp, Glycine max
  Clone ID: PAT_MRT3847_116651C.1
cgacccagcgtccggatttgttcctgtaaaaaaaaaaaaaaaaaaaaaaaaaaaaaaaaaaaaaaaaaaaaaaaaaaaaaaaaaaaaaaaaaaaaaaaaaaaaaaaaaaaaaaaaaaaaaaaaaaaaaaaaaaaaaaaaaaaaaaaaaaaaagaaaaaaaaaataaaaaagaagagaaaaaaaaaaaaaatggagaaaaccaaaataaagggggggggagggaaaacacttttgggaagcaaaattaattgctaggagggcagaaaataattttttttatcaagagttgtacaaaataaaatggagattgggacgttttcataaaagggggtataaaaaaaagggtggtggggaggaaacgtgcaggggagcgaacactcgcgaggggcatagggcacgctcattaagatgtctacccttgttttctccctaaaaacgggggt

SEQ ID NO: 18436 - DNA, 431 bp, Glycine max
  Clone ID: PAT_MRT3847_116652C.1
ggctcgagccggctaccatgtctatgtctctttcttagtgcctgcctgccagaagttaaaatggccgaagaaactttcctattcacatctgaatcagtgaacgaggggcaccctgacaagctctgtgaccagatctcctatgctgagctccatgcatgcttgtagctcgaccctgacatgaagggcgcctgctaaacctgcaccacgaccaacatggggatggttctaggagagatcacaacccaggccagcgtggactatgagaagattgcgcgctacacatgccggaacattggctttgtctactgatgatgatggccatgactctgacaactgcaggggcctggtcagcattgatcaaccgagcgctgatactgctcaaggtgggcacggccacctcacctagaagcctgaagagattggagctggtg

SEQ ID NO: 18437 - DNA, 384 bp, Glycine max
  unsure (1)..(384): unsure at all n locations
  Clone ID: PAT_MRT3847_116653C.1
ttcttcatcaacatagcgtattgcagtgttataaaaatcaanntccttcttttcttccttnctacaatttttgtagcatggcaattccatgcttacgatatgttccctctccgaatgaacactggctattttgcccgtactcctgaggtgaaatgctcaacttggaggctttcttttgaagcacacaacatcttnttcttttagaccattcctgaatagtgcgtttaatcaacaaaggaatacattcattgctaacaatatacatcatactccaaaacatttaaccaacaaacttacttttatgccatagacctctaaatccatcccaaggacacatttgtgttcagtatatattgcaccgtactctctaatattccatactac

SEQ ID NO: 18438 - DNA, 252 bp, Glycine max
  Clone ID: PAT_MRT3847_116654C.1
cgcgtccgcaccaataacgcaagaacataaaggccctactcggcgtgtatatatgatttgaataccggagcagcgtgaatgaaaaagaaaaacggcttttcctattattttttttttcctttcctctgttttccttttgtatcgctccatttcttttttttatcttttcatcgatgtatcacccaccttttcccatacatctatttttcttttccattctttcaccacagttgaaattaatttttttatttc

SEQ ID NO: 18439 - DNA, 101 bp, Glycine max
  Clone ID: PAT_MRT3847_116655C.1
tttcaaacgtactaaggtcaaacatttacattggtaaattaaccttgctgctctcacggattcaagttcacatatacgtacatggaacgtaaaagtccttc

SEQ ID NO: 18440 - DNA, 251 bp, Glycine max
  unsure (1)..(251): unsure at all n locations
  Clone ID: PAT_MRT3847_116656C.1
cgagacacctattccatnnnnnnntttgtgaatgttgtttctcctgattcactcacctatgactgcaaaagtccaaaagcctcttccttccttcgacaatctcgtcaaagaaatcatcaagctgagcaacaatgttgtctgccccagatctgagaaccccaaaacaggctctgagattctccactctctctctaatagcaacctcactctcccactccactcccccctgagaccctcttctctctaactcc

SEQ ID NO: 18441 - DNA, 300 bp, Glycine max
  Clone ID: PAT_MRT3847_116657C.1
attttaacacatgactcaagtattcgatatttgcaggaaatatataattcaaataatcaaaagattgttaacctgaaagagaaggtagcccagcttgaagcacagtgccaggaaccttgcaaagacacggtgcaaatccatgatatcactgggaaagattgtcaagacattgccaataagggagctaaacagagcgggctttactttattaaacctctgaaagctaaccagcaattcttagtctactgtgaaatcgatgggtctggaaatggatggactgtgtttcagaagagacttgat

SEQ ID NO: 18442 - DNA, 1309 bp, Glycine max
  Clone ID: PAT_MRT3847_116658C.1
ccgttccctcctatcttcactccctgacgtccaccgcaacccacaccatatccccttcgcctgcgtcatttccgcctctgtggcatcttcatatttcaaaacttttgcgaaatttctatcttcttcaccttgctctcaccttctgggtaatgtttgaaacttggtgttagctgagctgtttgacaaaaatgaatattgcacaagttacagcatggcagcctgggatttgtgtgaaaaatatgtctcagttgcaccggcttcaatctaaaccatgtgttataccaaagagttttggtcctctcacttgtgttctactgagcttaagagcaagacaatcgtttagctcgaaatgttggcccattttacaatctcggaaacctcttcatatttgcttagccggtggaaaagggatgatgggaaatgatgagaattccccatggaaatctattgagaaagctattggaaaatttaagggagaatcatcaatagaggatgtattacggcgccaaattgaaaagggtgtatattatgacagtggtggtggtggagtgaaaccaccaggaggcgggaacagtggtggtggccctgatggctctggtgaatcagaagaagaaagccttgctgggatgtgggaagaaaatatccaagtgattttagcgacccttggctttatatttctgtacatttatattctcactggggaggaactcacaaagctagctagagactatatcaagtatctatttgggggaagccagagtgtccgactgaaaaatgccatgtatcaatggggacaactctatgaaagcatgacagctcagaaagaagaggaagacgagtattggttgcagaaggccattctggatacaccaacttggtggcacgaccctgctgattaccgtgaagcccttaaaaactacttgctatcaggtacagatgaggccattgccgccaggaattacttagaattagattcagatgcagacgttaggtattgcttggaatcagatgacgaagaagatgaagatgaagatcaatatcaatataaagatgattatgaagaaaagtttgcctagagtccggagcaacttctattgctcttcatctattttcccctcctcaagtttaataaagctttgtatacgttgtatcatcatgcttgtagtgtattgccctttcttgcatttgtttttcccacaatactaatggaatcatgacaacaatttgacttttatatgaactgaagttgtttctctataaatatttggagtccatttattatcattcattgtgctaattttttctcaat

SEQ ID NO: 18443 - DNA, 337 bp, Glycine max
  Clone ID: PAT_MRT3847_116659C.1
cgtgaactctctgcgttgatcgagctcgagttgttggcttgcttccgggagctctgaaccggaccgacatcggtgggacatcaaaaccctgcaacggaaaaatggcgttcttgttgaaccaaactagtatcgcttacacattttcgagctaactctcagaagaatgaagattaggcttcttttactagccgacgattccacgtcaaaccattggctcgcgagaaatctctgttggcagatgaagcaactctgaaaccgttcaaatcgtacaagaagagcgttaaaaagcttagaaaaactgggaatgcccttacaattgctgttgctgcacgatgct

SEQ ID NO: 18444 - DNA, 282 bp, Glycine max
  Clone ID: PAT_MRT3847_11665C.1
acttaaagttttatttggggtgggtttctgacacattggttcacgctcttaaaacattcctgaactaataaacgtacaatttttccttaaaatgggacgtatgagaacgaggctgaaacattcccttatacattaatcggggtaaatagagatctcccataaatccatcccaacctcaaaaaccgtagtggtaaaaataatgcccatatagtctgaattgtggaccaaatgatattaaaacagtgaaccctttcattcacaatgagatatgaaaaaagccaa

SEQ ID NO: 18445 - DNA, 341 bp, Glycine max
  Clone ID: PAT_MRT3847_116660C.1
ccacgcgtccgcccgggcattgagaaggaagaacacctggatcgaaaatggatgtactgttctaggagttatactccacctctccgaaataattatcttaattctgaatctgttaaaaaaaaaaaaaaaaacaccaaagagaaaaaaaaacaaaaaaaaagaaaatataaaaaaaaaaaaagaaaaaaaaataaaaaccataaataaaaatagaacgggggggccgctttaaagtatccaaatttacgaacgcgggattgcaactgaaaagatcttttatagtgggacccaactccaatacacgagaccaaggttttacaacaatcatatacggggaaaaa

SEQ ID NO: 18446 - DNA, 560 bp, Glycine max
  Clone ID: PAT_MRT3847_116661C.1
ctcaatttttaactagcgagagagagagagagagagagagagagagagagagagagaggaagtgagtgagcatcatggattcagagaccagcagaggttccttcgacggcgaaccatttgcaaaaggggatatggccgcttctcactgatgatctttgatgagcatttaatggctttggatgtgcagatgcccacacaacattcgttctttttcactattgcatgaccagaaattacagctaaggccgactcactatacttgggcagacaagggacaaccatactcatttacacgtcttccaattttattaatagccactttagctagcctatacttccacttgcagctaaaacaccctaatgacaataccgaaagctcggctgggattggtacgattcgcatcatggcaaagaccattgtttgcaactgaccctcttgagataatcactatcacacagctctctttcattatgctgtttgatacactattaaattggaccttgcgcttctacatacatgacatgcttgcaagcggggtactatatgcacgtaacgaaag

SEQ ID NO: 18447 - DNA, 399 bp, Glycine max
  Clone ID: PAT_MRT3847_116662C.1
gaaaacgaaaatctctttattcttcgagcttagagacaacataaaagcttgttcacactgttgaaagggcattttctacaccttaccggagaaaggtaccctcgcaaaagtatatacagagttgccagggagcacactccgggagagttgtccgctttttggggggtggaaaaacctatggtgcatcctcttaaaaaatcaaaaaatgcttggttgcgtttcctctaaaaaactttcccatgggagacatcgaccgtctcttgttttgttctgcttgaggacaacaaatagttttaattttaggtgcgcacgcgcgttattgtggggaccgactttaatggtgtaaaatggtttttggaggtcccaggggccgaaatttacacaagtgtggggcggggg

SEQ ID NO: 18448 - DNA, 277 bp, Glycine max
  Clone ID: PAT_MRT3847_116663C.1
aaaaaaacaaccacacacattcctcattccatccctctaattatcacattatcgccgtacacattcattcttccatcgtttcctatctctctccctctctctctactcctctctatctccatacttattctacctcacgccaaatataaacacatttacagctccaaccaatgctaactgctgaacctacccacattgatgcccatgcaagcctcctacacaaacatcctacaaatgtttctgtgttacgtggcccacccatatgtaaagggtaccc

SEQ ID NO: 18449 - DNA, 181 bp, Glycine max
  unsure (1)..(181): unsure at all n locations
  Clone ID: PAT_MRT3847_116664C.1
gattcnnttggaatggggtctttggncngaacaataaannnaaaaaaataagannaaaaagataaaaagagccggcccgcttctttagaggagtccaaacgctttacgtnnacgcgtgcattttgcgacgtacatagctttcttctataanngtgtcacctannaattcaattcaactcgc

SEQ ID NO: 18450 - DNA, 664 bp, Glycine max
  Clone ID: PAT_MRT3847_116665C.1
ggttcgttcgcttgcgttcatggcggaagaagaatcgaatcctggatcccctcactctctgaagaacaggctcagattctctctctgcttctcgtgttgcttccctcatcaccagcgcgtgaggccgagaatcgttcgaagcgcctcccgccacaacaagccacgctccaccgatttccccttcccgcaactcaaggaaaagtgctgcaacttcatcaaccgcataggcggccgccaccgccgccgccactccgccgacttccactacgacgcgctcagctacgcgctcaacttccaagactacgccaccgccgatgagaggcacgtggacgaactcaagagtttctccgccagattgccggcgtctccgccgccgaaagtttcgccaacttccgccgcaatcgcaatcgcctccgcgtgaatcggtagatctaaaaatatggcgaaacggcgtcgttgggaagtagtttttttttgtttaattcggttttgtttgtagataacctgataacgtcattgtgagatccaccaatgcaaatgcaaacaagaggaatatgaaaaggcaaaaaaaggttaaaagtgagaatgtgattatgcgtgtttgttagttggatattttgcgtagtgtagcattgatatttgaggggaaaaaatagtgtgaagt

SEQ ID NO: 18451 - DNA, 583 bp, Glycine max
  unsure (1)..(583): unsure at all n locations
  Clone ID: PAT_MRT3847_116666C.1
ctgacagtgacagtgacagcagcgatagtggaagtgatagtggaagccacagtaggagcagaagcagaagtcctactgggacagggagcgggagtagtagtgacagtgaaagtgatgcatcttctagcagcaaagagggacaggagggatctgatgaggaaatagatattatgaccagtgatgatgaaaaagagtcaaaacaaaaaacagaagtctctgaccaaaggatgcccttacccattccagtaaaatctcctgacggaaggtcaatgcagaatgtggttgatgagaagcaggatggcaatgaatctgatgcagttgaaattgaaaaggacttacctgaggaacaggggactgaaatggctctacctccggctaccatttctaatagaggtggaaaatatgcagaagagacaagaccgtttccacttgactatcaacagctccaggaacgccaaaattatatagnggagtttgtttgatgaaagagaaaatgaagttaaagatagctccaggcatgaacagaatgacagctctaataggttttccaaaggtaaacataagaggggttctgatgtgaaga

SEQ ID NO: 18452 - DNA, 406 bp, Glycine max
  Clone ID: PAT_MRT3847_116667C.1
cctgcaggagccgggacggaaggtatattgctgggtcgacgtgcatactagacggcggacgtgcttttttgggtttttttggaaaaaaaaaaagcactaaagtctgaacgagaacatgatgtttaagcattcagcaagtgagagctttgcgacgataattgctaaaaatgctttaagcaaaccgaattaaattctacatatttctagaaatggcaacacacaagagagttgatggggactacgagaaaaaatacagttgcaatgactatatgtgagctatgaccctaaaccgacgagttagaagtcatgttcagcgtacatgttataaagtaagcgtatggggaagatgttctattatggcacatgtgcgtgaaacacagtggcggtgtagggaaggcaaatgcat

SEQ ID NO: 18453 - DNA, 209 bp, Glycine max
  Clone ID: PAT_MRT3847_116668C.1
atggtttcaactcattataaacagaaactgtcacaaaatctagatttgttggatactgaaatttcagatcattcttgtaaaggagttcaacaagatgttctagatgaacatatggaaacaattgttaatgtgatggatgagtgcagtcgtgtggatttcaaactaaagccaacgtgtttgcaatctaattcatttgctgagacagaaaa

SEQ ID NO: 18454 - DNA, 515 bp, Glycine max
  Clone ID: PAT_MRT3847_116669C.1
gagaaataaagaaaccgagaaaagacagcgatgcaaccaacgctccctctcctccttgtacgctttcacacacatccctaccttcttcatcctcgttcgacaatcttttgaacaaacccttctttcttctcatcatcgccttttcttttccaccgccactttttttttttttcaattcgcttcatttctggcaaactgtctctgtcacacacccaataattgaactcaccgaaccaaacccctctctctcaatcaccgaacagcaatttcttcactctactcctttcaagtttagggcttttcccacgtgctgccccaagaacactgatttccagggataatccctcaggagcttggtcctttggggatcgaagagggtcctatactgtgggcttctgtgtttgaggttgttagtgacttggatggttccatgatgtttttccttcatgggagggagaagggggtgaattatgtttatccgggttcggtcaaggttgcggacaggtcctgcaatg

SEQ ID NO: 18455 - DNA, 228 bp, Glycine max
  Clone ID: PAT_MRT3847_11666C.1
tgggttctagtgtgacattgtttgatgttggatctcgatcttcttcttttgacggtctgagttcgcgttcgttttttatatcacctgaaaatgtgtttctaccttgtgaactacggttgcggaagctcctgcaagtgcggcaacggctgctgatgctgcaacgatgtacccatacttgagctacactgagtcatcctccaccgaaaccttggtcatggtgagtggcac

SEQ ID NO: 18456 - DNA, 1662 bp, Glycine max
  Clone ID: PAT_MRT3847_116670C.1
cggaattcccgggtcggttcttacaagaactgagttctgttcaacataccaaagaatcccctacctatagctattgagagagggtgtgtttacactttggaaatggcagagaaagaagtgagaaacaagcagttggtattaagggactatgtcactggctttcccaaagaatctgaattatatgtgacttccaatggtaccatcaaactgaagctagaaggtgactccaaaagggttttggtcaaaaacctctttttggcagctgatccacacctcaggcccttgatgaagaaagctgataaccttagtgttttgcagtccttcacccctggcttaccactgtatggatatggagtggctaaggttgtggattctaggcaccctgattttgaagaaggtgactttgtgtggggcataactggatgggaagagtacactatcatctcatcatttgaacacttgttcaaaattcagcactctgatgttcctctgtcctattatgcagggatccttggaatgcctggtttaactgcatattctggattctttgaggtttgtgatccaaagaagggggaacatgtctttgtttccgcagcagcaggtggcgttggtcaacttgtgggccaatatgcaaactcatgggttgttatgttgtggaaagtgctggaagtaaagaaaaggttgatatgctgaaggataaatttgggtttgacgaagcttttaattataaggaagaacatgacttggaagcagccttgaaaaggtactttcctcaaggaattgacatatatttcgatcttgttgggggcaaaatgctggatgcggctctcgtgaacatgcgagtccatggtagaattggagtgtgtggagtgatctctcagctcactctaaaggagcctgaagcactgaaaaatgcaatgtgtcttgtttataagagggttcgcatgcaagggttcaatgtggttgactattatcacatttatcccaaattcttggaccttttgctgcctcaaataagagaagggaagatatcatgcttggaagacatagttgagggacttgagaatggcccacatgcattgattagagttttcagtggtcacgccattggaaaacaagtagtttcagttgccaatgaataacacctttctcttacctttttttcttttatttctttggacactgtgtgaaatttctcaaacaaaaataaaaagtaagcctaggagttctttttactttaatttcagtaaagaaaaggtactttcctcaaggaattgacatatatttcgatcttgttgggggcaaaatgctggatgcggctctcgtgaacatgcgagtccatggtagaattggagtgtgtggagtgatctctcagctcactctaaaggagcctgaagcactgaaaaatgcaatgtgttttgtttataagagggttcgcatgcaagggttcaatgtggttgactattatcacatttatcccaaattcttggaccttttgctgcctcaaataagagaagggaagatatcatgcttggaagacatagttgagggacttgagaatggcccacatgcattgattagagttttcagtggtcacgccattggaaaacaagtagtttcagttgccaatgaataacacctttttcttaccttttttttttt

SEQ ID NO: 18457 - DNA, 1127 bp, Glycine max
  Clone ID: PAT_MRT3847_116671C.1
cccgagccccgtttagctttgctactcaacattagttgggaattgggtgtccgacagagagaaataaagaaaccgagaaaagacagcgatgcaaccaacgctccctctcctccttgtacgctttcacacacatccctaccttcttcatcctcgttcgacaatcttttgaacaaacccttctttcttctcatcatcgccttttcttttccaccgccacttttttttttttttcaattcgcttcatttctggcaaactgtctctgtcacacacccaataattgaactcaccgaaccaaacccctctctctcaatcaccgaacagcaatttcttcactctactcctttcaagtttagggcttttcccacgtgctgccccaagaacactgatttccagggtttgttcttcccccacccaacccttttcgtttttctctatttctaatcatgggtatgcgctgaagtgtggaaatttttaatttttattttctcggatcggcatggaacccgaacatcatgattcttcgaacatgcttttgtttcttcccgatgatgttttcgccatcgtttctcggttcatgtcgccgagagatgtgtgcaatctttgcctatgctgcaagagcttaaacgctcttgtggcatccgagaaactctggctcacgcaatgtgacttattgagcacagtgcctcacaaggaccttgtggaatggagaaagggtgtggcttcttacaaagcgctttgtcgttttctgatgagtgtgaaacctttgattggaatatgggttcatcaaaatcctgagcttgggaacgtggtgtatgtgatgccgggttttgtttctgttgttgggtgcaggataatccctcaggagcttggtcctttggggatcgaagagggtcctatactgtgggcttctgtgtttgaggttgttagtgacttggatggttccatgatgtttttccttcatgggagggagaagggggtgaattatgtttatccgggttcggtcaaggttgcggacaggtcctgcaatgtgctgttgcttgaggttgaacccgggggttgtaggaatgttagtgctttgttgcaaaagaagatgtttgtgcaccactcgggcgtggaggagtcttcg

SEQ ID NO: 18458 - DNA, 266 bp, Glycine max
  Clone ID: PAT_MRT3847_116672C.1
aagtaatgattgtgttgatgaggaggattccttgcgggaagttaaatttaagcgcgggcgcttaatgccgatgagggatcgaaccatacgccaagaaatgcactggccacaccaaaagattactcacaaaggccaacaagcaaaagtggtgcaacaagccaaaggagaatggtttcattaccaaacaagtcattagcaagatggcacaaatgacaaatagactctgcggcccccacgaaaaattgacccctgaaaggacacacccc

SEQ ID NO: 18459 - DNA, 455 bp, Glycine max
  unsure (1)..(455): unsure at all n locations
  Clone ID: PAT_MRT3847_116673C.1
aatacggctcgagaagaattcgactacagtttcttgctccattgtatctttcctcgttattcagtcgccattattactgtcaccttggtcacctcaccaaagcacctatgatttccctttttacgatttatttattttttgttcatcatgatataaaaataaaaaataaaaaatcatccagaatcggatttcagtgaagaaagacccaaaacgatgaagaagggcgaaaataagggtcggactcggaccttcccggtggatccgaatgttccccgatgggtttgccagaactgccgcaaccctctctgcatcgtaggcgccgattcttacgccgacaagttcttcaacgatccttctcgctacgggatgcaagggtcgtccattcacgttgccagcagtgtgctgagtacgactaaaatggacaattcgtatgtngtgttgcccaagcagaaacc

SEQ ID NO: 18460 - DNA, 203 bp, Glycine max
  Clone ID: PAT_MRT3847_116674C.1
aatatatgggacacaaaatgaggggtggggtacaaaccggacaaagccatccaataactaaattttgtcactgtcacctcaaggaaaggagtcgataaaaaattctccctgatacatcgctgactatattaagataattactcactattcttcacaacacaagggatgctgttatccattacaagtgttgtaacagcatttta

SEQ ID NO: 18461 - DNA, 500 bp, Glycine max
  Clone ID: PAT_MRT3847_116675C.1
tttttttttttttttttttttttttttttttttttggtcttaatttttttgtcttaacactattggtgtaaacctggttgggaaagaaaattaacccgaaaaacacataatacccacggggtcaaagccatgggcgcccaaaacgaggccagccaaaaaaaacccagggaaacaaaacgggggctgcaagcaaaaaggaaaattccccaaagggaaaaaaagcgcccgcagaaagcaggcccaaaaacggcgggcaaaaaaaacctgggaaaaatagggtgggaaaagaggaggccaatgccaaggatgccctggaaaaaaaaaaaccgaagccaagttaaccccaacaaaggttacccgttttgaaccaaacctccccgcaagttacagagaaaaaggttcaactgggaagcaatctaacacaaaaggggcccacccatatggggagaggacaaatacaccccagagctcaacccccggcccctggctgccaatttgac

SEQ ID NO: 18462 - DNA, 262 bp, Glycine max
  Clone ID: PAT_MRT3847_116676C.1
ggacttggtgctaactagattgaggatagtgatctttgtcttcgccagcaacatcgtccacgtggaagaggagatcggggggagcctgagatagcggagcttttagaggccgcactttttagttgtggtgtgtgagattttgatttgatgggaaaatatcttgacgctgcggccaggctggcggagctgtcgcggattgtgtcagctgctggcggggcccagcaggccaaagagagcgctacccagattgcccaaccgtgtg

SEQ ID NO: 18463 - DNA, 186 bp, Glycine max
  Clone ID: PAT_MRT3847_116677C.1
gtcgcttcgcttttcactgcgattggaatgcttcttcagaatatatgactcttgatggagggattgatcaggtgtttatgaggatagtagctcttcgatgtggtacccatgtgatagttatgcatcaggctggtccatacgcatcgcgcacttcatcatcaccaatgtcttactggaatggacatc

SEQ ID NO: 18464 - DNA, 172 bp, Glycine max
  Clone ID: PAT_MRT3847_116678C.1
caaaatcatctacccatctaaaacacaaggcacagctcctctgctatattctaattcaccctaatgagggacctaccccttcacctatcatggctccatctcctatgccaggagagactgataagtctataccttgcgttttcatccctaccaagtgcggcaaacattggac

SEQ ID NO: 18465 - DNA, 507 bp, Glycine max
  Clone ID: PAT_MRT3847_116679C.1
tggggggggggatacgttgaattaagaaattgagaagagaagaccgggccagagccggggcggcgattagggggtagtaaggcatatactgcagtgaatcgggcgagataattacacaacccgaaaaaaagtagacaagggggactggatagtgatagaaagcaaggagaggtagtaagtcgcaggcaccgttcggtgagcaaaacatggaagagtgccgcgagaagccccgtggtggtacagcccatatcatgcaacagtggcgttgtaggtatagtagcgtgcgtagcgaataaagataaacagcgtagaactatgattggagggcagtgggttggaaaaaagagcccatcaaaggcaaaagagtccgggattgcagcgctataggtcaaccttagcgatgggcaaggccgtagatagagcccctaaactgctaaaacattaaggtcaggaccgaagaaccgtagacaagagtagaatatagataagttgcagaggccatagaga

SEQ ID NO: 18466 - DNA, 791 bp, Glycine max
  Clone ID: PAT_MRT3847_11667C.1
cggaattcccgggtcgacccacgcgtccgaaacctcagaaaaaggtcttctcttctctctttccctcactctcagaatctcacggtactaagctccgagttcttgcttttaatttgtctttttaattttgtaagttcactatgataaatcctgaacctttctgctctcatgcaatttttattttttattttttcagtttatgctttttttttttttttttgcggttgattgtgtatgatttcgagcttaatttggccattggagtatatgggtattgattgattgaaaccccatttgaaaaaaaattgtgctttattgacaagttctttgttttcttcttaattttcaattgggggttggttacgccttctctctactgttactgtctccgaggttatgattcatgataagttttctttgcatcatgcatgaattttgttattcctttattcaccttttataaaaaaaatcctttaaggaaaaacttgatttcatttcaatttgtttattatgatgaatatgcagagtatttccccccctattgttactgttggacctaattccttaactgttctttgctgtgctgatggccggatatatggcttttttgtctgaggaaattgttgtgttgggtaattttacactgatttctagcatctggtttaacgggttcattcaattgatgatttgcactttgtgatctgattgtgaaattagggatgcttgcaacacaatttctattggttaatgtttgttgaaattcacaggattactagtgaaagtcattacat

SEQ ID NO: 18467 - DNA, 298 bp, Glycine max
  Clone ID: PAT_MRT3847_116680C.1
gttcttggaacatgagctcagattttctgacaggcgaggaaagggaaatctacatgcaatgcctcgcccacctggatagttcgccatccttcagtgctcacttcctttaggtcactgatgcacattgaggctcctttagcaatctcaaaagatggcccggggctcaagccaagcaaatgtactaaatccttgctcggccacggggagggaactacatgagcctccatcttttggattgatcatgaacaagttcttttcacaatcatatctttcaagtgtatggtatagaatgggttcc

SEQ ID NO: 18468 - DNA, 142 bp, Glycine max
  Clone ID: PAT_MRT3847_116681C.1
cggacgcttgggttgtgctgctcatcatcaagtgtcgctgcgatagtatggcttacttaggtaatcgattgcattggaatgtcagactagatggtaagcatatgtgtatctattatctggccattgttggaatgccctttga

SEQ ID NO: 18469 - DNA, 672 bp, Glycine max
  Clone ID: PAT_MRT3847_116682C.1
gcacgaggtaacgttccatctctttccctctcttcaaaaaccatccatcgcaatctcattagtcatcactctctctctctctctaaggcaatgcccttttccttctgcaacgtccttctcctttccactcccttcctttaacaacccctctctcaccaacaacctattccgtattgccccctcatttcccttgctagcatccaaaaatagaatagcccgaagcagaagaaagcttctctgagaagaagtgaagcaaaacaaaacaagaaaagcatgatgtcgagaataaacaacaacggcgttgcctggatgggcgaacgagaagacgaaaactctcgaaaccacaacatcatacccaccgacacaaccacaacaaacacaggtttcgtcgaaaccacaaacaacgacttaggttctctctgcgccttcaagcccatgctcgacgtcgacgacgaatggtacaacaacatcaccaaccaccaccaccaccaccaccaccaccacgacatgaccttcgaccccgacaacctcttactccacgctgccaccgccgtggactcctcctcctcctgctccccctactttttccctcccaatcccaaacccccctttcttgtcaaccccttcgatatgggctttcttgaccctcaagcttcttcttctccctctcta

SEQ ID NO: 18470 - DNA, 497 bp, Glycine max
  Clone ID: PAT_MRT3847_116683C.1
ttggacagtatggaagagaacctcgttgaaatttttttaaaaaaagcgcgggtgccccccaaatatggggtcatatttatagaagaaaaatagaaatgttgaataaaatgaagcataatacattttatcattttttttttgtttcattgtcttgtttaaagcagcaataactggaaaaggaacacatttcctcctactatctaaacagggatattaattatgaattccccatgcataagtaaccacgacgacccagatgtccatcttcaatcttggttaagagtttccatcatgtggatgctgctctagaagtaattgctccagttccttctcatatgcatcgtcccctaatcctgtttgtttataaaatgtttgtttctgaacgtgccagtcgttagcaaccttctccacaacatctcctatcagttccttatctttttgtcagtgctttatgggctcagcgcctcaagtattgctggactctttgatggccccat

SEQ ID NO: 18471 - DNA, 343 bp, Glycine max
  Clone ID: PAT_MRT3847_116684C.1
acgcacaccttcccaactttatatatagagccattttccgaatgttttggaaacaccacaacaaggtcccctcttcactttctataatctgagagggttctgctgtatcttatgggacttgctcacagataaattctttaggaaagggcttgtacacaccttgggaacaattattcttgatattcagcctcattttacaacaccttattagcaaacacactttgttggaaacagaacataactatattagcaaagacatcgtactagcagattttttctcaaataaacaatgtaactcaagccatttaaatacaagtttatcagcaagcacaccaaaaatttt

SEQ ID NO: 18472 - DNA, 315 bp, Glycine max
  unsure (1)..(315): unsure at all n locations
  Clone ID: PAT_MRT3847_116685C.1
ctgacatctaggttgggatcccagcatcttgtcatgatttctctttataaccgctaggcaatcnntaggtatgattttacaaacatgggtgtgggcaacttcaaattccgcctgtactgctgtcattttttgaaatttaatccatctacttttatatttctctttatctctttctcctattttatttttatcttatatttatacttttctttttatcatttcgttttctttcttatatttttttaatcttatctttttattttcctttatcattttatttcttttatctcattttttatttttatttctctcttt

SEQ ID NO: 18473 - DNA, 187 bp, Glycine max
  Clone ID: PAT_MRT3847_116686C.1
cacttcttctttcatggctctctcatccccatccttggctggcgatgccgttaatctgggcccatcagtcccataactgggaagggtgatcattaggaacaccgtcgcctatcaggactcctcaagaatcccatagtactgcccagaccgtttcaattacttgggcccattctctggcgaactcccc

SEQ ID NO: 18474 - DNA, 347 bp, Glycine max
  Clone ID: PAT_MRT3847_116687C.1
gcagagaggtattggtttgttgcactgcccacattcaattatatataggtcatttttcttgtagtgcggttctcttgattcatacaatgaaagcttctggacacaactaaatctggatgacatttcctacaatgtaccatgtgaaattgtttcaaaagatttcaatggctcttttcaaagtacaaatgctacccagatccttgattcttgtgcaatgtctcctacaactagcgaaagtaatattgttctggataatgactttgtcgactttctggatgcatacgaagatgcaatggttgataacctttggacagagtcatatgtagctaacatgttccacattccaa

SEQ ID NO: 18475 - DNA, 835 bp, Glycine max
  Clone ID: PAT_MRT3847_116688C.1
ctggagtcatccattccatcttccagtcccacccaagtagcctcgatgatataaggtccttaatacttggtccattatggatcctgcatttttcagctatcagcattggcccccttacccagtccatgtttcatgagggatcaaagttgaaagaaggaaagccaactaaagaaagtcaaataatgtgaaaaacaggatcgcaagtctcaggttcagtactcttgttttattgtttttccacgtagaacctccggatcctgtgaagattttgtagttatgatccgcatccgatcgctttggtttcggtttttaatcccgtcaaggtttcttccccccaaacagctccgccagcaccggcgtcgtagccggcaacagcaacatgctaaggttccgcacggacgatgctccggggctgaagatttcgccgacggtggtgctggtgatgagcctctgcttcatcggcttcgtcaccgcgctccacgtgttcggcaaactctaccgctccaaatctggcggcaccgtttgatcttacgatcctcttttggatttgtagttctgatccgcatccgatcgctttggtttcggtttttaattccgtaattttgttaacacttgctattttgttgtagctgtggaatcaaatcgttgactgtctacttaccgtggttaattttggctttggccataaacatcgatctgtgtcgtttatttaatcgtgtatgtatattaatgagctaggtttgctattgttcctttttctcaaaggaatttgatggtttcttttgcacaagttattaatttgatcaaagtttttttcgggcttatctagaggatc

SEQ ID NO: 18476 - DNA, 272 bp, Glycine max
  Clone ID: PAT_MRT3847_116689C.1
ggctatgacctacatactagttctatgctctatctccttctcctgtggatggtaaagcctcatctccattgggaaaataagggcacaggtagtgggatggccaccaatttgatcttttggaaagaacacgttggcctctaatttacaaagaatgatgatgaagcagaatttaaatcagggtgtctatatgtaaaggatgttcaccatttcatgtcacctgtcggtgactaaggataatgacaggttctgagactattggaggggctaaagac

SEQ ID NO: 18477 - DNA, 300 bp, Glycine max
  Clone ID: PAT_MRT3847_11668C.1
cacacacttgctctctttctctttctaagctctgaccccaatttctgtggcggctctctctctacttattttctcttctgagattgagatttggatccaccctcttccccttctttcggtctttgatttgatcttttccttacctttctttgggtttgggtctgggtcttcagcttgaacttcaacaacaacaaaaaacattttgtttttacccaacaacagccacagccacagcttcagggtcagcctcagcagttgacaccacccctcttacaagatgagggcctgaagaggaacacc

SEQ ID NO: 18478 - DNA, 2479 bp, Glycine max
  Clone ID: PAT_MRT3847_116690C.1
ccacgcgtccgggatgattgtagtggtgggtcattagaaagcccgtgtggaatgggatatgttcatgatggagatttggatttgtacactcgcaatatggaattgaaaatgtccaagaaagtagtccccaactgctaccctacaaatgtcaaaaagcttttatcaactggcattcttgacggagctgtagtgaagtatatttacaatcctggaaaggttgagctacaggggattattgatggtggcggatatttgtgtggctgttcaatgtgcaattactctagagttcttagtgcctatgagttcgagcagcatgctggagccaagactagacatccaaataatcatatattcttagaaaatggaagaccgatatatagtattatacaggaaataaaaacggctcgagagatgaggttataaagaatgtggctggttcatctgtcaatgaggagtccttccaggcttggaaagaaagtcttctacaaagcaatggcaaggttcaggctcataaaagttatagcaccaaacttgtcggtatgcctcatacaaacataagtcaatctgtagaaagtacaagccatttgtcatctttgcatgtaccgagtcattatgagcagcacatgtatatgaatcagacaactgatgaatggaagcgtgtggtgaaaaagccaagctcctacacttctaactcaggtgtactgcagaaaagaagtgctgatggttgcactaagagaagggacaatgatttacacaggttgctttttatgccaaatgggctactcattgtttctgagttttcttactatgtcaaatgatgcaaattacttggaggttacaaacagggaaacgggatagtctgtggttgttgtgatatagagataagcccttcacagtttgaagcccatgctggaatggctgctaggcgtcaaccttaccgacacatatatacttccaatggattaacacttcatgacatagctctatcgttggcaaatggtcaaaaccttaccacgggagacagtgatgatatgtgtgcagtatgtggagatggaggagatttgattctttgcaatggatgccccagggcatttcatgcagcctgcttgggtttacagtgtgttccagacagtggttggcaatgtctaaattgtatagataatgctggtaatggaagagaatcttctattgtgaggccaatcatgatacgattgacacgcgttgataaaacaccagaagttgaaatgggaggatgtgttgtttgcagggaacatgatttcagtgttgctaaatttgatgaacgaacagtaataatttgtgaccagtgtgagaaggagtatcatgttggctgcttgcgggacatggggctatgtgagttggaagagctgcccaaggataagtggttttgttgtgatgactgcaatcgaatatatgctgctctacagaattcagtttctgctggagcagaaattataccagcttccttttcagaactaataatcaggaagcatgaggacaagggattatgtacctatggggccatgaatgatatccagtggagaattttaagtggaaaaagtcgttatcctgaacatttaccattgctttcacgagctgctgcaattttccgagaatgttttgatcccatagttgccatttctggtcgtgatctgattcctgttatggtctacgggagaaatatttctggccaagagtttgggggaatgtattgcattgttttaattgtgaattatgttgtagtatctgctgggcttcttaggatttttggccgtaatgttgctgagcttccacttgttgccacaagcagagcacatcaaggaaaaggttattttcaagtgttgttctcttgcatagagaggttgctgtcttctctaaacgtggaaaagttggtgcttcctgcagccggggatgctgaatcaatttggactaagaaattgggcttccgaaagatgagtgaagatcagttatccaaacatctcagagaggtgcagctaacactcttcaataaaacttcaatgctggagaagacagtgcagctggctatagaatgaattttatctggtgttgtaactaatttttggctatttattcatttttttagcattttcctcactgtaacgttgctgcgatgttcatgctgccgtattgttcttttcttaattttttgtttcccacgtagtatgggtggttgtggcttggtcttggttccagccagccatgtctctttttgtacaatgtaggataaaaaggcgtaaaaaatagggaacatggcctagaaggaagtagaggagttccaaagagccagcatgctgaccaattttattttttttaattagcatgcatgttggatatataaaatcctactgtattgatttttttttcctcctaaaaaaagggcggcgtctgtagtgaattataagtggtgaagggggggccccccagttggtgcccgctcccc

SEQ ID NO: 18479 - DNA, 296 bp, Glycine max
  Clone ID: PAT_MRT3847_116691C.1
gacatatgatcttgagtctgccgcatttgccatatcacgacggttcctaccaattggtccattgattgcaagtgacagcaacaaaagttcactctggcaaggagacacaactttcttagactggttagatcagcagccacctcaatcagttatatatgttgcctttggtagtttggcagtaattgatcacaaccaacttaaggaattagctctaggactcaatttccttgacaagccttttctttgggttgtacggccgagtaatgataatgaggcaaacaatgcatgctctgatg

SEQ ID NO: 18480 - DNA, 344 bp, Glycine max
  Clone ID: PAT_MRT3847_116692C.1
ccatccaaacacatttttaggttcaggaattgggacagccggcttgagattttaacaaaatactttagttaatgggaataacaaatgtttttataaggccaatttttaaaggagggtacctttaaaaaccccagcctaaatagcttgggcaaacccccaaattttaagaacctcctcttaagtcatcttttgagcagtttctttggcaagaagcttttcctttgctctggtttccgctggggattgggaccccatgatcccccccccccacttttttttgtactcgaaatatttgccgtggaagttagccttgatggcctccaaaactttggtgaactccaatt

SEQ ID NO: 18481 - DNA, 288 bp, Glycine max
  Clone ID: PAT_MRT3847_116693C.1
cgcatactcttgtgttcgaacacacggtagctagaataggaatcgtgacgttcctaaccattcataggctcctgcacatgtcgctgacacagaccacacatacattttcctcttaattacacgcttatgatatacctttactggaaaacatgatctgctcaaaccttgaccatcccagaaccactggcacaaacttcgaattctatggtctcctaactgcctgataacattcatgcccgagcactacctgcacattccaaagatcgaacaagcttcacctaatgagtt

SEQ ID NO: 18482 - DNA, 581 bp, Glycine max
  Clone ID: PAT_MRT3847_116694C.1
aattttgtgcacttagttctgtgaataatctaataactaaaccttttatgtataatgtatgtccttcattattgccctaaatacccatcatatattaaaaacaattctcttaatgtgcattacatttatgttatcatgaagcaaattatgcattcttcaatgaagtaagtttcaaaaaacacttctctgtccaattatggtctccaccatacgtatacccaggtaacttctcacgaaatttccatatataaatgataattgtgaaaatcttggccaaatttcttctcctgacaaaggggaaagagatctcaacacaatgtctcttagttttttgttttttttcctctcccatgagcattatcttggaagaaaatggtagtgacaataaaataaaaatgagatattacaattgtgctacaacggatttaactttaatcgctccatagatattggacaaacaagtctccctacaatcaaccaatctgatggcaatatctcgtaagtcgggatgtcattgattatcaacatttaagatgtcttcatcatgaaattttacttcaaggatatacataaggacacca

SEQ ID NO: 18483 - DNA, 1997 bp, Glycine max
  Clone ID: PAT_MRT3847_116695C.1
cccacgcgtccgcccacgcgtgcgaaaacagctagatagttttggcttattatatacccccataagccccataggccataccactctcaattctgttctcacatttcctatatatatttgccactctttctgtgagcttctcaacagaaagacacaatgggcaaagaaagtagtacttgtgttcttctatcccttctcattctttcactctttgtggctgaaatatatggaaatagacaagttcaagctcttaacaaactgcacaagtccaccaagttcagaggaaattcacaaattgataggagtgagtttgaggtagaggagcttgcttatgatggcattgttcactctcaagagggtctcaaagagaaagatagaattgagagtcttccaggacaaccccctgtgagtttttctcactatggagggtatgtcactgtggataaagaagcaggtcgtgccttctattattacttcgttgaagctcaacgttctaaacaaacactcccacttcttctttggctcaatggaggtcctggatgttcatctcttggctatggagcaatgcaagaacttggaccttttcgagtaaacagtgatggcaaaacactacacagaaatatattttcttggaacaaagttgcaaatgttttattcctggagtcacctgctggagtaggattttcctattcaaacaaatcaaaagattatgataacaatggagataagaaaacagccgcagacaattatttattcttggtgaattggttggagagatatccagaatataaggacagagatttctatattgctggggaaagctatgctgggcattatgtgcctcaacttgcacataccattctctatcataacaaaaaggcaaataagaaaatcatcaacctcaaaggaatcttgattgggaatgcagtgatcaacgaggaaactgactcggacggactgtatgattatcttgctagccatgcaatcatctcagacaaagcagcttatctcaacaaagcttgtcaatcatcatcatcaaagattcaggaaagtgtgtgcgatgcagccggagatgaagttggggacgatattgaatacattgatttatacaatatttatgctccactatgcaagaatgcaaatctcacatccctgccaaaaaggaactcaattgtgactgatccatgtagtgagtattatgtgtatgcatatcttaatagaaaagatgttcaagaggctctccatgccaatgtaaccaacctcaaacatgactgggaaccctgtagcgatgtcataacaaagtgggttgatcaagcttcaacagttcttccacttttacatgaattcctcaacaatagcctcagggtttggattttcagtggtgacacggatggaagggtgcctattacatcaaccaagtattcagttaagaagatgaaccttcccattaaaactgcttggcacccttggttttcctatggagaggttggtggctatgtagaaatatacaagggaggcctaagattagctacggtgagggaagcagggcatcaagtgccaagttatcaaccagccagagccctaactttgataaaatatttcttagacggcactcctcttcctggtcctcccaaaagaaaggactaggactagtttcttcaaatcctgttttcgataattattgtggtaattattaatttaaggaaaataaatacaattatattatagtggggtttcttggattctattcttgttggcgatctttcattggtaagactcatgtaaatatcattataagctctcgccaaaaattgaacatggcctatgaatggggcaacctaggttctttgaacttcctcgcactcaaagaaaaaaagaaaatagtttgatttgagtatttgattaatgaaagtgtttgtgaaaaagaatattgttactcaactttgtgatggtttcttgcgtagtgttgttaaattaagatatacagttattgccat

SEQ ID NO: 18484 - DNA, 357 bp, Glycine max
  Clone ID: PAT_MRT3847_116696C.1
tcttagtaccactgctattgaagattatgcctcaatgacatcttccttaattgaaatgggtgctacaaatcaggatgttcatgctaaggcatttgtcaaagatttggaaaaaagtattttcatcaattaaggaattggacacttaaatacttgtagcaaccacaactagaacgcagattttaaggctatggcttgagagacaaatttttcctggatcagatgttcgtcgttacatggatgatattagactaatttaaaatgatgtattattgtattgtaatggatataatataaatattaattttttcacacttgttgtagtaaaaaatcattttaaatattgaaaatgattattat

SEQ ID NO: 18485 - DNA, 149 bp, Glycine max
  Clone ID: PAT_MRT3847_116697C.1
cacaacatcagatcgcaatacagtgtctttgagtacgagagagagagagcgatacaatcagcacaatggcatctgagctaatgcctcgcagagagatcaacagcgatacggtgctagagagagaggtgcacgttgagactgccacatga

SEQ ID NO: 18486 - DNA, 500 bp, Glycine max
  Clone ID: PAT_MRT3847_116698C.1
aggaccactgctaattaagattatgcctcaatgacatcttccttaattgaaatgggtgctacaaatcaggatgttcatgctaaggcatttgtcaaagatttggaaaaaagtattttcatcaattaaggcaagtcttgtaacgcacatatactcacttgtcaatcatgtgtgactacgtaggtgaatgcgtattgttgcttatatttttgcactacttgtgcgtactatgcaacagcaggaattggacacttaaatacttgtagcaaccacaactagaacgcagattttaaggctatggcttgagagacaaatttttcctggatcagatgttcgtcgttacatggatgatattagactaattttaaaatgatgtattattgtattgtaatggatataatataaatattaattttttcacacttgttgtagtaaaaaatcattttaaatattgaaaatgattattatagttttgattccaaaaaaaaaaaaaaaaaacgaag

SEQ ID NO: 18487 - DNA, 775 bp, Glycine max
  Clone ID: PAT_MRT3847_116699C.1
acaattaagcatttcttagtagccaagtctaataattagtaaacatttttccaatattagtttgttgttttgcagagaataacatgtcttccattggggcacgttcagctgaaatttatgttatggagaagaggcagaaagagaagttgaagagaatggaagaggaaagagtacgaagaggtgaggtgagtactgaagagagaaaggagattagttctagtgtgggaaagaacaaggtgcatccaggtagtgaacaaggagtcacatccgataatgtctttagggcgtaatgtaggataataataactccccaaaactatagtttttcacatgcccaccaccattaccttttgtttttgttctataactctacatgttttgtgtgattaagttttaaatgtttgtttgaatagctcccctaagctcaccgaaaaagaaaaccttgttaatttagttattatatagaagtgataatagactgttaatgttattaatggcgtgggcttttaaattagccgtttgtaacatgtctcaatattgaatgtgttatgtcaaaagagtgctttgccgctttgtatctacgatcagaataaaagcgtcttcgtgcatatgttttgcgcgtgggcttttaaattagccgtttgtaacatgtctcaatattgaatgtgttatgtcaaaagagtgctttgccgcttttattctgatcgtagatacaaagcggcaaagcactcttttgacataacacattcaatattgagacatgttacaagagtgc

SEQ ID NO: 18488 - DNA, 279 bp, Glycine max
  unsure (1)..(279): unsure at all n locations
  Clone ID: PAT_MRT3847_11669C.1
gttggtataggaggcgtcaatgatagggacaaagaattcaagctgaataatgagtggtcttttggagagtatggaaatgttgataaatccttgaatgacatcacaaacatctttcaaaacagcagtacaatctgttttcncgtaataggagaataaactatggttagacatgtataattctatatcacactgttcttccaactctttttcttttgttcctcttcataactttatttcnatgcntccgatcagattnagaaannngagtgcctccccccc

SEQ ID NO: 18489 - DNA, 742 bp, Glycine max
  Clone ID: PAT_MRT3847_1166C.1
catagggccctattctctggcagaggctcagaaaaagtcgaaagctggaaaaaagaactaagcactcaatcgtcaacttgggacgtttctgaaacgtcaaagcctgcctcaaagacaagaagtgaggaagccaaaatctctgcatgggagaacttgcaaaaggcaaaagcagaagcagcaatacggaaactagagatgaaattggaaaaaaggcgagcatcctctatggataagattatgaacaagcttagattggcccagaaaaaagctcaggaaatgagaagttcagttccacacaaccaaaccgatcgggttgtaagaacttcacacaaggcttcatcatttcttagaaccagccagatgcgttctttgagtggttgtttcacttgccatgtcttttaagcattctttcatgtttgagtgatggtgggtttccgaaggattcaaatgggccacatgttaatgattgaaaggggcacaacagttgacaaaattggtgttgttgcgttttgctatccatggcaccttctttgaaagtctcagatatcataaaatctaagccccatgttcgggagtttggattcaatgggtagcaatatttgtaagtaggccaaattttagaaataagatcttttgtatttttttctctcctcccaacatgattgtgtgctgttcaaaaacttcaaatgtaatctaccttatagttgaacgagaaaagcaaccacaatatcatttcgttctt

SEQ ID NO: 18490 - DNA, 248 bp, Glycine max
  Clone ID: PAT_MRT3847_116700C.1
gccacgcgtactgtgacttatacagtgaccaccacagtaagagtatgcgaaaccatggtgagcaccttattgactaggaagaatcctattacggccaccagattccatgcatgtctcaactctctttatggcctgaaaggtggaccatgcggtgcaggtacacgcatggcctactacaaggtgaaggtcatagaccgctagaatgagaagtatatcaaggatgcacagatgaggcttatactgttggc

SEQ ID NO: 18491 - DNA, 690 bp, Glycine max
  Clone ID: PAT_MRT3847_116701C.1
gggccaaatgggcttggagcctctattcattttttcaaggcatctgggccttccaaatggcagaccaataagttgacatgcttcaaacaaatcaacttagaggatcgttggaaagaacactgaacataaccatatctctactttttcctttaatgaccacatacttcctgagaacaccctccctttgaaaaccagccttctccagcaccttctgagaagccacattttccacatcaactagagcctgaagcctctccaagtgtggaaactcgctgaatgcaactttaatcacttgtttcacagcatgtgttgcaatcccttttccccagtatatggaggctaaagcgtaaccaagttcaacagatttgtgcctgtttctacgctggccctcacatgagaaaaaatcaatacacccaattgcacggttattgaggcaaattgctctgaaccatagagatttccctgctatgttttggatgaagttgatgccatcctctttgctagtgtaaggttcccaagtgcaataccttgcaactttttcatcagtggtccacaacatgagatcatcaagatcatcaagactaatgggtcgaagagagatttgggtcaaatcaaaaccctcttctatggaatctgttgtggaacagatagtagctccctccatgtgtgaccaactagatagctcgagcc

SEQ ID NO: 18492 - DNA, 1416 bp, Glycine max
  Clone ID: PAT_MRT3847_116702C.1
ggctcgagcttcaaaagattgcaccattggaagctctacggctgctagaagacgacagaagggggaagaagcctgaggagaagaccttgagtagttttggacacactgcgaggtacagaagatacaccattgaggaaatggaagaggcaacaaacatgttctcggagtctctcaagatcggggaaggagggtatgggccagtatacaggtgcgaactagattgcacccaggttgcaataaaggtgttaaagccagatgcagcacaagggagagagcagttccagcaggaggtggaagtgctgagttgcataaggcatccaaacatggttcttctgctgggtgcgtgtccagagtatgggtgtctggtgtacgagtacatggccaatggaagcttggacgactgtctgttcccaagaggaaaatcacggccacctctcccatggcagctgaggttccaaatcgctgcagagatagccacaggtctccttttccttcatcagactaaaccggagccactggtccaccgcgacttgaaacccgggaacatcctccttgaccgcaactacgtgagcaagatcagtgacgtgggcttggccaggcttgtccctccttcggttgcagacactgtgactcagtatcgcatgacttccacagctggaacattctgctacatcgacccggagtaccagcaaacgggcatgctcggaatcaaatcagacatatactctctcgggatcatgcttcttcaattggtgaccgccaagcctccgatgggtttgactcatcatgttggaaggtccattgagaagggcacttttgcagagatgcttgacccggccattcctgactggccactcgaacagaccttgcatttcgccaagctttccctcggatgcgccgagatgagaagaaaagatcgacctgatctaggaaaagttgtgttgccggagctcaataagcttagggcatttgctgaacaatgcatgtcacctatgatgatgtttgcacttagaagtactggtggtgctggtggtggtgctggtggtggtgcaggatatgttcccagaaatagtaactcttccggactttcttcttcaactcaagacatgagtgaagtgtctggcttctctggatatgaaagccgctcaagcacatcatcgctggggagaatatgatggaagtgtagagttattgttttacctttcctttcgagtaatttctttgggaggcagaaggggtatcaattaaactttggttggtttggatatcatccacaacactcgatcgcccacatgcatctttgatgaataattgtaatcctttaatgtatttcacaacttcaataggaatctatgatgagttttgtcattaaatccaacacaatttgatgtgcagaacaatcacaatcttccccac

SEQ ID NO: 18493 - DNA, 464 bp, Glycine max
  Clone ID: PAT_MRT3847_116703C.1
aaacggcaccccccaaaaaacccaaaaaaaccggaacccgggccccaaagaaaacaaatttaacaaaacaatggccctactataagggcatggaataaatggaagggaaaaaaaaaataattggaaaaggcggggggcagcaaggggattcaaaaatgggaaagaaaaaaaaaaaaaaaactttaaaaaaacccagtttttttatccaaaacaaagacaaagggaatttcgttccccaaatttccccaacaaccggtttggggggggggaaaacgggcccccggccccttgggccgggggaaaaggaaaccccccccccccaaaaaccagttaagggggttttaaagcaaaagggaagctttccaaacacggaccacttaatgggggaaaaacaaaatggaaaaacccccccaaccagaaaaatccttttggacacggggggcttttctgggggcccccgcggg

SEQ ID NO: 18494 - DNA, 479 bp, Glycine max
  Clone ID: PAT_MRT3847_116704C.1
tacggctgcgagaagacgacagaagggcagtcatagaagacactacaagtattcccttgatgcgttatagttagttgcatacaaaatgaaatttaattcagagcttaattttaatattgatagaccccagattgaataagaagaaacatacacagtagtttttacaccttgaacatcccttcttccagtgaatcacataaaggtcatacatggcatgaatcaggacaaaagctatcacttcattggaaattgattcagtaagtaaaagattcagacaagtatgaggcgtcagatccaatcttccacttggttattactcctgcctagttaatttttggtattcattaatctgattatccaagagtgagattcaatagccaaaaaaacaaggcaaagcctattttgttattttcagcaaactatgcatacaatgcttattgcttttcattaaattaattcagtaagtaaaaaactcagac

SEQ ID NO: 18495 - DNA, 404 bp, Glycine max
  unsure (1)..(404): unsure at all n locations
  Clone ID: PAT_MRT3847_116705C.1
tcctgagttttatatggggagaagtgttcattttgagagcgctgtgattccttttatggggggtgtagctccttcanatacttatcggggttgggagcgtggggctaatcttcctgcgnagatnagccttnctgggtttnagggggtacccgtccagcgagcgngccaaacattttggtgccttnnggaggggtatgtgncgnagngaggggatttaactctgccacctnggtctttgagtgcgctttctcatagggagagggagatcacaaatgcgttnnggggagcggngacacaaccaacagangctgagggtgcgtatgagggttccttgaggtgtcanacaaatatgtgtagaccaggtattgaggtgactcaggcggagcttntgccccatttaaatg

SEQ ID NO: 18496 - DNA, 679 bp, Glycine max
  unsure (1)..(679): unsure at all n locations
  Clone ID: PAT_MRT3847_116706C.1
gggttcaagtaagtctcattaagtttccagaagttgctattcgctcactttctctctctctctagctacctccaaccttataatagtcaaacaccctttctttcttctcccccaaccttcttccttcgacacaaaaatttcccaaactccaacaaaacccaaatccaaataccctttttagtattcaatccaaaggattcacctttgtattctcctcacagtggggcatcatctctcagaagaaatttttttacaaagaaagaggaaaaagaaaagaaaaatgttgcagttgttcttcactgtggctttctctgcggttcctctgaccctttacgtgccaccaatccgaagcctaaacctgtttgtggaaacaatggaatatgttgtcagagaatcaagaacccacaggaaccgagtttaccctcgcctacgcatagcttggtctaggatgttggatatcatgctctgcaacacaaggtagattcacatgtcaaagtttcaacaattgaaagaagaaggaaaaaaaaaaccacatcttatcttattgtaaatatgttttttcttcttggaccccttgttgtggttctttcttgattgttttaattttcagtttttttttaatcttctttgatttaacatcaattccgaataatctacatacaataaaactnnncggngt

SEQ ID NO: 18497 - DNA, 262 bp, Glycine max
  unsure (1)..(262): unsure at all n locations
  Clone ID: PAT_MRT3847_116707C.1
ctgggattctcaagtgccagtctcttgtttcaattgatgtttcttcaaatcagctgaatggaacacttccagaagatatttctgggttgaagtccattgtgaatctcaacatatcagggaattcgtttcagggttctattgtggatttgtttcaggganagttggaggttctggaccttagcagaaaccaatttcaaggtcacattccacaggtcgtagaggtttctacatcaaagacaggcaagcatggacatgcaaagtg

SEQ ID NO: 18498 - DNA, 309 bp, Glycine max
  Clone ID: PAT_MRT3847_116708C.1
caacggtcccgctgcaacaacacgacataacgggaaccacgaacggttttctgtgtgattctttctccattgtcgtctaacacgtttttcattcgtttctgaaccacgcaatccatcgaccaatgcccacagggttaccgaaggctaactcctccgtagcaccggacgaccagcgatggttgtggacgcagatcactgcggatgcgcaccgtgacaccgagttggagcccacgctggccatctacctctactcggcgatcctctcacactcgtcgctcatacgctcactgtcttttcacctcggaaaca

SEQ ID NO: 18499 - DNA, 385 bp, Glycine max
  Clone ID: PAT_MRT3847_116709C.1
cgctgacggcttagggccctacaccgttgacgccgatggacggattctcaagtgggacggggaagagacatgtttcactatatttgctgccaccaaatccaatatgttgaagtgtagtctcccatttgaaccaaagttggagcacatttgggtgatgccattaggacttggatccgataaaaaaagtggatatcgtaccatcgctgattcctacctacgcctaataattatgttgtctacagtgagattgactcaccaaagaggtatctgcacgtattaggccagccctcttcattcaccgattccattgacatcattgatcattcacacgcgatatactgcactgcttcaacctcaattttccagacaatgcattttatgcttg

SEQ ID NO: 18500 - DNA, 233 bp, Glycine max
  Clone ID: PAT_MRT3847_11670C.1
gtacagtgcttgcatattgggtgcatttggccttgaagatgagcttcaacaaggcgtgctagaatgcattgaatgtctaaggattgcaggccttaaagtatgggatctgacttgcgacgaccatgatactgccatcatcatggacttctcctcagatctgctaaccagcaacatgactcacattattatctatagctcgagcagagaatcatgcaaagaaagcttgcaggatg

SEQ ID NO: 18501 - DNA, 183 bp, Glycine max
  Clone ID: PAT_MRT3847_116710C.1
aatttttacttcagctttggtacttaaaagtaactagtatttgcttaggcaatagtacttgaaacagaaattgtaagaaatggcaagaaactttccaatttcaatcgtgttttagactcttagttccgccaaaaaaggtataatgaaattcacaatagaatatattatgttctactttgcatt

SEQ ID NO: 18502 - DNA, 316 bp, Glycine max
  unsure (1)..(316): unsure at all n locations
  Clone ID: PAT_MRT3847_116711C.1
tcgctctctctcactctttcctcagcatttggcaacatctgcaaactctcttctccttctctctatctctcactctgcagcaaaggggttattcacttatttgtcattcaatggctagttgctggtgttgttgttgtgttgttaagtccagtgttgcagttttagcgttaagtgtggttgtgtttttgtgacgggaaaaaaaagttggaagctttggttgggggggtgggtgtcaattgggatggggtgcggatcgtctgatactgccactggtgggaccgccattaaaacgcnaaggggggttgcggaggaagca

SEQ ID NO: 18503 - DNA, 1561 bp, Glycine max
  Clone ID: PAT_MRT3847_116712C.1
acgcctgcaggtacgggtgcgcagtgtcccggggggaccccgcgttacggctgcgagaagacgacagaaggggacaacaccctctattaacctttctctctcctctctttcctctctcttggaacaaacgacaagttatggtagtatttgtcattcatttcacaaaactggttcacctttggacccatggcttctaaaaactccacgttgttccagtctcgcttcttcctcttcggcttctattgctgggactgggagtttctcaccgctcttctcctctttagttcttcttcctaatcaaataaccttctccaccatacataaacctttttttttttgtcttttgtacttaaatttctcattactacatcaacaaaagaggcatagattttttcttcttttattaaaataatagtttgtgaggtaggtggagggtagatcgggaagaaaaatgtcgcagcagcagcgttcgatgccggcgccgtttttgacgaaatcgtatctgttggtggatgatcccgccaccgacgacgtcgtttcgtggagcgaaggtggcaacacctttgtcgtttggaaacacgccgatttcgctaatgatttgctccccaagtacttcaagcacaacaacttctccagcttcgttcgccaactcaacacctatggattccgaaaaactgttcccgacaaatgggaattcgccaacgagtatttcaagcgaggacaaaaggatcttctcgccgagatcaagcggcggaagacggtgtcttcggtgtccggaaaatccggcagtggcggtaacatttcggcgtcccactccggcggcgatgacatggggtcgacatcgacggggtcgatggaggcggcgacggcgacagtaacaacgactcagtgcgcggatttatcgggcgagaacgagaaattgaagaaggacaacgagaaattgagcgacgagttagcccgcacgaagaaacattgcgacgatttggtggcgtttcttagagactcgctgaacgtgggccccgatgtgatagattgcatcattcggcaaggaacgtgtgggtccagcaacgatgatgcggtgcgttttgatgctactgaaaatcttaataatcataatcatgatgacgacgaaaatgcggtaggtgagtgtgaaccagaacaacccaaaggtgacaatggagaaagtttgaaactgtttggggtttggttgaagggtcaaaatgggaaagagaattcaattggtagctgccgcaagagagggcgccaagaccctattgctgccactgccaaggaattgaagacccttgtctaggacatatcctaaggttgttaattaattaccttataatatttcaagaaacaactattatagtcagatctagaacacaaaaaagaactctctcttggtcatcatggaacatgtatggtcgatagtagttgttgttaattcatggcattttgtagtttggtttggtgatggtgcaagggacttcgtaaattatactaataatgatgatgattaaaaaaaaatgaaaaagcattaatttgtatgattggattt

SEQ ID NO: 18504 - DNA, 538 bp, Glycine max
  Clone ID: PAT_MRT3847_116713C.1
ctttaaagcaagtaaagagagccaaaaagaaaagggaaagttggttgagctacgacgttataagatatatagtgtaaccacgtcgccaaagttcgagagaaaccctctttcgtttcggtaaagggaactaatcgcttttgtcttgtgttatatatgttgctgttgttacaatgatcttctctaagtttaggtaatcaagaaagaaacgagattgctagctagagattgtgttggatctcaaagggtagagaagagaagagaaacgagaaagaaagaaagaaaagataatcaagaaatgatgtcaacaactaatgttaaccatagcttgtttgaagaacaagatcagatccctacgcagatggggctgttcaatattattcctttcccaccaaaccaaacctacccacctttgggttgtcaaacagtaactttgaaatccatcagtgcaatagctccttcactttcatctgctgcaaatttttctgaaaccctactttcaaccgctgttaatcaaagaccacgagaaggagatctcact

SEQ ID NO: 18505 - DNA, 301 bp, Glycine max
  unsure (1)..(301): unsure at all n locations
  Clone ID: PAT_MRT3847_116714C.1
cctggggggggtttttttacnntggacagctatataccaatcgcttgtgtcaggcataagtcttctacttattattttgggaaaggccatcaggcccccaaaatgtagggggcctgctttctagtaaaagggtttttttatattgtgtgcgcatgtttgctggggggggggccgccacccatccaagattgttcaaggaaataccttttacgtgccggactttgttggagtaagaaacatcttctccaaatgtgcttttgccgactgcttctttacagggccgaatctgttcgaatcctta

SEQ ID NO: 18506 - DNA, 251 bp, Glycine max
  Clone ID: PAT_MRT3847_116715C.1
catcttgagtttgatttatttgtttggaccacataaatacatgtaaacttgttgcttggtactgttatctaaataatccccattctagcttcaatatattgcccattatttttcttttctaaacagtttgccccctttgacaaccctttgaagatcaggggtataaagaatatttcttttgtaaaaagcattggcggggacctcaatgttgggaaaaccagtggagtgaaccacctttccagctttacctt

SEQ ID NO: 18507 - DNA, 336 bp, Glycine max
  Clone ID: PAT_MRT3847_116716C.1
tttatggagtaagtaaatctgctctcgtgggtatatatataagcattaaaaaagaaaaaattatacaaaaaaattcagattcacgtggaactaggtgaggttgatatcgacatgggtaggggtaacctatacattttcttcaaaaaggtttcactatgcagaattatttactgcctctttgccaatgtcttcctcaagcctttgataatcttagcaaaccaaaccaagttcataactgatagcaccaatggcacaacaataactaatatctgcccaaaggtgtgcatctgctcaacctcatcaaagtgcaagtagacatggtaaaacatgtatatg

SEQ ID NO: 18508 - DNA, 207 bp, Glycine max
  Clone ID: PAT_MRT3847_116717C.1
ggcgttcggctcgagcggctcgagataattagagagtgcgagagagagagaagatctgcgcccgaagaggtaagcgctattgatgtacggagacaattcggacgacatgatgcagaagtggggagacaactatggggcaatcgtgaaggtgctcgaagaactcgggacgaacagggaactttaaaaattcggccacggagagtaccg

SEQ ID NO: 18509 - DNA, 348 bp, Glycine max
  Clone ID: PAT_MRT3847_116718C.1
tattgaagaaggtcccaactttgaattggcatttacgcatttccactggactgatgagtgtactacccttatcagacagatcatttcggccttcagagaacatagtataagcagaagcccccatagcccatttcaatccttcagctgtagcagcagcgactaatagtctgtcaacatatggaattggttcggcatccggttactgatcatattctgagaagtggaacaacgagaaaagaacttccacatcatcgattgggaatccttcatcccaagattgttcatagcatcatgcatgcattgattagctgcataacagtaactgccacatcgccaattcataccagg

SEQ ID NO: 18510 - DNA, 279 bp, Glycine max
  Clone ID: PAT_MRT3847_116719C.1
caaataacattattatatcaacatatgggcttacaaatttccacattttcaggaaacaaataacggaaatccatcccagtttccactcctgatcgaatgaacccacaaaacacgtatcgaagttcccaaaccaacacaaatcgtttggtcaaataacccaaacccaagctataacagacccagcagctagaccaaaaactaaaaataatacacccacaatccctgcgccctctgtaggcctcaccataacaattttaggaatcagaatcatcaatgcac

SEQ ID NO: 18511 - DNA, 444 bp, Glycine max
  Clone ID: PAT_MRT3847_11671C.1
cggctcgagcaggtgccatacggtgatgattcacacatttttaaaagtgttattcctggaagtgaaataccagggtggttgaataatgagcatgagggaaattgtgtaagcttagacgcctctcctgttatgcatgaccataattggattggcgttgcgttttgtgcaatattcgtcgtacctcatgaaacaatctcagcgatgggggtttcaggtccagatcggagtcatttaggtccagattggagatattatggtacgtattgtggtattccagtggatttttatggagatctagatgtagatctagaacttgttttagacaaatcagatcacatgtggctattctatgttgatcgaaaagagttcattgatgaattccatcttaagaactattatatcggcagattgattttgaaatgtgatgataaagggagagtgttg

SEQ ID NO: 18512 - DNA, 352 bp, Glycine max
  Clone ID: PAT_MRT3847_116720C.1
attgtttgctgtcatgtcttattacactactctatcagtagcttattactgcaaactgattcattatgctctccaaaataggcgtctcaataataatagcttgacaggaggcatacccatatctttgacaaatgtttcttcactgcaagttctgtgagtgttactcctatacgtacattttccatgagttaatgccaaaatacattcctatttatactagtgtcatgtatttttataagtgtaacctgacacaactgtcattttggaatatagtgatctctcaaataaccatctaaaaggggaaatcccagtgaatggttcattttcattatttacccccatcaagttagta

SEQ ID NO: 18513 - DNA, 1125 bp, Glycine max
  unsure (1)..(1125): unsure at all n locations
  Clone ID: PAT_MRT3847_116721C.1
nnnnnnnnnnnnnnnnnnnnnnnnnnnnnnnnnnnnnnnnnnnnnnnnnnnngggcccgggcagcccccccaattgggcccccaatcgcccctccccacaccctctttttttggtccctttccgtgctttaccttccaccccactgagcttcgattcctatcagttttactcatctccgttctttaccttcctgaacgacaccgagaccagacacggtttggggcacagttaaggtggtagcagtagcattgttaggccatatctcctttttttctctgccttgtattgaggtaaaactcacaaatattataactttgatctggggaagcaatggcatggagaggacatctttcgaaaaacataaaagaacttcggtttttgatgtgccagtcatctcctgcaagctcacctgcaagggcttttgtggagaggaattataaggaactaaagacattgaacccaaaattgccaatattaattcgtgagtgcagtggaattgaacctcaattatgggcaagatatgatttgggtgttgagaaaggcatcaaattggaaggcttgtccgaagcacagatctttaaggcacttgaagatttgtcaaaagcaggacagtctttgaaagcttgatattgctgcttatgcactgtcttaagtggaataaatgctctcttgctgcccttgttattgcaaattgctttttgatttaaaataagccaggcctttttttttctatgttctatggcctctggtttcagcctgtctctgcatcttacatcatttcaagtatgacactgttcattgtaagttcaaaaccctggtttttcatgttgagcacacttgtcgagggagatttattcagaccaaagattatatgactactggtctatgtcaaaggttgacttgccagagaacatgattctgtattggctgtgtaactaaaaccaaagcataaacccatctatgatgttttctcctaaagtagtagaccattttatgttgctggaatggtttctttccctgttcctgtattatgtgtccatgatctaatatatatatatataaaggcttagttgcatttttggcacaaaaaaaaaaaaaagggggggggggcccccttttttttt

SEQ ID NO: 18514 - DNA, 847 bp, Glycine max
  Clone ID: PAT_MRT3847_116722C.1
acggctgcgagaagacgacagaaggggataatatattggcatggtaagtcctcaatttggtcccgaatcgcacctcaccacaacctctctttctcgtctccgtccgtgcaacctgggaagcaatggcatggagaggaaatcttttgaaaaacataaaagaacttcggtttttgatgtgccagtcatcacctgcaagctcacccacaagggcttttgtggaaaggaattataaggaactaaagacattgaacccaaaattgcccatattaatccgtgagtgcagtggagttgaaccccaattatgggcaagatatgatttgggtgttgagaaaggcatcaaattggaaggcttgtcagaggcgcagatctttaaggcacttgaagatttggtaaaagcaggacagtctatgaaagcttgatattgctgcttatgcactgtctgaagtggaataaatgctctcttgctgctcttgttattgcaaattgctttttggtttaaaataagccaggtctttttctatgtcccatggcctctggtttcagcctgtctctgcatcttacatcgtttcaagtatgacactgttgagtttaagttcaaaatcctggttttgcatgttgaacacacttatcgagggagatttattcagaccaaagattataatattaattttggttcatatgactactgatttttgtcaaaggttgacttgccagagaacatgattctgtattggctgcgtaactattaccgaagcacaaacccatccttaagtagaccttttaatgtagctggaatggtttctttccgtgttcctgtattatgtgtccatatatatatatatatata

SEQ ID NO: 18515 - DNA, 1051 bp, Glycine max
  Clone ID: PAT_MRT3847_116723C.1
atatcaaacatatataatttcaacaagtacccttcagacattgggtagcacacttaatgaagaagagttggctgatataaaagatcaatttgatgctatagatgtggacaaaaatggttctattagcctggaagagatgagacaggtagcatttaatttactggctttgtgactaacttaaatctatatacatcgcttacttattggtatttagcaaattattcccttatatatcatttccctactttagtctaaagggaagattttgtgcatgctcttgccaaagatcttccttggaaattgaaagaatcacgtgtactatagatattgcaagcggttaaggtttttgtatagcggggttttcatgcatcgtttgttgaatcatattctgttctagcctcgtataaagtacatcaagggtttcttattatgggaaattgatttctgaaaaatatatgcattaaggtaactatgttagtcacgaacttgaattttctcacgaaattgaataacaggatcgtcatattagaaagataaagacattattagttttttagtataattaatagatcccataaaccagcatgacgagtctttgcatacttgtgttcagtggcggacctacactatggtgagggtgtgtacttgcaccccttcattttttaaaattcactaataaattttcttttaaattaaaaattgtaaataaaatcttatatttttatattttatatcatatacatatagttgaatccattgattttattttttataatttggcctcactgatctaggattttgggtccgccactgcttgtgtttatttttaactagtcaaggtaatgtgactgcactagcactacaagagtttatatgatgcctttattattaaaggccgattattttatgttgtcaggagagcatctgtaacattgataattttgctttagaaattgcaacatattgtgaaatgatactcattcgtagtcctgtgcttctttttctttttccttttgttctcttcatgtacccaaaaaaaaaaaaaaaaaga

SEQ ID NO: 18516 - DNA, 165 bp, Glycine max
  Clone ID: PAT_MRT3847_116724C.1
ccatatacccctctaggtcgaggctttcttgggggcaaaggagttctggaaaatatgcctgcaagtacacgtcctggtacaatattctagcactgactctgcttgtgatattgtagaatatatccatgtgaaaaatttggagataatagcatattaacaatggca

SEQ ID NO: 18517 - DNA, 326 bp, Glycine max
  Clone ID: PAT_MRT3847_116725C.1
ggctcgagcccgtctgttgctttcttgctgactgaacatggcctggaaatatgtatcggctttcatgcgttatacctagatactgagaccatggttcttactgctcactgccgtgctcatagtacgatctttgtatacactacgctaggctctagcaacatataatgacagagcaggtgctctgactcgatgctgctgattctaagtgaacattttgtcgcacttggcgactctggatgctggatacggtcttgatgattggacttagataccgtaggatactggtcaacctggcttgatgccttatatagctgaagcccgctacg

SEQ ID NO: 18518 - DNA, 378 bp, Glycine max
  Clone ID: PAT_MRT3847_116726C.1
catcaggagcaagattaaatacatcattggtgtgcacgcaacctgaacttggtcgaacaaggcctaagactggcgccagctgctgtcttaacagcgacaatacgctcactttgtctcggatgtcattccacagtgcacccaattattgccaaggccttgactggtaggggatgaaactctacattttttttttgaacactgtgtgtccctatagcgcaacaggtgaagctaaatccctcatagaccttggtctgccgggccctaccatgacaccatgcatcgctgcacacaacaattggtgactcagtacagaggacaccctgcaatggttttaacttcttgggatatgggaactgaggagagatgttcaggaccggc

SEQ ID NO: 18519 - DNA, 417 bp, Glycine max
  Clone ID: PAT_MRT3847_116727C.1
cacaaacttctctttcgagtgttccattccaacttcggtgtgtctattgatcgcgctcaccctcggtaggagagagagcctctcttgatcttctgcacaaacctcttctcccttttcactcatcatgcaccaccggcaccctaccaccattacccataccaacattcatctcaccaccaccaccacaccgtcttaccacccaccccaccaccaccatttcacgtcccaccaccattagctaccactgctaatcgagttccctccccagaaacccatcatcaataccgcgactccggatctcgacatcactgtctccatcaatttctgctctctctgctcatacctgggtactgcagagacaatgactaatctctcggagattgctttacctggaactgaaagttttcttgcagatta

SEQ ID NO: 18520 - DNA, 7315 bp, Glycine max
  Clone ID: PAT_MRT3847_116728C.1
ggggatgctgctgaattatgttctgttctttttggaaataccaggattcggtccacaaatgaccatctatcttaatgggttagttatggaaagaaatggtgatgggaaggctcaagattcagagcctctacctcctcattcagttctgaagatgggattgagagaacgtagcaacagcagcagcatggaggatccagatgggacattagcaagtgttgcccaatgcattgagcagctgcgtcagagctcatcttctatgcaagagaaagagtattctttgaagcagttattggagcttatagatatgagagaaaatgctttcagtgctgttggatctcattctcaggcagttccagtacttgtttcccttctccggtcagggtcattgaatgtgaaaatacaggcagcaactgtcttgggctcactttgtaaagaaaatgagctgagggtgaaagtcttgcttggaggttgcattcctcctttgcttggtctactaaagtccagttctgctgaaggtcaagtagctgctgcaaagactatttttgctgtctctcaaggtggtgccaaagatcatgttggatcaaaaattttttcaactgaaggagttgttccagtgctatgggagcagctgcaaaagggcctgaagactggaaatgtagttgataatttattgactggggcattgaaaaatctctccagcagcactgagagattctggaatgccacaatacaagctggaggagtggacatattaattaagttactgacaactgggcagtctagcactttagccaatgtgtgctttttacttgcttgtatgatgatggaggatgcatctgtttgttcaaagttgttgacagcagagacaacaaaacaactcctcaaacttttaggccctggtaatgatgcccctgtcagggctgaggcagctggtgctcttaaatctctatctgcccagtgcaaagatgcaaggaaagagatagccaattccaatggcattcctgctttgattaatgctaccatagctccttccaaagagttcatgcagggtgagtatgctcaagcgttacaggaaaatgctatgtgtgctttagcaaacatctctggtgggttgtcgtatgtcatctccagtcttggtcaaagccttgaatcatgctcctctcctactcaagctgctgacacattgggggctttagcttcagctcttatgatatatgatgacaaggcagaatctacctgggcatcagatcctttggtagttgagcagacattacttgaacaatttaaacctcacttgccattccttgtgcaggaacggaccattgaagccctagctagtttgtatagcaatcctatattgtcaattaaacttacaaactctgatgcaaagcgtttgcttgttggtttaataacgatggctgccaatgaagtgcaagaggagcttctaaagtctctcttgacattgtgcaatactgaatgcagtctatggcgtgcacttcaaggccgtgaaggagttcagctgttgatatctcttctggggctttcatcagaacagcagcaagaatgtgctgttgccctcctttgccttttatctaatgaaaatgatgaaagtaaatgggccattactgctgctggtggtatacctcctcttgtttacgttcttaaagtcaggatctgaggctactcaggaagctgccttggatgcacttttcctgcttaggcaagcttggtcagcatgtccagcgacttaatccagctggcccacctcctttcaggagaaggcagaatttttattgcaatcacagtgaggatatacgtgcttgtgttgaaagtgctgaagtcgttcctgcattgctgtggctgttgaagaaatctgttggaaacccaagtgttttttgcaagcttacactaggaaacactcctccaaggcaaaccaaggtggtctcaactggccctaatccggagtgggatgagagctttacatggtcgtttgagagtcctccaaaaggtcagaagcttcacatttcttgcaaaaacaagagcaaaatgggaaagagttcatttgggaaagtgacgatccagattgatcgggtagtaatgcttggagcagtatctggtgagtacactctgttgccggaaagtaaaagtggaccctcgaggaatttagaaattgaatttcagtggtctaacaagtgatatacctgtttccgtctttactgtgacggctttgaaattggaacacggttgaaaagaaatttttgtctaaattttgtattatttatcttgctagtgtacatagccacagttatttgttttttggtctatagtcccaaacaaattcttttaaaataatattcttttagaagtggcagagctggcaacatgtgctgtggcaaatcttattttggatagtgaaattgctgagaaagctgttgcagaagaagtcatcttggctgctaccagagtattacgtgaaggcacaatttctggaaaaacacatgctgctgcagcaattgctcgcctcttacattctaagaggcaagttgattattctgtaactgattgtgtgaatcgagctggcactgttcttgcattagtttctttcttagactttgctattgatgaacatagttccacatcagaagctcttgaagcacttgccatgctttccaggtcagatttgaccagtgcacacagtaaacctgcttgggcagttttagctgaatttcctaaaagcataatcccaatagttttgtctattgttgattcagagccaacattgcaagataaaacaattgagattttatctcgattgtgtaaggatcagcctgttgttttaggcgatactatcgtgtcagcacctggatgtatatcttcaatagctaagaggataattagttccacaaatgtcaaggccaaaattgggggagctgctgttcttatttgtgctgctaaagtaaatcatcagaagctggtggaggacctcaatttatcaaacttgtgtgctaatcttgttcagtctctggtcgatatgcttattttttcacaggctacattggataatcagggtgatgacagcagggaagttatcagcatttgcaggcatacaaaagaagccaatgattgtaaatcaagcactggcaccgctcttatttccagtgccaacttagctatatggttactgtctgttcttgcttgccatgatgaaaaaagtaaaattgcaataatggaggctggagcaattgaggttctcactgacaggattgcagattgtttctcacaatatagtcagattgattataaagaagatagcagtatgtggatttgtgctttgttgttggcagtattatttcaagatagggatatcatacgagcgcatgcaaccatgaaatctataccagcccttgccaacttattgaagtcagaggaatcagcgaacagatattttgctgcacaatcaatagctagcctagtctgtaatggtagcaggggaacacttctgtctgtggcaaattctggggcagcaggtggacttatctccttgcttggctgtgctgattctgatatacaggatcttctggaattgtcagatgaattttctttggtgcattatcctgatcaagttgctcttgagaggttgtttagagttgatgacataagagtgggagccacttctcggaaggcaatacctgctctagttgatctgctcaaaccaattccagaacgcccaggagcaccatttttagcacttgggcttttgactcagctttctatagattgtccatcaaataagattgtaatggttgaggcaggggccctagaggcactttccaagtatctttcactaggtccgcaagatgcaacggaagaagctgctacagatttgttaggaattctgtttagcagtgcagaaattcggagacatgagtcagcatttggagctgttactcaacttgtagctgtcctgcgtttaggaggaagagctgcaaggtatagggctgcaaaagctttggaaagtttattctctgctgaccatattagaaatgcagagactgctcgacaagctgttcaacccttggtggagattcttaatactggtttagagagagagcagcatgctgcaattgctgcattggttaggttactgagtgaaaacccttcaaaagcacttgctgttgcagatgttgagatgaatgcagtggatgttctttgcaggattctctcatcagattgctcaatggacctcaaaggggatgctgctgaattatgttctgttctttttggaaatacaaggattcggtctacaatggctgctgcacattgtgttgaacctctggtctctctccttgtaagtgagtttagtcctgctcaccattcagttgtccgtgcattggataggcttgttgatgatgagcaactggctgaattagttgctgcacatggtgcagttattcctcttgttggcctactttatggtaggaatcatgtacttcatgaggccatttccagagctctggtcaagttaggaaaagacaggccagcttgtaaaatggaaatggtgaaagctggagttattgaaagcatacttgacatccttcatgaagcacctgattatctatgtgcagcttttgcagaattgttgcgtatattgaccaataatgctagcatagctaaaggaccatcggctgctaaagtagttgaacccctgtttatgttgctgacaagagaagaatttgggccagatggacaacatagtgcattgcaggttttagttaatatcttagaacatccgcagtgtcgtgctgattacacattgacttgtcaccaagttattgaacctcttatccctttgcttgattctccaatatcagcagtgcaacagttggctgctgagcttctctcgcatctacttttagaagaacaccttcagaaagatccggtgacgcaacagcaaagagctgtaaaggccctggtcagtattgcattgatatggccaaatgaaattgcaaaagaaggtggtgttattgaaatttcaaaagttatattgcaatctgatccttccattcctcatgctttatgggagtctgctgcctctgttttggctagtattctacaatttagttctgaatactacttggaagttcctgttgctgttttggtaaggttgcttcgatcaggctcagaaagcacagttgttggtgctttaaatgctctttttgtgttggaaaatgatgacggaactagtgcagaagctatggctgaaagtggtgctatagaggctctcttggagctcctacgatctcatcagtgtgaggaaactgctgcaagacttttagaagtattgctgaacaatgtgaagattcgagaaacgaaagtaacaaagtcagctatcgtaccattatcccagtatcttttggacccacaaactcaagcacagcaggcaaggttgttggcaactttggctcttggggatctgtttcagaatgaggctcttgctcgaacaagtgatgcagtttcagcttgtcgtgctttagtgaatgtgcttgaagagcaaccaacagaagaaatgaaagttgtagccatatgtgctctgcaaaaccttgtgatgtacagtcgatcaaataaaagagcagttgcagaggcgggtggggttcaggttatactggatctgataggttcaagtgatcctgaaacatctgttcaggctgcaatgtttattaaacttctattttcaaatcataccattcaagagtatgcttctagtgaaacagtcagagcaataactgctgctattgaaaaggacttatgggctactggatctgtgaatgatgagtatcttaaagccttaaattctctatttagcaacttcccaagactgagagcaactgaaccagcaacacttagcattccccatttggttacgtccttaaagacaggctctgaggctactcaggaagctgcattggatgcacttttcctgctcagacaagcttggtcagcatgcccagctgaagtttctagagctcagtcaatagcagctgcagatgctattccattgctgcagtacttaatccagtctgggccacctcggtttcaggagaaagcagaatttttattgcagtgtttgccagggacattggtggtgatcatcaagcgtggtaacaatatgaagcagtctgttggaaacccaagtgtttactgcaagcttacacttggcaacactccaccaaggcaaacccaggtggtttcaactggccctaatccagagtggggtgagagcttttcatggacctttgaaagtcctccaaaaggccagaagcttcatatttcttgcaaaaataagagcaaagtgggaaagagtaaatttgggaaagttacaatccagattgatcgagtggtaatgcttggatcagtagctggagagtatgctttgttgcctcaaagtaaaagtggccccccacggaatctagaaatagaatttcagtggtctaacaagtgataccatccagctttcaaattggaacgttaaagatcaagctggaaagaaatttttggattttttttttattacaccacatgtatatagctgttgtttatttttggtcaaaacagattcttttgtcataatattcttttgtaacttgatctttcattcctaggataaacactaggagcacgaagatcaggccagcttcgagtttcttgtatgattctttgcttgttgtcaatttaaagtgatatagcgagtctgttttttttttttttgctttggggcttgtatgagtacgacgacttagtataattatttgacgctaaattgaatgtaaaataacagtgacaaatattgtcgtaggataaatcctatcgcgatatcgccccccactatgtctactcgactactccgactccgcgtctccctccgacggtccggccctccttccgcgccactgcactcggcctctttgttcaccgtcgtcgcagcgctaaggtctccgctccacctcgctctctgatgcttcgcatctccgtccctccgcgccgttgcgctcgctccgcctcttcctccctcgcggttgtgcgactgcgtgactgcgtcctttctcaggtctctgctccgcctttctctttggcgcttcgcatctccatcctctctcaatctctctgcgcgactgcgctacgccggcgatgctgccgcaacctctctgtcactctcctacgtctacatggcactggtagacaaaatgcttactgcatatttaactgcattattgtattaataattggtacatatgaatcgatagatgattttttttaa

SEQ ID NO: 18521 - DNA, 238 bp, Glycine max
  Clone ID: PAT_MRT3847_116729C.1
tccggtaattacccgggtacgtacccacgtccgtccggctttacatagatcatatctctttctttaaatgttcacgaagtttaactttgatatggtaccgttttggtttgagattatatattaatttccgtccctttaaagtaacatgaacaaaaaaattaaaaaaaataaaaaaagaagaaaaaaaatgaagaaaacaaaaaaaaaaaaaattggggggccattctaaaatataacg

SEQ ID NO: 18522 - DNA, 235 bp, Glycine max
  Clone ID: PAT_MRT3847_11672C.1
ggctcgaggagaaacttcgacctcatttcctggcccacgggaccgaggaacaccgcgagggggggacttttaagacaggagacgctatcctcaaccatggcacggattgaagaccaccccccgaagggataccgaagcagaccagaaacctaagaggcccgaaagggctggaggctggaacgcgaaagggagccggactaactagctccagaggacagctttcagagcacaaaag

SEQ ID NO: 18523 - DNA, 6666 bp, Glycine max
  Clone ID: PAT_MRT3847_116730C.1
atggaggatccagatgggacattagcaagtgttgcccaatgcattgagcagctgcgtcagagctcatcttctatgcaagagaaagagtattctttgaagcagttattggagcttatagatatgagagaaaatgctttcagtgctgttggatctcattctcaggcagttccagtacttgtttcccttctccggtcagggtcattgaatgtgaaaatacaggcagcaactgtcttgggctcactttgtaaagaaaatgagctgagggtgaaagtcttgcttggaggttgcattcctcctttgcttggtctactaaagtccagttctgctgaaggtcaagtagctgctgcaaagactatttttgctgtctctcaaggtggtgccaaagatcatgttggatcaaaaattttttcaactgaaggagttgttccagtgctatgggagcagctgcaaaagggcctgaagactggaaatgtagttgataatttattgactggggcattgaaaaatctctccagcagcactgagagattctggaatgccacaatacaagctggaggagtggacatattaattaagttactgacaactgggcagtctagcactttagccaatgtgtgctttttacttgcttgtatgatgatggaggatgcatctgtttgttcaaagttgttgacagcagagacaacaaaacaactcctcaaacttttaggccctggtaatgatgcccctgtcagggctgaggcagctggtgctcttaaatctctatctgcccagtgcaaagatgcaaggaaagagatagccaattccaatggcattcctgctttgattaatgctaccatagctccttccaaagagttcatgcagggtgagtatgctcaagcgttacaggaaaatgctatgtgtgctttagcaaacatctctggtgggttgtcgtatgtcatctccagtcttggtcaaagccttgaatcatgctcctctcctactcaagctgctgacacattgggggctttagcttcagctcttatgatatatgatgacaaggcagaatctacctgggcatcagatcctttggtagttgagcagacattacttgaacaatttaaacctcacttgccattccttgtgcaggaacggaccattgaagccctagctagtttgtatagcaatcctatattgtcaattaaacttacaaactctgatgcaaagcgtttgcttgttggtttaataacgatggctgccaatgaagtgcaagaggagcttctaaagtctctcttgacattgtgcaatactgaatgcagtctatggcgtgcacttcaaggccgtgaaggagttcagctgttgatatctcttctggggctttcatcagaacagcagcaagaatgtgctgttgccctcctttgccttttatctaatgaaaatgatgaaagtaaatgggccattactgctgctggtggtatacctcctcttgttcaaattttggagtcaggatctgcaaaagcaaaggaagactcagcaacaatccttaggaacctatgcgatcacagtgaggatatacgtgcttgtgttgaaagtgctgaagtcgttcctgcattgctgtggctgttgaagaatggaagcccaaatgggaaggagattgcagcaaagactttgaatcacttaattcataaatctgatacagcaactatcagtcagcttacagcattattgactagtgatttacctgaatctaaggtttatgttttagatgctttgagaagtatgctttcagttgttgctcttactgatcttctacgtgaaggtagtgctgctagtgatgcaattgttacaatgataaaactattgagctcaaccaaggaagaaactcaggcaaagtctgcatctgctctggcgggaatttttgaaacgaggaaagatgtgcgtgaaagcagcattgctgttaaaactctttggtcagcaatgaagttgcttaatgttgaatctgaaagtatcttaatggagtcctcgcgctgcttggctgctatatttctttccatcaaagagaacaaggatatggctgctattgctagagatgcattaccctccctagctgcactagctaactcttcagttttagaagtggcagagctggcaacatgtgctgtggcaaatcttattttggatagtgaaattgctgagaaagctgttgcagaagaagtcatcttggctgctaccagagtattacgtgaaggcacaatttctggaaaaacacatgctgctgcagcaattgctcgcctcttacattctaagaggcaagttgattattctgtaactgattgtgtgaatcgagctggcactgttcttgcattagtttctttcttagactttgctattgatgaacatagttccacatcagaagctcttgaagcacttgccatgctttccaggtcagatttgaccagtgcacacagtaaacctgcttgggcagttttagctgaatttcctaaaagcataatcccaatagttttgtctattgctgattcaacgccagtgttgcaggataaagctattgaaatattatctcgattatgtaaggatcagccttttgttctgggagacactgttgttactgcctctggatgtatatcttctatagctaaaaggataatcaattccacttctaaaaatgtaaaggtcaaaattggaggagctgctgttcttatttgtgctgctaaagtaaatcatcagaagctggtggaggacctcaatttatcaaacttgtgtgctaatcttgttcagtctctggtcgatatgcttattttttcacaggctacattggataatcagggtgatgacagcagggaagttatcagcatttgcaggcatacaaaagaagccaatgattgtaaatcaagcactggcaccgctcttatttccagtgccaacttagctatatggttactgtctgttcttgcttgccatgatgaaaaaagtaaaattgcaataatggaggctggagcaattgaggttctcactgacaggattgcagattgtttctcacaatatagtcagattgattataaagaagatagcagtatgtggatttgtgctttgttgttggcagtattatttcaagatagggatatcatacgagcgcatgcaaccatgaaatctataccagcccttgccaacttattgaagtcagaggaatcagcgaacagatattttgctgcacaatcaatagctagcctagtctgtaatggtagcaggggaacacttctgtctgtggcaaattctggggcagcaggtggacttatctccttgcttggctgtgctgattctgatatacaggatcttctggaattgtcagatgaattttctttggtgcattatcctgatcaagttgctcttgagaggttgtttagagttgatgacataagagttggtgccacttctcggaaggcaatacctgctctagttgatctgctcaaaccaattccagaacgcccaggagcaccatttttagcacttgggcttttgactcagctttctatagattgtccatcaaataagattttaatggttgaggcaggggccctagaggcactttccaagtatctttcactaggtccgcaagatgcaacggaagaagctgctacagatttgttaggaattctgtttagcagtgcagaaattcggagacatgagtcagcatttggagctgttactcaacttgtagctgtcttgcgtttaggaggaagagctgcaaggtatagggctgcaaaagctttggaaagtttattctctgctgaccatattagaaatgcagagactgctcgacaagctgttcaacccttggtggagattcttaatactggtttagagagagagcagcatgctgcaattgctgcattggttaggttactgagtgaaaacccttcaaaagcacttgctgttgcagatgttgagatgaatgcagtggatgttctttgcaggattctctcatcagattgctcaatggacctcaaaggggatgctgctgaattatgttctgttctttttggaaatacaaggattcggtctacaatggctgctgcacattgtgttgaacctctggtctctctccttgtaagtgagtttagtcctgctcaccattcagttgtccgtgcattggataggcttgttgatgatgagcaactggctgaattagttgctgcacatggtgcagttattcctcttgttggcctactttatggtaggaatcatgtacttcatgaggccatttccagagctctggtcaagttaggaaaagacaggccagcttgtaaaatggaaatggtgaaagctggagttattgaaagcatacttgacatccttcatgaagcacctgattatctatgtgcagcttttgcagaattgttgcgtatattgaccaataatgctagcatagctaaaggaccatcggctgctaaagtagttgaacccctgtttatgttgctgacaagagaagaatttgggccagatggacaacatagtgcattgcaggttttagttaatatcttagaacatccgcagtgtcgtgctgattacacattgacttgtcaccaagttattgaacctcttatccctttgcttgattctccaatatcagcagtgcaacagttggctgctgagcttctctcgcatctacttttagaagaacaccttcagaaagatccggtgacgcaacaggtaattggccctcttatacgagttcttggttctggtatacatatattgcagcaaagagctgtaaaggccctggtcagtattgcattgatatggccaaatgaaattgcaaaagaaggtggtgttattgaaatttcaaaagttatattgcaatctgatccttccattcctcatgctttatgggagtctgctgcctctgttttggctagtattctacaatttagttctgaatactacttggaagttccagttgctgttttggttaggctgcttcggtctggcttagaaagcacagttgttggtgcattaaatgctcttcttgtgttggaaagtgatgacggaactagcgctgaagcaatggctgaaagtggtgctatagaggctctattggagctcctaagatctcatcagtgcgaggaaactgctgcaagactcttagaagttttgcttaacaatgtaaagatcagagaaacaaaagttaccaagtcagccatcttaccattatcccattatctcttggacccacaaacccaagcacaacaagcaaggctattagcaactttggctcttggtgatctatttcagaatgagggtcttgctcggacaagtgatgcagtttcagcttgtcgtgctttagtgaatgtgcttgaagaccaaccaactgaagaaatgaaagttgtagccatatgtgctctgcaaaaccttgtgatgtacagtcgatcaaataaaagagcagttgcagaggcgggtggggttcaggttatactggatctgataggttcaagtgatcctgaaacatctgttcaggctgcaatgtttattaaacttctattttcaaatcataccattcaagagtatgcttctagtgaaacagtcagagcaataactgctgctattgaaaaggacttatgggctactggatctgtgaatgatgagtatcttaaagccttaaattctctatttagcaacttcccaagactgagagcaactgaaccagcaacacttagcattccccatttggttacgtccttaaagacaggctctgaggctactcaggaagctgccttgaatgcacttttcctgcttaggcaagcttggtcagcatgtccagcagaagtttcaagagctcagtcaatagcagctgcagatgctatacctttgctgcagtacttaatccagtctggcccacctcgctttcaggagaaggcagaatttttattgcagtgtttgccaggaacattggtggtgatcatcaagcgcggtaacaacatgaagcaatctgttggaaacccaagtgttttttgcaagcttacactcggaaacactcctccaaggcaaaccaaggtggtctcaactggccctaatccggagtgggatgagagctttacatggtcctttgagagtcctccaaaaggccaaaagcttcacatttcttgcaaaaacaagagcaaaatgggaaagagttcatttgggaaagtgacaatccagattgatcgggtagtaatgctaggtgcagtatctggagagtacactctgttgccggaaaaggataaatcctatcgcgatatcgccccccactatgtctactcgactactccgactccgcgtctccctccgacggtccggccctccttccgcgccactgcactcggcctctttgttcaccgtcgtcgcagcgctaaggtctccgctccacctcgctctctgatgcttcgcatctccgtccctccgcgccgttgcgctcgctccgcctcttcctccctcgcggttgtgcgactgcgtgactgcgtcctttctcaggtctctgctccgcctttctctttggcgcttcgcatctccatcctctctcaatctctctgcgcgactgcgctacgccggcgatgctgccgcaacctctctgtcactctcctacgtctacatggcactgaaaccatcactgtggtgaatgtgtctgaaacataa

SEQ ID NO: 18524 - DNA, 13797 bp, Glycine max
  Clone ID: PAT_MRT3847_116731C.1
atggctacctcactcgcttggagacttgctgccaacaatggcaccacccttgccgcaaatgatctggaaagaaatggtgacgggaggactcaagattcagagcccccaactccacattctgttctgaagatgggattgagagagcgtaacagcagcatggaggatccagatgggacattagctagtgttgcccaatgcattgagcagctgcgtcagagctcatcttctgtgcaggagaaagagtattccttaaggcagttgttggagcttatagatctgcgtgaaaatgcttttagtgctgttggatctcactctcaggcagttccagtacttgtttcccttctccggtccggttcattgaatgtgaagatacaggcagcaactgtcttgggctccctttgtaaagaaaatgagctaagggtgaaggtcttgcttggaggatgcattcctccattgcttggtctactaaagtccagttctactgaaggccaaattgctgctgcaaagactatttatgctgtctctcaaggtggtgtaaaagatcatgttggttcaaaaattttttcaactgaaggagttgtaccagtgctctgggagcagctgaaaactggcctgaaggcaggaaatgtagttgaaggtttattgactggtgcattgaaaaatctctccagcaatactgagggattctggaatgcaacaatacgagctggagcagtggacatattagtgaagttactggcaacgggacagcctagcagtttagctaatgtgtgcaatttacttgcttctgtaatggtggaggatgcatctgtttgttcaaaggtgttgacagcggaggtgacaaaacaacttctgaaactattaggcccaggtaatgatgactctgttagagctgaagcagctggtgctctgaattctctttctgcccagtgcaaagaggcacggcgagagatagccaatgctaatggtattcctgctttgattaatgctaccatagctccttccaaagaatacatgcagggtgagtgtgctcaagcattacaggagaatgctatgtgtgctctagcaaacatctctgggggtttgtcttttgtcatatctagccttggccaaagtcttgaatcatgcacctcacctacccaaattgctgacacattaggagctttggcatcagctctcatgatatatgataacaaggcagaatcttccagagcatcagatcctttggttgtcgagcagacattactcaagcaatttaaacctcgcttgcccttccttgtacaggaacgaaccattgaagcacttgctagtttgtatggaaattccatactttcaaataaactcgcaaattctgatgcaaaacacctgcttgttggtttgataacaatggcagctaatgaagttcaagacgagcttataaaagctctgttgacactgtgcaaaagtgaaggcagtctatggcgtgcacttcagggccgtgaaggggttcagctattgatatcccttttggggctttcatcagaacagcagcaagagtgtgcagttgccctgctttgccttctatcatatgaaaatgatgaaagtaaatgggcaattactgctgctggtggcatacctccacttgttcaaattttggagacaggatctgcaaaagcaaaggaagattcagcaacaatccttaagaacctgtgcaatcatagcgaagatatacgtgcttgcgttgaaagtgctgatgctgttcctgcattgttgtggctattgaagaatggaagtccaaatgggaaggatattgcagcaaagactttaaatcatttaatacataaatctgacactacaaccattagtcagcttacagctttattgactagtgatcttcctgattctaaggtttatgtcttggatgctttgagaagtatgctttctgttgctccccttagtgaaattttacgtgaaggtagtgcttccagtgatgcatttgataccatgataatattattgagctctaccaaagaagaaactcaggaaaagtctgcatcagctctggcaggaatttttgaaacaaggaaagatgtgcgtgaaagtagcattgctgttaaaactcttttgtcagccatgaaattgcttaatgctgaatctgaaagtatcctgattgagtcctcacactgcctggctgcaatatttctttccatcaaagagaacagggatgtagctgctgttgctagagacacattatccaccctagttgcactagcaaactcttcagttttggaagttgcagagatggccacgtgtgctctggcaaacctcattttggatagtgaaattgcagagaaagctattgcagaagaagttatcttacctgctactagaatattatgtgaaggcacaatttctggaaaaacccatgctgcagcagcaattgctcgtctcctgcattctcgggatgttgattatgctgtaactgattgtgtgaatcgtgctggaactgttcttgcattagtttctttcttagattctgctgttaatggatctgttgccacatcagaggctctagaagcacttgccatcctgtccaggtcagaagagaccagtgcaaatattaaatctgcttgtgcagttttggctgaattccctaaaagcataagcccaatagtcttgtgtattgttgattcagagccaacattgcaagataaaacaattgagattttatctcgattgtgtaaggatcagcctgttgttttaggcgatactatcgtgtcagcacctggatgtatatcttcaatagctaagaggataattagttccacagatgtcaaggccaaaattgggggagcagcacttcttatttgtactgcgaaagccaatcatcagagactggtggaggatctccattcgtcaaacttgtgtgccgatcttattcggtctcttgttgatatgcttacttctgcacagccttctttgggttacctggatgatgacaacaaggaattcattagcatatgcaggtacacaagagaagaggccaatggttgtgaatccaacactagcactagcattatatgtggtgctgacttggcgatatggttactgtctattctggcttgtcatgatgaaaaaaataaaattgcaataatggaggctggagcaatcgatgttctcattgacaggatctcaaattgtttctcacaatattctcaggtatttaagtgccttttcagtaaatccaaagaaatagttagtctatttgattctgatcataggacttcagggggtgggggtgaaaggttgtatgtttcagaatcctcccttatgatgaacatgcagattgaatacaaagaagatagcagcatgtggattcatgctttgttgttggcaatattatttcaaaatagagatatcatacgggcacatcccaccattaaatctgtaccagcacttaccagtttattgaagtcagaggaatcagcaaacaaatattttgctgcacaatcaatagctagccttgtctgtaatggtagcaggggaacacttttgtctgtggcaaattctggggcagcaggtggacttatctctttgcttggctgtgctgatactgatatacaggatcttctggaattgtcagaggaattttctttggtgcgttatcctgatcaagtggctcttgagaggttgtttagagttgatgatataagagtgggagccacttctcggaaggcaatacctgctctagttgatctgctcaaaccaattccagatcgtccaggagcaccatttttggcacttgggcttttgactcagcttggtaaagattgtccttcaaatatgagtgtaatggtggagtctggggccttagaggcacttacgaagtatctttcactgagtccacaagatgcaactgaagaagctgctacagatctgctaggaatcctgtttagcagtgctgaaatacgaaaacatgaatcagcatatggtgctgttgctcaacttgtagctgttctacgtttaggaggaagaggagcaaggtatagtgctgcaaaagccttggaaagtttgttttctgctgaccacattagaaatgcagagattgctcggcaagctgttcaaccattggtggagattctcagtaccggttcagaaaaggagcagcatgctgctattgctgcattggttgggttactgagtgaaaacccatcaagagcacttgctgttgctgatgttgagatgaatgcagtggaagttctttgtaggatcatttcatcaaattgttcaatagacttgaaaggggatgctgctgaattatgctgtgctctttttggaaatacgaggattcggtccacagcagctgctgcatgctgtgtcgaaccacttgtctctctccttgtgactcagttcagtcccgctcagctttcagttgtccgggcattggataggcttgttgatgatgagcaactggctgaattagttgctgcacatggtgcagttgttcctcttgttggtctactgtctggtaggaactatatacttcatgaggctatttccagagctctggtcaagttaggaaaagacaggcctgcttgtaaagtggaaatggtgaaagttggagttattgaaagcgtacttgacatcttacatgaaggacctgattatctatgtgcagcttttgctgaactgttgcgtatattgaccaataatgctagcatagctaaaggaccatctgctgctaaagtggttgaacccttgtttttgttgttgacaagacaggaatttgggcctgatggacagcacagtgcattgcaggttttggttaatatcttagaacatccacagtgtcgtgctgaccattcattgacttctcgccaagttattgaaccacttatccatttgcttgactctccaatttcagcagtgcaacagttggctgctgagcttctttcacatctacttgtagaagaacgccttcagaaggatccagtgacacagcaagccattggccctctcgttcgagttcttggttctggtatacacatattgcagcaaagagctgtaaaagccctagttagtattgcactaacatggcctaatgaaattgctaaagagggtggtgttattgaaatttccaaagtgatattgcaagctgacccttcccttcctcatgctttatgggaatctgctgcctcggttttgtcaagtattctgcagtttagctctgaattctacttggaagttcctattgctgtattggtaaggttgcttcgatcaggctcagatagcacagttgttggtgctttaaatgctcttttggtgttggaaaatgatgacggaactagtgcagaagctatggctgaaagtggtgctatagaggctctcttggagctcctacgatctcatcagtgtgaggaaattgctgcaagacttttagaagtattgctgaacaatgtgaagattcgagaaacgaaagtaacaaagtcagctatcgtaccattatcacagtatcttttggacccacaaactcaagcacagcaggcaaggttgttggcaactttggctcttggggatctgtttcagaatgaggctcttgctcgaacaagtgatgcagtttcagcttgtcgtgctttagtgaatgtgcttgaagagcaaccaacagaagaaatgaaagttgtagccatatgtgctttgcagaatcttgtgatgtacagtcgatcaaataggagagcagttgcagaggccggtggtgttcaggttgtattggatctgataggttcaagtgatccagaaacatcaattcaggcggcaatgtttgttaaacttctcttctcaaataatactattcaagagtacgcttctagtgaaacagtcagagcaattactgccgctattgagaaagatttatgggcttctggaactgtgaatgacgagtatctgaaagccttaaattctctatttaccaacttcccaagacttagagcaactgaaccagcaacccttagcattccccatctggttacagccttaaagacaggttcagaggcttgtcaggaagctgcattggatgcacttttcctgctcagacaagcttggtcagcatgcccagctgaagtttctagagctcagtcaattgcagctgcagatgcaattccattgctgcagtacttaatccagtctgggccacctcggtttcaggagaaagcagaatttttattgcagtgtttgccagggacattggtggtgatcatcaagcgtggtaacaatatgaagcagtctgttggaaacccaagtgtttactgcaagcttacacttggcaacactccaccaaggcaaacccagaggggccacttgattttgtctgtgtatgcactaggatccagtgacatggatataaaagtggtttcaactggccctaatccagagtggggtgagagcttttcatggacctttgaaagtcctccaaaaggccagaagcttcatatttcttgcaaaaataagagcaaagtgggaaagagtaaatttgggaaagttacaatccagattgatcgagtggtaatgcttggatcagtagctggagagtatgctttgttgcctcaaagtaaaagtggccccccacggaatctagaaatagaatttcagtggtctaacaagtgataccatccagctttcaaattggaacgttaaagatcaagctggaaagaaatttttggattttttttttattacaccacatgtatatagctgttgtttatttttggtcaaaacagattcttttgtcataatattcttttgtaacttgatctttcattcctaggataaacactaggagcacgaagatcaggccagcttcgagtttcttgtatgattctttgcttgttgtcaatttaaagtgatatagcgagtctgtttttgtcttttttgctttggggcttgtatgagtacgacgacttagtataattatttgacgctaaattgaatgtaaaataacagtgacaaatattgtcgtacttgtagtgtggatccataatggagcttgtgcttgcctttaaaaaaagacaaaaacagactcgatatataaacaacccatcttaaattgacaacgtgcaaaatcatacaggtattcgaagcagattacttcgtgtgcccctaggcatttaacctagggaacgaaggatcaagttacaaaagaatattattttaaaagaatttgtttgggacttagaccaaaaaacaaataactgtggctatgtacactagcaagataaataatacaaaatttagacaaaaatttcttttcaaccatgtatcctgttttccaatttcaaagccgtcacagtaaagacggaaacaggtatatcacttgttagaccactgaaattcaatttctaaattcctcgagggtccacttttactttccggcaacagagtgtactcaccagatactgctccaagcattactacccgatcaatctggatcgtcactttcccaaatgaactctttcccattttgctcttgtttttgcaagaaatgtgaagcttctgaccttttggaggactctcaaacgaccatgtaaagctctcatcccactccggattagggccagttgagaccacctgggtttgccttggaggagtgttgccaagtgtaagcttgcagtaaacacttgggtttccaacagactgcttcatattgttaccacgcttgatgatcaccaccaatgtccctggcaaacactgcaataaaaattctgctttctcctgaaaccgaggtggcccagactggattaagtactgcagcaatggaattgcatctgcagctgcaattgactgagctctagaaacttcagctgggcatgctgaccaagcttgtctgagcaggaaaagtgcatccaatgcagcttcctgacaagcctctgaacctgtctttaaggctgtaaccagatggggaatgctaagggttgctggttcagttgctctaagtcttgggaagttggtaaatagagaatttaaggctttcagatactcgtcattcacagttccagaagcccataaatctttctcaatagcggcagtaattgctctgactgtttcactagaagcgtactcttgaatagtattatttgagaagagaagtttaacaaacattgccgcctgaattgatgtttctggatcacttgaacctatcagatccaatacaacctgaacaccaccggcctctgcaactgctctcctatttgatcgactgtacatcacaagattctgcaaagcacatatggctacaactttcatttcttctgttggttgctcttcaagcacattcactaaagcacgacaagctgaaactgcatcacttgttcgagcaagagcctcattctgaaacagatccccaagagccaaagttgccaacaaccttgcctgctgtgcttgagtttgtgggtccaaaagatactgtgataatggtacgatagctgactttgttactttcgtttctcgaatcttcacattgttcagcaatacttctaaaagtcttgcagcagtttcctcacactgatgagatcgtaggagctccaagagagcctctatagcaccactttcagccatagcttctgcactagttccatcatcattttccaacaccaaaagagcatttaaagcaccaacaactgtgctatctgagcctgatcgaagcaaccttaccaatacagcaataggaacttccaagtagaattcagagctaaactgcagaatacttgacaaaaccgaggcagcagattcccataaagcatgaggaagggaagggtcagcttgcaatataactttggaaatttcaataacaccaccctctttagcaatttcattaggccatgttagtgcaatactaaccagggcttttacagctctttgctgcaatatgtgtataccagaaccaagaactcgaataagagggccaattgcttgctgtgtcaccggatccttctgaaggcgttcttctacaagtagatgcgagagaagctcagcagccaactgttgcactgctgatattggagaatcaagcaaagggataagaggttcaataacttggtgagaagtcaatgagtaatcagcacgacactgcggatgttctaagatattaactaaaacctgcaatgcactatgttgtccatcaggcccaaattcttctcttgtcagcaacataaacaggggttcaaccactttagcagccgatggtcctttagctatgctagcattattggtcaatatacgcaacaattcagcaaaagctgcacatagataatcaggtgcttcatgtaagatgtcaagtacgctttcaataactccagctttcaccatttccactttacaagcaggcctgtcttttcctaacttgaccagagctctggaaatagcctcatgaagtatatagttcctaccagacagtagaccaacaagaggaacaactgcaccatgtgcagcaactaattcagccagttgctcatcatcaacaagcctatccaatgcccggacaactgaaagctgagcgggactgaactgagtcacaaggagagagacaagtggttcgacacagcatgcagcagctgctgtggaccgaatcctcgtatttccaaaaagagcacagcataattcagcagcatcccctttcaagtctattgaacaatttgatgaaatgatcctacaaagaacttccactgcattcatctcaacatcagcaacagcaagtgctcttgatgggttttcactcagtaacccaaccaatgcagcaatagcagcatgctgctccttttctgaaccggtactgagaatctccaccaatggttgaacagcttgccgagcaatctctgcatttctaatgtggtcagcagaaaacaaactttccaaggcttttgcagcactataccttgctcctcttcctcctaaacgtagaacagctacaagttgagcaacagcaccatatgctgattcatgttttcgtatttcagcactgctaaacaggattcctagcagatctgtagcagcttcttcagttgcatcttgtggactcagtgaaagatacttcgtaagtgcctctaaggccccagactccaccattacactcatatttgaaggacaatctttaccaagctgagtcaaaagcccaagtgccaaaaatggtgctcctggacgatctggaattggtttgagcagatcaactagagcaggtattgccttccgagaagtggctcccactcttatatcatcaactctaaacaacctctcaagagccacttgatcaggataacgcaccaaagaaaattcctctgacaattccagaagatcctgtatatcagtatcagcacagccaagcaaagagataagtccacctgctgccccagaatttgccacagacaaaagtgttcccctgctaccattacagacaaggctagctattgattgtgcagcaaaatatttgtttgctgattcctctgacttcaataaactggtaagtgctggtacagatttaatggtgggatgtgcccgtatgatatctctattttgaaataatattgccaacaacaaagcatgaatccacatgctgctatcttctttgtattcaatctgagaatattgtgagaaacaatttgagatcctgtcaatgagaacatcgattgctccagcctccattattgcaattttatttttttcatcatgacaagccagaatagacagtaaccatatcgccaagtcagcaccacatataatgctagtgctagtgttggattcacaaccattggcctcttctcttgtgtacctgcatatgctaatgaattccttgttgtcatcatccaggtaacccaaagaaggctgtgcagaagtaagcatatcaacaagagaccgaataagatcggcacacaagtttgacgaatggagatcctccaccagtctctgatgattggctttcgcagtacaaataagaagtgctgctcccccaattttggccttgacatctgtggaactaattatcctcttagctattgaagatatacatccaggtgctgacacgatagtatcgcctaaaacaacaggctgatccttacacaatcgagataaaatctcaattgttttatcttgcaatgttggctctgaatcaacaatacacaagactattgggcttatgcttttagggaattcagccaaaactgcacaagcagatttaatatttgcactggtctcttctgacctggacaggatggcaagtgcttctagagcctctgatgtggcaacagatccattaacagcagaatctaagaaagaaactaatgcaagaacagttccagcacgattcacacaatcagttacagcataatcaacatcccgagaatgcaggagacgagcaattgctgctgcagcatgggtttttccagaaattgtgccttcacataatattctagtagcaggtaagataacttcttctgcaatagctttctctgcaatttcactatccaaaatgaggtttgccagagcacacgtggccatctctgcaacttccaaaactgaagagtttgctagtgcaactagggtggataatgtgtctctagcaacagcagctacatccctgttctctttgatggaaagaaatattgcagccaggcagtgtgaggactcaatcaggatactttcagattcagcattaagcaatttcatggctgacaaaagagttttaacagcaatgctactttcacgcacatctttccttgtttcaaaaattcctgccagagctgatgcagacttttcctgagtttcttctttggtagagctcaataatattatcatggtatcaaatgcatcactggaagcactaccttcacgtaaaatttcactaaggggagcaacagaaagcatacttctcaaagcatccaagacataaaccttagaatcaggaagatcactagtcaataaagctgtaagctgactaatggttgtagtgtcagatttatgtattaaatgatttaaagtctttgctgcaatatccttcccatttggacttccattcttcaatagccacaacaatgcaggaacagcatcagcactttcaacgcaagcacgtatatcttcgctatgattgcacaggttcttaaggattgttgctgaatcttcctttgcttttgcagatcctgtctccaaaatttgaacaagtggaggtatgccaccagcagcagtaattgcccatttactttcatcattttcatatgatagaaggcaaagcagggcaactgcacactcttgctgctgttctgatgaaagccccaaaagggatatcaatagctgaaccccttcacggccctgaagtgcacgccatagactgccttcacttttgcacagtgtcaacagagcttttataagctcgtcttgaacttcattagctgccattgttatcaaaccaacaagcaggtgttttgcatcagaatttgcgagtttatttgaaagtatggaatttccatacaaactagcaagtgcttcaatggttcgttcctgtacaaggaagggcaagcgaggtttaaattgcttgagtaatgtctgctcgacaaccaaaggatctgatgctctggaagattctgccttgttatcatatatcatgagagctgatgccaaagctcctaatgtgtcagcaatttgggtaggtgaggtgcatgattcaagactttggccaaggctagatatgacaaaagacaaacccccagagatgtttgctagagcacacatagcattctcctgtaatgcttgagcacactcaccctgcatgtattctttggaaggagctatggtagcattaatcaaagcaggaataccattagcattggctatctctcgccgtgcctctttgcactgggcagaaagagaattcagagcaccagctgcttcagctctaacagagtcatcattacctgggcctaatagtttcagaagttgttttgtcacctccgctgtcaacacctttgaacaaacagatgcatcctccaccattacagaagcaagtaaattgcacacattagctaaactgctaggctgtcccgttgccagtaacttcactaatatgtccactgctccagctcgtattgttgcattccagaatccctcagtattgctggagagatttttcaatgcaccagtcaataaaccttcaactacatttcctgccttcaggccagttttcagctgctcccagagcactggtacaactccttcagttgaaaaaatttttgaaccaacatgatcttttacaccaccttgagagacagcataaatagtctttgcagcagcaatttggccttcagtagaactggactttagtagaccaagcaatggaggaatgcatcctccaagcaagaccttcacccttagctcattttctttacaaagggagcccaagacagttgctgcctgtatcttcacattcaatgaaccggaccggagaagggaaacaagtactggaactgcctgagagtgagatccaacagcactaaaagcattttcacgcagatctataagctccaacaactgccttaaggaatactctttctcctgcacagaagatgagctctgacgcagctgctcaatgcattgggcaacactagctaatgtcccatctggatcctccatgctgctgttacgctctctcaatcccatcttcagaacagaatgtggagttgggggctctgaatcttgagtcctcccgtcaccatttctttccagatcatttgcggcaagggtggtgccattgttggcagcaagtctccaagcgagtgaggtagccat

SEQ ID NO: 18525 - DNA, 362 bp, Glycine max
  Clone ID: PAT_MRT3847_116732C.1
ccaacccccccacaaagtaggaccagtgaaaaattggaagcattactttttttttttttttaagttcaggatggatttaccttaaattttgacccagtctgtaaaagggtcaggaataaggtagggggaatctgccaagttttgcccaaaaacggaatttggttttaaagatatatgacctcaggggcttattcaaaataattaaaataaacctttttcctttttcaggtttaaaaggtatagaaaaatctacaatccaaaggggtttaacggatttataaaatgttcctttaaaaatacaaacaacattttttttaaggagacatgctttaattaaaattagctcgctgcattataatgtt

SEQ ID NO: 18526 - DNA, 628 bp, Glycine max
  Clone ID: PAT_MRT3847_116733C.1
atttctattctttattgttattttatttttctaattatcatgtgatgtcttggatttcatttgttaggctttttatcattctaatcacattgataatgatgttgattcaactatgttatttttttctgacctttctcttaaacaatagtcaagatgtacatgtgattgataacaccaattcaatatataccctatattgtatataagattatatttattagacaatatttgccttcatgaaatacttgatgttaaatataaagtatccaaaactacaaataaaaataaaaatcctaacaaaatcgttgatgtttttctctcaatccctcttcatctccaaaaccaccttctctttcaacccttcttcatccctaacttctcatttttccttgtcaagatcattaaaataccctttgcacacttttccattaaagccctttgtttgttttattgtttgatccgaaaaacaaaacactaccttctctagtcttggggctattgtccattgcaagttaaaaacaataaatcatgactgatgataatgccacctctagcaccaccatgggcaaggtatgaaaaaggttgacatcctccccttgcattgatgataggggtgttagcaagatac

SEQ ID NO: 18527 - DNA, 439 bp, Glycine max
  Clone ID: PAT_MRT3847_116734C.1
ggaatacatcgtactcactaatatgcactactatcaaaaacatggagatggggtagacgaattgaatgaaaccttatatgatgaacggttgaacaagggcgacgcatccgcactgcccgagactgttaaaaactacagcaagctgtagtctcttggcttcaagagggtgtgtcttgcgagaggatatctggacaaaatggccgtaacataagcttacctattgagggctggcttccacacatgggagcagataattctcagggatccacatcttatcactccaaatgcactttcatacaaatcagcaatgagagagaatctgcagacgcagggatacagaatagctggactcattggagaccaatggagcgatctgcttggagaccacagacgcgagggcaggaccttaaagcgtcctaatcccatgtactacatagag

SEQ ID NO: 18528 - DNA, 269 bp, Glycine max
  unsure (1)..(269): unsure at all n locations
  Clone ID: PAT_MRT3847_116735C.1
tacaaagaaaaaaaaaaccctagccaacacaaccatcatggccacctctgctattncagcaattcagcattcactggttcaaactgctctgaagcagctcaatgagttcgtccgcaanaccggtggcgccggcaaaggtcgcactaacatgcgccgcaccgtcaagagtgctcctcagagcatttggtatggcctgacgtcccaagtattgggtcccatctcggagcagttccatcntactgacggagattncctggtgactaggatgg

SEQ ID NO: 18529 - DNA, 169 bp, Glycine max
  unsure (1)..(169): unsure at all n locations
  Clone ID: PAT_MRT3847_116736C.1
gcatcgcatggtgctccgcaacaacaaccagcgaacnacgaaaccggtgatgcggaggctagcgagaacaggcggcgcacaaagaaccagaggtctgttctatgaggaaaccgggggcttttttaatattttgctgcagaccctcatacttgacgccctcacctactct

SEQ ID NO: 18530 - DNA, 205 bp, Glycine max
  Clone ID: PAT_MRT3847_116737C.1
gtgaaataacttgcctggattattaaacttgggtaaatgattccattggggtatagggctcaatcacatacaacaagttccgctagttttgctccacacaactgatgacgcactaatctcggactattggctaccaacagcaatgccaggagcaataactcatgtcatgttaagtttgactggaacgacacatcacaggggatag

SEQ ID NO: 18531 - DNA, 397 bp, Glycine max
  Clone ID: PAT_MRT3847_116738C.1
gtggaacagctcgttgataatgcagatgaacgcagggttttggagaacgaagcgctcgatgaggtctgcttccgcacgcttaagctcagtagaccaagctttggggatcggaaacgacgactttcagctaccatgagtggtgtgacatgttgtcttcgtttcgctgggcaagtcaactcagatcttcgcagacttgctgtgactctcattcacttctggcgtctgcactttttcacggtgggtcttgccccactcatatctcgtggttcccaacactacagagctctgacagtacccgaactgagataccagttgtgggatgataggaccatgatgtgtgcagctgatgtacgccatggtcgacacttgacagcatctgcgatgttccgtggtaaca

SEQ ID NO: 18532 - DNA, 367 bp, Glycine max
  unsure (1)..(367): unsure at all n locations
  Clone ID: PAT_MRT3847_116739C.1
ctcgtgggtnntnnnccgggctcnctctcccttccctcccccttccntggcnttcggggcgnntgctggccccnccnnctnntgggtntttgttttgctncnngggctncttttttggggggggggccccttgnnctggggtgcggnggcggnggctntggctgggggccccctnggcggggccnngcgcntgcttgngggggnccggnggcccggcggcnngctcggggggggggccctggccctntnggcggggggggggntcgcgccccncgncccggggggggnngggggggctggngggggncttccgggnncgggggnngggncggnnnggctggggggtgggggggcngggccnggggcn

SEQ ID NO: 18533 - DNA, 387 bp, Glycine max
  Clone ID: PAT_MRT3847_11673C.1
caatttttgagtataaaatgaactgctccttcttcctctgtctcttcactgttcagctgattctgctcaatttcgcagtcgaaggaagagaagatgatgaactgaagagaaagaaacgcaacacggacgtggacgtgctcggcctggtaaatattcacgcgccgtcgcgaaagaatgtgaacgtcgacgttggcggagaagaaagagaccgaaatgacaaattggtcaatgtgaatgtgcagggacacaggaaaaatgtgaacgtcgacgtgggaggagggcattattatgagggaaaagtcgtaaaatacgaaagggacggagagaggggagcggaagtgaatgtggacgtacgagtgccgaaagtgaaggtggatgtggaccgag

SEQ ID NO: 18534 - DNA, 666 bp, Glycine max
  Clone ID: PAT_MRT3847_116740C.1
tcgacctagcgtccgcaatatataaattaaaaacccttctaccctcttcccgctgcttctggttaccatatcaagtcttcctcgacaagcttctttaccatttcgctgccggtgaatagtaaaaccgttctcttcaaatgattgaagcgacttactcatcgcgaatgtttcgcggtgttcgtttcgttctccgtggcttcaatcccgtcgccgaaaatcagatccggttcaagcttgtgaatggcggcggagtcgacgtaggacagtacggtgggagttgcacgcacgtcattgttgataacattgcttatgacgatcctgtgtgtgttgctgctagaaatgatcggaagacggttgtgaccgcattgtgggttgaacacagtgctgatattggaatgcctgttgatgctacttcggttatgtacagacctcttaaagacttagatggaataccaggtgcaaaggatttgataatgtgcttgactggttatctacgtcaggatcgggatgacattatgacaatggttggcctaatgggtgcacagttttctaagcctttggtggcaaacaaggttactcatctgatatgctgcagattgggaggagagaagggtgagcttgccgaccaattgggcgcagtggggctggggggtggtgggggggggg

SEQ ID NO: 18535 - DNA, 183 bp, Glycine max
  Clone ID: PAT_MRT3847_116741C.1
gctctagggctagctgaggccaagccatcaccctcagggcctgcccgtgagcgaccgagctagctggagcaaggctgaccatcggcactggcagtacggcttgagctctacttctcctatcacacggcaggaatagatgatgagcagaaggccctcctcaaactactgagggcagcctatcct

SEQ ID NO: 18536 - DNA, 249 bp, Glycine max
  Clone ID: PAT_MRT3847_116742C.1
gagttggaccagtatgttaaacttcaggtaatatatgaagattgctatctgttttttcattttgtggtgatgtttgtgggaggtcttcttggtacaaatgatttatgttcaaaatatttctgttcattagaaaggtataaaggactggcctgtggcttaatccaataggaaagtgggggaaaatactaatatattattgcagtcattttgggtagaattttctggttatgtttgtccagtcattaccta

SEQ ID NO: 18537 - DNA, 377 bp, Glycine max
  Clone ID: PAT_MRT3847_116743C.1
gttcaggcaacatctatggaaaatggccctgcaaatcatgaggcaatggcacacacctatagcattgctttattattttctcattctaaggtgagtttggtgcttaccaagtgctgtcgttgcttatagattatgattagtaaagactaccaaagttactttgctcattttgtttaatgttactcatttataattacaattgtttaaagacaaatgataactagtgtcttttaaaaaaaaaaaaaagtagaaaattttattaggaaaggaatcatttattatatcagaaacacaaaatgttattagaactttttatgtaactagaaacatttaatagggtatttcatgctacctaactagttccgttaggacactta

SEQ ID NO: 18538 - DNA, 393 bp, Glycine max
  Clone ID: PAT_MRT3847_116744C.1
gattataagaatgtcctttattcattcttcagagaatacacgactgaaagatgaaagtgatatattacaccaactcaacataaaccaagcaaccccctccacctccccaaaaataaataaatccagaagatagaattcaattactagtactgaagataatatgaatgttatttcaactcatacatgtgatacaaatggccgcggggtgacaaaaattatgtataggtctgctaaggtgatttggtaacagaagccctactgatctcagatacacaaaagaatgaaaacagtaaaaagatgtatctacacaaacacatcattgaaggtaaaaaggaaacatgatagtagcgatgacagaatccataagctggatcttaagagttaaaattgata

SEQ ID NO: 18539 - DNA, 260 bp, Glycine max
  Clone ID: PAT_MRT3847_116745C.1
atccagcagacatttccaagatccttgaagcttggcggagagaggcctccaaaagcgttccgtctgcgattgtcagctgcctagaggaagtcagtgccctgagcacagaggagcttggctgacctgggatgccactgaggcttgagaagtgccttgacacattttgaacacatatagtttgatagctttcagaatacgaagggaggtttcagaacaccaagacatataatagataacacagaccagacgctctccttatt

SEQ ID NO: 18540 - DNA, 1817 bp, Glycine max
  Clone ID: PAT_MRT3847_116746C.1
tgatcgtggtagtcgtggaataaatttcattctctcctctatggtgttcaatgtagtacccaccatattagagatatctatggtagcaggtatactggcctacaaatttggagctccctttgcactgattacttccttatcagttgctgcttatgttgcttttacactgactatcacacagtggaggactaagttcaggaaagccatgaataaggcggataatgatgctggtacaagggttattgattcacttattaattatgagactgtgaaatattttaataatgaagtttatgaagctgataactatgacaagtacctaaagaggtatgaggatgctgctctgaaaacccaacgcagtcttgctttgttgaactttggtcaaaatgttatatttagtactgctctttcatcggcaatggttctttgctctcatgggatcatggatggcacaatgactgttggtgatttggtaatggtgaatgggcttctcttccaactatctcttccactcaatttccttggtagtgtttatcgtgagactattcagagtctagttgacatgaagtccatgtttcagttacttgaggaaagagcagatattagggataaagaaaatgcaaagcctctgaaatttaacgggggaagaatccaatttgagaatgtacattttagttacctcacagaaagaaagatactagatggaatatcatttgttgtgccagctggtaaaagtgttgcaattgttgggactagtggaagtggaaaatcaaccattcttagattgctattcagattctttgatcctcattctggaagtataaagatagatgatcaaaatattcgggaggtaacccttgagagtttgcggaagtccattggtgttgttccacaagatactgtacttttcaatgatacaatatttcataacattcactatggtcggctttcagcaacaaaagaggaggtctatgaagctgctcaacaagcagcaattcataacactatcatgaattttcctgataaatattcaactgttgtgggagagcgaggactaaagttaagtggtggtgagaagcaacgtgttgccctggctcgtgcgttcttaaaagcacctgcaatactattgtgcgatgaagctactagtgctcttgacagcacaacagaagcagaaattttaagtgcattaaattcagtagcaaataatcggacttccatattcattgctcacaggcttaccacagcaatgcagtgtgacgagatcattgttttggaaaatgggaaggtgattgagcaaggaccccatgaagtgctcttatcaaaagcaggaagatatgcacagctgtggggacagcaaaataacactgttgatgcaattgatacagccatcaagctagaagcataaaatgatagaaacctttctcccttcctcttgctgaaaaaaaaaatgcataatacaatgttaatagcccattattacaattttgaaatttaatgattcctagcctgttgtgagctttctttagtctgtatattattacaatcgtattgttagctagaccaattaatgcatagatcctttgccgggttatgcagtttgatacattctttgtaaccacatataagttctcggccatgatgaatgaggcttgatgagctttctgcaaagagcaagagtttgtattattggaattcaattatagattgtgtgggtatgtattgttgcataaactaaagcacttttaactatatagaagtgttttcttgtggatgatctataacaggaacagcttttgatgtagttgtttttacattac

SEQ ID NO: 18541 - DNA, 1105 bp, Glycine max
  Clone ID: PAT_MRT3847_116747C.1
cccggctcgacccacgcgtccgaatgatttgaccgttgtaacttgtaacgaagacaagaatgaaaatagaagagagtgacagcggagatcccccaatggcggtaggcggtagtcggtagacggtagatatttaatccgtgtatttaattacagtttttattttttatttttggcatgtttctctcaccatgactaaatgagactgtgagagtgatgactcatgagaaagtgaagcactacttactgactaactaacgagtaaagaggcattaattattaatttgcgaaaggaggaagcattgagattgggagatggagcggcagtggtccggcgaatctggtgggaatgtgatgtcgtcaccatcacacacacactcgcagtcgcgtaacgggcattctcgttcctcttcgctcaccctcactggaggaggaatttcaaccgtcaaaaggactcagaatgttgctgccaaagccgccgctcagcgcctcgcccaggtcatggcttctcagactgccgtcgccgccgccgacgacgacgacgatgaagacgatcttggatttcgctacactgctcctccacctctctctctttccaggggctctgctaaatctccatctcctgcgttagctcggaacctcgtagaagaatcaatgtatcttcgcccagctccaactcctggtaatagaccaccgctaagcctcaggactccagctcctgttccgcccttagaccctcccattcataataataagcccaaagataaaagatttccgtttgatactgcactccttcaaccaaaagattcaggatatcagcgtgaggcttctacactttgtgatgaggttgatatgctgcaggaagagaatcaaagtattctagacaagctcagactcgaggaagacagatgcaaggaatcagaggccagagttagggagcttgaaaagcaggttgcttcccttggagaaggtgtatctttggaagccaaactcttgagcagaaaggaagcagcattgcgtcaaagagaggctgcgcttaaaatgccaaagactctaaggaaggagtttgataggaaatcacatctctacagactgaaatttgagatgc

SEQ ID NO: 18542 - DNA, 2032 bp, Glycine max
  Clone ID: PAT_MRT3847_116748C.1
ggctcgaggaaaaagtgtctctctcacactcggtctgagactaactaacgacttaccagtaaagagacattaattaatttgcaaaaagaagaagcattgagattgggattgggagatggagcggaagtggagcagtgaatctggtgggaatgtgatatcgtcgccatcacactcgcgtaatgggcattctcgctcctcttcgctcactatccccggaggaggaatttcaaccgtcaaaaggactcagaatgttgctgccaaagccgccgctcagcgcctcgcccaggtcatggcttctcagactgccgacgacgacgacgacgacgaagacgatctaggatttcgctacactgctcctccacctctctctctttccaggagctctgctagatctccatctcctgcgttagctcggaacctcgtagaagaatcatcaatgtatcttcgcccagcaccacctgctgctggtaataatagaccaccgctaagcctcaggactccagctcctgttctgccctttgaccctcccattcataataataataagcccaaagataaaagatttccgtttgatgctggactccttcaaccaaaagattcaggagaccagcgtgaggcttctgcacttcgtgatgaggttgatatgctgcaggaagagaatgaaagtattctagacaagctcagactcgaggaagagagatgcaaggaatcagaggccagagttagggagcttgagaagcaggttgcttcccttggagaaggtgtatctttggaagcaaaactcttgagcagaaaggaagcagcattgcgtcaaagagaggctgcgcttaaaaatgccaaagactctaaggaaggagttgataaggaaatcacatctctacagactgaaattgagaatgcaaaagttgagaccgagactgcagtgagacagttaaatggagctgaatctgaagtaaaagctcttcgatcaatgactcaaagaatgatattaactcagaaagaaatggaagaagttgttctaaagaggtgttggcttgctcgttattggggtttagctgcaaaatatggcatctgtgcagatgttgcagtttcaaagtatgaactttggtcatccttagcccctcttccgttcgaggtcgttgtttctgctggacaaaaggctaaggaggaatgctgggaaaaaggtgatgatgcaatagagaagaggagcaaacttgttcctgacttaaatgatcttactggagaaggaaatattgaaagtatgctttcagttgaaatgggactaaaggagcttgcttctttaaaaggttgaggatgctattgtgcgagcactagccaaacaacgggggtccaaattctgctcgacaattagtctcagatattaaatcacctggggaccctaagtttatggaagcatttgaattgagtccagaggaatctgaggatgttcttttcaaggaggcttggctgacatatttttggagaagagccaaagctcatggtatagaggaggaaattgctgaagaacgtcttcggttttggattagtcggagtgggcattcacctacctcacatgatgccgttgatgttgagcaaggactttctgagctgaggaagttggggattgaacatcgactttgggaagcatccagaaaggaagttgatcaggactctactattgcacgaaagctgctgacttgacctgaaatttgtgcttaatttccttgcaaggtttgctgatttatacatatgaattgtgaatttcatcttccttatggagactgtcaccttcccacttttcgttcaaacaaggttactcttactgttaagctctaggtatagtaactgttatgataaatgcatgtttccaagacattaaatgcatgtatcattcatatagtaccttatttataaatttatataagatataaatattttataacaagttataaaattactaaaatgtcaatagttgattttttacttcacgattgtaaatatacttaatcctttaaaatattattctgagttc

SEQ ID NO: 18543 - DNA, 653 bp, Glycine max
  Clone ID: PAT_MRT3847_116749C.1
tttttttttttttttaaggggaaactagcacgttttataaatcaaaataatgtgatgtaagatacatagagtgcaccaaacattcaattcacaaagacattgattcagcaaaacatttcttcattcaaattaccacgaatcattttaaccttttactggtcagtttgccacactattgctatttacatacaacttggattggggaagcatttacaattacttttcccgggccggcagcatcaatgttaaaagtatccagggatgatgagttggttccatttgatcatcagtatattaggtggctgtaatcaccttcttttgggttccttattgcagcataacacaaaaactgcagttcctatgaaacttgttccgagatcaatgggacaaaaaacacccaatgacacgcagtatggcaaacataaatctaattttatctgtctttgactatagcactacctcgtgtattgtgaccctcattagattcttcctcgagttcttttattagcctttcaatctgccttctataaactggcatgaagtgatcactgatcattctctgtgaaagtctaagtttactatatagagaccttgaagttagaaaaatcccaatctcagtctcatttagctcgctactgtctgaacttgcagag

SEQ ID NO: 18544 - DNA, 446 bp, Glycine max
  Clone ID: PAT_MRT3847_11674C.1
cttttctagcatggaaatttctgtcccatgtgggacccccctgaactgggctgtgtttgttttagtcttggtttcctgggtttacagaacggggttgttcttgttggcgtgtgtgcttttcaggcttaactgcgagcttcagatactgaggtttgaagggcttcacaagctctttgaaaggtgtgggtctgatgcaaacatgacatttagagagcacgtgagaattaggaggcaattgtggatcacgagtcatgggtacaggttctttataattagttgtttggtgacagtcacggttagccagttgggttctctcttgatggttttggaatccaaatctgacaccaccttcttcaattccggtgaccttgtgatttttttcggctgtgcaattatgtggattcttctttatgccttatgggtgcggcaggaatcacacacagagc

SEQ ID NO: 18545 - DNA, 268 bp, Glycine max
  unsure (1)..(268): unsure at all n locations
  Clone ID: PAT_MRT3847_116750C.1
cagaattctctaaaagagatctttttctgctctttgaagaaagaagggtctttgcttgattttggngatgtctctgctctcagatctcatcaaccttaacctctccgataccaccgagaaggtgatcnccagagtacatatggatcggtggatcaggaatggacctgaggagnaaagcngggntctcggnggacnantnagcgncnctggtgngcttcncaggagantagntngaannagnccaagtccnggngntganagtggaaat

SEQ ID NO: 18546 - DNA, 489 bp, Glycine max
  Clone ID: PAT_MRT3847_116751C.1
ccgattgagggcaagcttcttatacgggaactttgacaataacaatgtttatccgaaatttgacatttctgttggggctacgcattggtctactatcgttatatctgatgctaatagcatagaaatgcgagagcttatatttttggcttcgagtcctacagtaagtgtatgcttatcgaatgcaacaacaggacaaccatttatatctacactagaacttcggcagttcaacggttcggtttactatacacaatttgagcaacacttctaccttagtgtctctgcaaggataaattttggtgcagagagtgatgctccaattaggtatcctgatgacccttttgatagaatttgggagtcagattctgtgaagaaagctaattatcttgttgatgttgctgctggaactgagaaaatttctacaacagtaccaattgatgtcaacagagatgaaatgcctccagtgaaagtgatgcaaacagctgtagt

SEQ ID NO: 18547 - DNA, 224 bp, Glycine max
  unsure (1)..(224): unsure at all n locations
  Clone ID: PAT_MRT3847_116752C.1
cctcataaatcaacaaaaacctncaaacaacgggcgcgatttataaaaacacatgcccccccacaactaatttaacaacactcccaaaacccaaacaaaccctcaccaacttaatgctctaactaacaaccccctcaaaaacaaaataaatgttaaccgcctcaaataaccatccactcactaatcaatacttcaaaccacccgaaaaacaaactaatcattcc

SEQ ID NO: 18548 - DNA, 661 bp, Glycine max
  Clone ID: PAT_MRT3847_116753C.1
aggagaaatggactgaaatgtggaggcatctcaaaagcatctcccatcattatgaattccggtatcctccaaaaacagaagatgctgttgatatgctgtggagacaggccaagcacaagcttccaggggtcaaactttctgttcatagaaaccggaggttaaaaatcccagattggtggcaggggagatgatttttggggctttcgtgttgatcttgtacattcttcagttacagggacaatcccagaaagggaggaatatcattaatacgacttcttatctcaacattttgaaattgagatttttgtataagttttaatctgctatttgttttggcattggcttctaatttggtgggcatttagtgacatttcacttggggccttgatgttcatgaacattgccacttcctagtcaattgttgtatctcctcttctgggtcatttcgattgaatatggactttctagttgtgcaatcgaagatatgctctcaggaggagggggggagatacgtgagaaagggatttcaatttccactttgtcattctacagttcactcactttataatttgtacatctccattcatgctaaaaaaaaaaaattaaattcattttctttcatgattagcaagccttacgttgtccatgtcatgtgaccgtc

SEQ ID NO: 18549 - DNA, 681 bp, Glycine max
  Clone ID: PAT_MRT3847_116754C.1
cgggtcgccccgcgtccgcctctatcctatgttctgccaatttatttctatggatttgattttttttccctgaaatagctagcctcatcatatccttgagaaacaatattttcaatttttttttccttttgtctatactcaaggtttttattttcttattctttgtttagtgtttatatgttggtattcttcagctagtttctgaattatattgaatatcaccgcctgatcaaccatctatttctcgatggctaattcatacacttgtgaaagccaaatcccacttcttattattaattgtttttattttctctttcaagtcagtgactatgattgtaacatgccatccaatttcttctcttgatcttttaggaaagtttttgttttgatctcaatcaagctcctgttatatacaagagagagagagagagagatgctgtgtttccacagtgagagaaatccaattgaaggcctcataagatttcatcaagaggaatagcaattatagcatcatatctatatatccatgaacaagatcagcaacttgagttgtgttaggagctctgatctcatagatgccaagcttgaagagcatcaactgtgtggatccaaacagtgccccgggtgtggtcacaaatttgaagggaagcccgactggctaggtctaccagcgggagtaaa

SEQ ID NO: 18550 - DNA, 668 bp, Glycine max
  Clone ID: PAT_MRT3847_116755C.1
acaaagcctaacaaatagaattcaggaaacagtaccctcaagctgtcatactttatgctgattactatgatgcctaccgcactgtcatgaagaatccaagcaaatacggattcaaagagaccttcaacgtttgctgtggatcaggagaaccaccttataacttcactgtgtttgccacatgtggcacacctaatgccactgtgtgttcaagcccttctcagtacatcaattgggatggtgttcatctcacggaggccatgtacaaagtaatttctagtatgtttttgcaaggaaatttcacccaacctccgtttaattttttgttggaaaaaaaggagagggtggggtgaatggttagtatttgggatttgcttgtccctatgactttaatgcatcagctaatgtaactataagtgagggaatcaggtcttacctgttttgctacaacttgtgtcctctgcacatcatatatgatgagaagttctaaggaatatgttgtatttgtattagtatctgccaaggctgtcttaaactcggtattagctagtgcttactttgtttagattagttgattttgggttaataaagtgttttttcttttctttttacaaataaatttaaagaaaatgtaattttataatttcattcaataaaaaattatcaggatg

SEQ ID NO: 18551 - DNA, 510 bp, Glycine max
  Clone ID: PAT_MRT3847_116756C.1
ggctcgagcaaaaagtcactgcaataaaaaggttgtgggggcaagagtgttctaccatggatatgaagcagcaattggtagaattaatgagcaaaaagagtataagtcaccaagagatcaagatgggcatggcactcacacagcagctacagttggaggctctcctgtgcatggagctaaccttctaggttatgctaatggcacagcccgaggaatggctccaggtgcaaggattgcagcctacaaagtgtgttgggttggtggttgcttcagctcagatattgtgtcagctattgataaagctgtggctgatggagtgaatgttctttccatctctttgggtggtggagtctcctcttattacagagatagtttatcagtggcagcatttggagcaatggaaggggtgtttttggttcatgttctgctggaaatgcatgacctgaccctgccagcctcaccaatgtgtcaccatggatcaccacagttggagccagcacaatggatagg

SEQ ID NO: 18552 - DNA, 4393 bp, Glycine max
  Clone ID: PAT_MRT3847_116757C.1
tggttgtgacaccttttccacattccaatgtcatccatatcatctggtggagccaggtacatggacaatgtcaagcacccagttagaggcaaaccctgcactactaggtacttggcacccttctcaagcaatgtctgtaaagctcctgagacactgctgattgcaagcttccttatggtttcatctgagacggtagatccaagagtgtaggcatagtcattgactcctatctttcctgacaccactttaggatccaaggtcccttccaagcacatagatcttggatcaaccctgctagaattgctccccatgtacaccaaagggtattgtttctcaattgatagcacatttttccctttatagagtgaaactccagtcacttttttgccattcccaagcctaacatccgctggaaaatccctatccattgtgctggctccaactgtggtgatccatggtgacacattggtgaggctggcagggtcaggtcctgcatttccagcagaacatgaaacaaaaacacccctctccattgctccaaatgctgccactgataaactatctctgtaataagaggagactccaccacccaaagagatggaaagaacattcactccatcagccacagctttatcaatagctgacacaatatctgagctgaagcaaccaccaacccaacacactttgtaggctgcaatccttgcacctggagccattcctcgggctgtgccattagcataacctagaaggttagctccatgcacaggagagcctccaactgtagctgctgtgtgagtgccatgcccatcttgatctcgggggggggcaagtaaggcagtgctggtgctgcagctgcaactgcaagaattggcaaagaaagttttaccaattaaaaaaggatgttatagaaagattacttgagtgaagaagaactcaatcactctgagttgttgttcataaagaagactgcgtttgtgatattttctcctaccatgtctggctttctttgaactttcactcgcagcttcttattcttgtgatctaagttcctctactctcattccaagcgtgggtgtatatcaaggatccggattccttgtggtcggaggaagcacgcatgcacgcagttagacgattagaactgtcataaagattcaacagttgatgaattattttagtaaattcaacttaaaaaacacatttaaaatactaactgtctgatcaaattagacagtccacattcacgattgtgtgaatgcgtgagtgcaggtggagtgatataaaatggaggagagaccagaaacagaactgatatctataccggcgacaccaagggtgtcaaccccggagatactgacaccggggcagaggtcaccaagagcagcatcaaaggaaggaaaatcatggaccccaacttcttttatatcaccaaggtttctgagtccaatagggacgccaatgaagagagtgcttgtaaacatgaagggttacttggaggaagtgggacaccttaccaaactcaaccctcaagatgcttggcttcccatcaccgagtctcgcaatggaaatgctcactatgctgcatttcacaacctcaatgctggtgttggctttcaggccctcgttttgcccgttgcttttgcttatcttggctggagttggggaattctttccttaaccatagcatattgttggcaactttacacgttatggattttggttcagcttcacgaagcagttccaggtaaaagatacaacagatatgtggagctagcacaagcagcatttggggaaagattaggagtctggcttgctctcttcccaactgtttatttgtcagcaggaactgcaacagctttgattcttattggaggagagaccatgaaactgttcttccaaatagtttgtggtcccacttgtacttcaaatcctttaaccacagtggaatggtacttggttttcacttctctatccattgtcctgtctcagcttccaaacctcaattcaattgcaggactctcactcatcggggcagtgacagccataacttactccaccatggtttgggtactctctgtaagccaacaaaggccaccctccatctcctatgaacccctatctttggcacaaccttctgcttctgtatttcttgccatgaatgcacttggaattatagccttttctttcagaggccacaatttggccctagaaattcagtccacaatgccttcaacttttaagcacccggctcgtgtgccaatgtggaaaggagccaaggttgcttatttcttcattgcaatgtgcctcttccctattgctattggtggcttttgggcgtatggcaaccaaatgcctcctggagggattctcactgctttgtatgcatttcacagtcatgacatctcaagaggaatactagccttagctttccttcttgttgtgttcaactgtttgagcagtttccagatatactcaatgcctgcttttgacagttttgaagctggttacaccagtaggacaaaccgtccctgctccatatgggtgagatcaggttttagagtcttctatggatttgtctccttcttcataggagtggcacttcccttcctctcaagtcttgctggtttgttgggaggactcactcttccagtcacttttgcatacccttgcttcatgtgggttctcattaagcagccaccaaaatatagcttcaattggtacttcaattggattctgggttggctgggggttgcttttagcttggccttttccattggaggtatttggagcattgtcaatgatgggcttaaacttaaattcttcaagcccaattgaatttttaataataggccatgcaaatgcacatgcactatatggtaatgctactctttaggcgtttcccaatggtctaataatatagttagtgcatgtcttcttccgccctaagctatctttggtggaagatttggttgtattgtgagaagtggtggtaaaaggaaagccaataattaatgaagagaatgatccttgtatgtctaagtggagacagagttagaccttgcaagttactaaagtttaaagagtatctctccatgccttcaccgttcctcttgttgtggttctcttttcactgggtgatatagcttgttatgtttagaacatttaatggtttgctcttattcatttttgtagagacctccagaacaaccccccctcccccaacaaaaatcgtcaaactctttcaaattatttgtacgttgtaacccgtgtgatttcaaaagttaatttctcagcgaatcctcctttcaatatgacggtaggggggcaagtaaggcagtgaaagtgcttcagccacaaaatcaatcacaagcctaccatctgagtacctattggtggagtggttaaagaaagtggttccatagggagagtttgaaacatggccaaagccacttggaccttctgcattttgggtgttgccagtgtctgtgaaagagtctccaaaggcatagacccttttgaatggccttgttcgtccctcctctgttgctgcagatgcaactgacagaagtgaggacagtgtgcagatggtaattaggaggagggtggtagaaaccatggatgacacagaagaagccattttgaaagggtattccttagttggtttcccacttgaaagggtattccttagcttggtgacttatactctttttgctcattaattctaccaattgctgcttcatatccatggtagaacactcttgcccccacaacctttttattgcagtgactttttgtgaagcctgttccaatctcacatgcacctttccaatgagcaggtactggtctcatgcctacatctttgaagctttcactctctggccaaatcccagtgtctaccactcccactataacatcatggccagctagcttctctgaccacatgttagtgctttttgctggttcaagaccaaggaatattggacttcttgtggtgtgtagctcatactttgtatcagggaatatggccacaacaccttcttcagcctctagcttcttagcttctccttcagttaacttggctgcaactccatgaaaagcattctgataagtgtagattattctctcttcattgtccatatcagcttctggagatgtggacagtgctgatttcacctttgatgaataccattcaaggtggttggggaaggcttttggcattgttgacttatccatttgaatgaggtaagtcttcttagaaaattgagcatttgctgagaacaacattgcaaaaaatagaatatagctcgttagagagcaagccatgtttccctttagggtcttggccatgtttcatgccaagaaagagaaaactagagtgtttgcggacgcgtgg

SEQ ID NO: 18553 - DNA, 632 bp, Glycine max
  unsure (1)..(632): unsure at all n locations
  Clone ID: PAT_MRT3847_116758C.1
acannnaacacacaatgattgtagacttttgaattgcacatcttcagatgtttattattgggtgatcacactcattgttttccaaaattaacatgtcttatttaatagttatattattttttataagtaaaaaatgagcccctttgcaccctaacacgttaaacatacgtaatgtttaagtatccttagtccttagagtgaacattacttttggctcacaatcatatcctttaacaatgttcgccctagcaagttaaacattcttaaatggtaactttgacttaacaaaatccaccaaaatagcatactcctcaatggacttcctatccaaaccattcctcaacagttgaggaaaaaacagccaattcgcggtgaccgccaaaagcgccaccacgagcggccccgacacagcacggtgcagctgccacccacgacggagagccaccttcttcacagccacctccactaccatacacacaccgtgaagcacaaaaaaacacgtaacctcccacgtgggnnnnacacgtgtaagnnaataatataataactcgtgcacaagcccggacacaannnacgtnnnnnncatgncagctgacgtnncacacaaggggccgacaaaacnngtanncata

SEQ ID NO: 18554 - DNA, 2366 bp, Glycine max
  Clone ID: PAT_MRT3847_116759C.1
ccgcacttcgaggcagacaatgaatggaatacaatacaccatcaatacctagttccaaagaacgttttaaattttttttttaaaaaaaaggatgttatagaagattagtggggagggaacaagaactcaatcactgagttgttctttaagaagctgcgtttgtgatattttctcctaccatttctgactttgtttgaactttcactcgcagcttcttattcttgtgatttaagttcctctactctcagtccaagctattgttttggtgggtgtatatcaaggtggagtgatatataaaatggaggagagaccagaagcagaactgatatctataccggcgacacctagggtgtcgacgccggagatactgacaccgggacagaggtcgccaagagcagcatcaaaggaaggaaaatcatggaccccaacttcttttatatcaccaaggtttctgagtccaatagggacgccaatgaagagagtgcttgtaaacatgaagggttacttggaggaggtgggacaccttaccaaactcaaccctcaagatgcttggcttcccatcaccgagtctcgcaatggaaatgctcactatgctgcatttcacaacctcaatgctggtgttggcttccaggccctctttttgccagttgcttttgcttatcttggctggagttggggaattctttccttaaccatagcatattgttggcaactttacacgttatggattttggttcagcttcacgaagcagttccaggtaaaagatacaacagatatgtggagctagcacaagcagcatttggggaaagattaggagtctggcttgctctcttcccaactgtttatttgtcagcaggaactgcaacagctttgattcttattggaggagagaccatgaaactgttcttccaaatagtttgtggtcccacgtgtacctcaaatcctttaaccacagtggagtggtacttggttttcacttccctatccattgtcctgtctcagcttccaaacctcaattcaatagcaggactctcactcataggggcagtgacagccataacttactccaccatggtttgggtcctctctgtaagccaacaaaggccaccctccatctcatatgaacccctatcattgtcacaaccttctgcttctgtatttcttgccatgaatgcacttggaattatagccttttctttcagaggccacaatttggccctagaaattcagtccaccatgccttcaacttttaagcacccggctcgtgtgccaatgtggaaaggagcaaaggttgcttatttcttcattgcaatgtgcctcttccctattgctattggtggcttttgggcctatggcaaccaaatgcctccaggagggattctcactgctttgtatgcatttcacagtcatgacatctcaagaggaatattagccttagctttccttcttgttgtgtttaactgcttgagcagtttccagatatactcaatgcctgcttttgacagttttgaagctggctacaccagtaggacaaaccgtccctgctccatatgggtgagatcaggctttagagtcttctatggatttgtctccttctttataggagtggcacttcccttcctctcaagtcttgcaggtttgttaggaggactcactctcccagtcacttttgcatacccttgcttcatgtgggttcttataaaacagccaccaaaatatagcttcaactggtacttcaactggattctcggttggttgggggttggttttagcttggccttttccattggaggtatttggagcattgtcaatgatgggctcaaatttaaattcttcaagcccaattaaaattttcaataataggccatgcaaatgcagatgcactatatagtaatgctactctttaggcgttttccaatggtctaatatttagtgcatctcttctgccctaagctatctttggtggaagatttggttctattgtggtggtaaaaggaaaaccatataatgaagagaatgatccttgcatgttaagtggagacagggttagaccttgcaagttactcaagtttaaagaatatctctccatgccttcaccgttcctcttgatgtggttctcttatctcttggtgctatagcttgttatgtttagaacaattggtggtttgctcttattaatttttgtaattgtagagacctccagaacaaaaatcgtcaaagtctttcaaattgtacgttgtaacccgtgtggtttcaaaagtgaatttctcagcaaatctatcccctcctttcatttttttttattttttatctttgtattggtgactattaatttggttaatgagaagcagataaatcttatatc

SEQ ID NO: 18555 - DNA, 394 bp, Glycine max
  Clone ID: PAT_MRT3847_11675C.1
gaataacactcatacactggtttctgttctagtgttctgtcaacttaacattgaatccaaatagatatatcttctaaaaaacaacatgtcactatatgatttgctttcaaaactccaaagcacaaaattggttttgggtacaatgagaccacaggacctgcacactgcccaaaatcctcacccttagttcatttttagtggcttcaaaagcatactcaaattaatacataccttcgctccccactcaacatgcttgaagtcatagcctagttgccgccacacggtcattcaatccaattgaaaggcctgatgagagagacagagaaacaattgataagacatattgcaaggaattcatacaggtaagaatttaagatgtattataatgccaaca

SEQ ID NO: 18556 - DNA, 1528 bp, Glycine max
  Clone ID: PAT_MRT3847_116760C.1
cccacgcgtccggggaaaccagcgtccgtccactaaggaataccctttgaaaatggcttcttctgtgtcatccatggtttctaccaccctcctcctaattaccatctgcacactgtcctcacttctgtcagttgcatctgcagcaacagaggagggacgaacaaggccattcaaaagggtctatgcctttggagactctttcacagacactggcaacacccaaaatgcagaaggtccaagtggctttggccatgtttcaaactctccctatggaaccactttctttaaccactccaccaataggtactcagatggtaggcttgtgattgattttgtggctgaagcactttcactgccttacttgcccccctaccgtcatagcaaaggcaatgacacttttggtgttaactttgctgttgctggttccacagccataaaccatttgttctttgtcaagcacaacctctcccttgacatcactcctcagtccatccaaacccagatgatatggttcaacaggtacctggagagccaggactgccaagagtcaaagtgcaatgattttgatgacactctattttggtttggggagattggagtcaatgactatgcctacactcttggatctaccggctcagatgaaaccataaggaagcttgcaatcagcagtgtctcaggagctttacagacattgcttgagaagggtgccaagtacctagtagtgcagggtttgcctctaactgggtgcttgacattgtccatgtacctggctccaccagatgatagggatgacattggatgtgtgaaaagtgtcaacaaccaaagctactaccacaaccttgtgctgcaagacaaattacaagaattcaggaaacagtaccctcaagctgtcatactttatgctgattactatgatgcctaccgcactgtcatgaagaatccaagcaaattcggattcaaagagaccttcaacgtttgctgtggatcgggagaaccaccttacaacttcactgtgtttgccacatgtggcacacctaatgccactgtgtgctcaagcccttctcagtacatcaattgggatggtgttcacctcactctagtatgtttttgcaggaggaaacagtaccctcaagctgtcatactttatgctgattactgtgaggccatgtataaagttatttctagtatgtttttgcaaggaaatttcacccaacctccgtttaattttttgttgggaaaaaaggagagggtggggtgaatggttcacccaagaataatactaatatttgggatttgcttgtccttatgactttaatgcatctgctaatgtaactataagtgagggaatcaggttttacctgttttgctagaacttgtgtcctctgcacatcatgtatgatgagttcaaaggaatatgttgtatttgtatttgtattagtatctgccaaggctgtcttaaactcggtatcagttagtgcttatctagattagttgattttgggttaataaagtggttttctatttaaaa

SEQ ID NO: 18557 - DNA, 643 bp, Glycine max
  Clone ID: PAT_MRT3847_116761C.1
cagagatcaatgaagcctcaaggcttttcattctgcccaatcagcaaaattctgaatcctcagagcatcttgttggactttcggatgatgttggtgctggcttcatatctggtcatagtactcaacctgccacttcttctgagttgaatgtggacaggtctgttgatttgccgcctcaggatgaaattgggaacttgggggtctcaaaagtgatcagggctgatcagaaaagattcttctttgatcttgggagcaataataggggtcatttcttaagaatatctgaggttgcgggttctgatagatcctccattattcttcccctgtcagggctcaagcagtttcatgagattgttggtcactttgtcgaaatcacaaaggaccgaattgagggaatggcggttgctaatgttcgcacaattgatccccctcaaagatgaatgctaacttgggataagaatgggtgttgtcttcgagtctgatttgtgttattttattttattttccctcagcctcctttcttcttctcatattgttcttccattaatgcttttgaaataatgcaaactctggctgggcagcagaatatttgaattgcttggcaaggctaatatgaataggaataacggaagaaaaaaaggat

SEQ ID NO: 18558 - DNA, 1319 bp, Glycine max
  Clone ID: PAT_MRT3847_116762C.1
cgggggggcgcacgcgtccggaaaaccactgaacaagaagaagagtcttcttcgtttaaccaccacatcggagaaacacaaacacacgcgcgcacacacgtgcgtggtgcagactctccagtctcacacacatgtgtccgttgctgctgtaaccgtcgacgaagaagaagaagaaagaaataaaccgtttaaagtaaagcaaaattcgtaaaccaaacaaacccttatgcgtggtgactagtgagtgacgactcatatctgttgcggggttatcgaaattggttattggccgagggagatggaggggaactccggtggatgaggcggcggtggcggtggaaacgacgtggaattgctctgcaagacgctgcaggtggagcacaagctcttctacttcgatctggtgagaatcggaggggccgttttttgaaggtgtctgaagcttctgtcagcagaaaccgtagcactataattgttcctgctggaagctccagggatgaaggatgggcagcattcaggaacgttttggcagagatcaatgaagcctcaaggcttttcattctgcccaatcagcaaaattctgaatcctcagagcgtcttgttggactttcggatgatgttggtgctggcttcatatctggtcatagtactcaacctgccacttcttctgagttgaatgtggacaggtctgttgatttgccgcctcaggatgaaattgggaacttgggggtctcaaaagtaatcagggctgatcagaaaagattcttctttgatcttgggagcaataataggggtcatttcttaagaatatctgaggttgcgggttctgatagatcctccatcattcttcccctgtcagggcttaagcagtttcatgagattgttggtcactttgtggaaatcacaaaggaccgaattgagggaatgacagttgctaatgttcgcacagttgatccccctcaaagatgaatgctaacttggggtattcatggttaataattaatcccccttccaaggtttcaatgggataagaatgggtgttgtctttgagtctgatttgtgtattttattttccctcagcctccttctccttctcatattgttcttccattaatgcttttgaaataatgcaaactgtggttggtccgcagaataatttgaattgcttggcaaggttaatatgaataggaataatgtatttgtttggatagtttggcacccaagctacaatctgtaataatgtttgattgtttattttgcgttccttgcgcagatttcacatggaaaaaaataaaaatgcaagaaccgctcgctgatct

SEQ ID NO: 18559 - DNA, 1704 bp, Glycine max
  Clone ID: PAT_MRT3847_116763C.1
gcattttctcttggagtgaaaagtacccatgatgatgtaactgggaaaccactgaacaagaaggaagagtcttcttcgtttaacctccacattggagtaacacaacccaacgcgcgtggatctgcaaaaccagagaacaatcagaagagtcttcttcgtttaacaacaacatcggagaaagaaacaaacacctgcggcgagcacacacacgtgtgttgtgagcactctccaatctcacacgcatgagtccgatgctgctgtaaccgtcgacgaagaagaagaaagaaaccgttgttgctgtgaccttgaagtgaagcaaaattcgcaaaccaaaccaaacaaaccctaaatgcgcggttactagtgagtgacgattcagatctgttgcgggattatcgaaattggttattggcggagggagatggaggggaactccggcggaggaggcggcggaaacgacgtggaattgctctgcaagacgctgcaggtggagcacaagctcttctacttcgatctgaaggagaaccctcgcggccgctaccttaagatttccgagaagacctccgccaccaggtccaccatcatcgtccccttctctggcatttcctggttcctcgatctcttcaattactacgtcaattccgatgatcaggacctcttcagcaaggaattgcagctcgacaccaaggttttctattttgacattggtgagaatcggaggggccgttttttgaaggtgtctgaagcttctgtcagcagaaaccgtagcactataattgttcctgctggaagctccagggatgaaggatgggcagcattcaggaacgttttggcagagatcaatgaagcctcaaggcttttcattctgcccaatcagcaaaattctgaatcctcagagcgtcttgttggactttcggatgatgttggtgctggcttcatatctggtcatagtactcaacctgccacttcttctgagttgaatgtggacaggtctgttgatttgccgcctcaggatgaaattgggaacttgggggtctcaaaagtaatcagggctgatcagaaaagattcttctttgatcttgggagcaataataggggtcatttcttaagaatatctgaggttgcgggttctgatagatcctccatcattcttcccctgtcagggctcaagcagtttcatgagattgttggtcactttgtggaaatcacaaaggaccgaattgagggaatgacagttgctaatgttcgcacagttgatccccctcaaagatgaatgctaacttggggtattcatggttaataattaatcccccttccaaggtttcaatgggataagaatgggtgttgtctttgagtctgatttgtgtattttattttccctcagcctccttctccttctcatattgttcttccattaatgcttttgaaataatgcaaactgtggttggtcagcagaataatttgaattgcttggcaaggttaatatgaataggaataacggaagaaaaaaaggatcagagacttgtacttgtttggatagtttggcacccaagctacaatctgtaataatgtttgattgtttattttgcgttccttgcacagatttcgcatggatttaagttctcatgcctaccatatgttaggttggtgacttaactattttgtagggtttggtttccatctaacagcatgaactttgctttc

SEQ ID NO: 18560 - DNA, 505 bp, Glycine max
  Clone ID: PAT_MRT3847_116764C.1
aaaaaaaaaacccccccaaaatctcatttcctcattttttaaaacgaggaggaggggggggggaaatacatataaagaaacaacattttccagccccctttttttttaagaaaaggaaaaaagagaaagccaaacccccccccccaaaaaattggcccccccaaaccaaaatatatatatatatgggcttatataacacctaattaattgggggaaaggaaaaaaaaaaagggccaggcctatatgggcctttaataaaaaaaaattaaaaaagacctcgacccggtcctaggaaattgaaattaaagggggccttggccttttaatattcgcaaaagcaaactcatgaggatccccaacgcttttttccatcaaagccttaagggctttttggatggagctaaggcaacactggggggggggggggctagggcccccacgggttgaggaggcgggttcttctccagggagaaacaaaacggtcttgacgcgcccaccaaggggg

SEQ ID NO: 18561 - DNA, 293 bp, Glycine max
  Clone ID: PAT_MRT3847_116765C.1
ctaaacagagatttcccaagctttcattttgagttgtacaaaaaatgggcctggtttggttttgccaactagcctataaagcgtaggaaattgctttctacactacattttttactttgggaccccaaaacttttaatttccccagtttacccttcttcccttgtaacccttttctaccttgcaccactttgacccatgtttcttgctgctccaattttgggcattgaacctgatttttccatggccgatgaataatgcctttccttcctttgtgttggtgccccctccaaat

SEQ ID NO: 18562 - DNA, 276 bp, Glycine max
  Clone ID: PAT_MRT3847_116766C.1
aaacccacagaaactctgatgaaaagtctcgttgctttctgcttggcttcgaagactaacaggggcccatctggtttcacaaatgctctcttcacaaaggctttcatcatcacttttgcgctttttacaatcttttttttgatccaaggccgtttcatcactctggggatgtcgtatcaatatatttttggaaagcttctccctttgaagtatatcatttccatatttttcttttcttaaaacacccaattttttgtttgcattgtatcttctata

SEQ ID NO: 18563 - DNA, 242 bp, Glycine max
  unsure (1)..(242): unsure at all n locations
  Clone ID: PAT_MRT3847_116767C.1
taattaangaatnnantaactntantgtnnantntgttngttgtgtntaaatcnaantnaanagannntcaananaannntnnnagatannataaaannaaganagaagaatnagcttngttatnannggntgtttnttttngngnagngctttnnantanngggannntntnngngataatgattnngantntnttgtntacntctntattntnttggtttganntgnntatgttgtttnn

SEQ ID NO: 18564 - DNA, 487 bp, Glycine max
  Clone ID: PAT_MRT3847_116768C.1
ggccccggcagactcgtgctgacctctagtcgcactacacaacctaggcttggattgctttggagcaaccgttccgatcattgggccacaccactagacgacgtgttgcgctgacttagcgatcttgctaatgattaacttatggctaacgccgacgcttaagaatcatgatcgtgctcgagggctccactaacatcacacgacactcgcgaccccttcgtcgagagatcgataactgccgacacgattgttgcctctacctcgatgccctctacaagctctactacgccttatgagccgtgcgaactacgttaggagcgcgactccgatatacgacaccacttaatctaaagcgattctcaagtgacaaactacatgctcattagcgggatgatgcagcctactagtgctgtgctccgtcctggcgagagcatcatgtcatcagtgcacaagtttgtggagcagccagtacatgattgaaaaccct

SEQ ID NO: 18565 - DNA, 266 bp, Glycine max
  Clone ID: PAT_MRT3847_116769C.1
ggcgctgcggcccctcgcagcagcagcagctcgtcgtcgaccgcggtgccggtgccggtggtgagcagcagcagctcgggagccgcttccagcagctcgtccagctccactgctgaggataatggcactgatggtggcgccgcctccgtgggcgccaacggagtggctgtggtgctcgccgccgctgcggccgtggcagccctgtacgcttagacaagctctccaactcggagtgctggactttttcctgtttcttgtcgtttttt

SEQ ID NO: 18566 - DNA, 651 bp, Glycine max
  Clone ID: PAT_MRT3847_11676C.1
tcgtaccggtgcgagaagacgacagaaggggatgtgttacaatcgtgaagttttttctttgagaagcaaaagatcttagtgcaagtaattaacatggaatctcagcaagcaaaccgtgaagaacttcatgagagggcaaggtaaggtgaaactgtggttcctggtggaaatggcgggaagagtcttgaggctcaagaacatcttgctgaaggaaggaaccgtggagggcagacgaggaaggagcagatggggagagaagggtaccaagagatgggacgcaaaggaggcctcagcgccatggacaagtctggtgtagagcgtgctgaagaggaaggcatagacatcgatgagtctaagtttaagaataaataaagcatgtttgagcaagtagtgatttgttgtagttgctttagctaatatgtgtgttttgatgtagtagtgaatatgtgtaggagactagtactacaaaatatatgttttgatgctcctgtttggtaggaatggttggtattttaggtttaggaaccttaggtagtctttatcgatcttagggcatgatatggatcatgcttatcatgatggtgttgtaggaagtgttaaactatcactggagactcttttactacttataatacatgttctcttatttgc

SEQ ID NO: 18567 - DNA, 584 bp, Glycine max
  unsure (1)..(584): unsure at all n locations
  Clone ID: PAT_MRT3847_116770C.1
ccacgcgtccgttttaaattagttttatattgacacccaatttttcttttaaattttgtgagagataaaagaagcattttatcttttgaaaaaagtcattaaaaaaattaataaaatttagtcttattcaagtagtaaaatatgcagtaatgagcaggatacggtttaggaggaatgaactgaccatcaaagggactcgaacagaaccactatgccataagaggctcttagactaaatatagattggccctagtggatctgaaatagataaatcaaaaataaatgagtaaagaatgattaaaaacatagcctcaaaaaacgaaagccaagaaagtaagatttatagttatttcactgagaagaaaatgcatgataataaaaacatatacctatttacatgattaatattgcatgatactccattnttctccaccaccatgccatcaaaatataatagtaggctggatataaagcttggaaattgagaaaatttgaaatgctccactagaaacaaacttggagattatctcatggacaaaaagatccaggaaaatgcgcatgaaggcacctttttgaccgagcac

SEQ ID NO: 18568 - DNA, 1058 bp, Glycine max
  Clone ID: PAT_MRT3847_116771C.1
ctgcgtcgagacataaaggggtcaaaccttttaattgataaaaatgggatgcttaagattgcagattttggtcttgccaatttttatggtccagatcgtcaccggcctctcacaagccgggttgtgacactatggtacagagctcctgagttattgttaggtgacacagattatggagttggtgttgatctatggagtgctggatgtctcctggcagaaatgtttacaggaattccaatcatgcctggcagaaatgaggttgagcagcttcataaaattttccggctatgtggcacaccatcagaggagtattggagaaaattgaaactttctacaacttttagacctccatcttctttaggtcttttatgcactttgcttgctttggatcctgcattccgtggcagtgcatctaaagctcttaaaaatcagtttttcattactagcccattggcatgtgacctctctggtctgcctgttatcgtcagagaggatgatgagcttgttcaagccaatgaacagatcaagtacatgaactctaaaatcaggcgttctcgtacatatctggagcgtcgtaagaattcaacatctaagagaccaatagaacatactgtatcttccaaacaggaattgataaggaatgcgaaacctgaaacttttgttccaattgaagacacggatagcactagtacctcatctagtgtaaacccaggaggggctaaggaccaatcacctttttttctatctccatttggagctttagatcaaaagctatctccaaaaacccatcaccatgttaatggtggtgaaaaaaacatcaagaaccttcctccattacccaagtcaaaaccaaatgctaccaagaaagatgatatcaaatacagaccagaccactttttcaggtcagcttccaccagagaatttagatacttaaaaagggaggaacgtttactcttggaaattgatgattaggctaatacgagaatatgtaaaggccaatatggttgttttttattttagtatttgatgtattctgaaaagctctacacattctttgc

SEQ ID NO: 18569 - DNA, 152 bp, Glycine max
  Clone ID: PAT_MRT3847_116772C.1
caaccggacaaatattacttgcatgggtcggtggatctacttgtttaactacttgctatgagggtccagtagaatcaacaacattaatttggaacctttttatgtgtaacaccgatgcccctagttcctagtgaatttttttaattattcct

SEQ ID NO: 18570 - DNA, 374 bp, Glycine max
  Clone ID: PAT_MRT3847_116773C.1
tgaaaccaatgcaacaaaaagggaaaaaaaataacaactgaaagtttttctttttgtccataacaattaaaaaggttgaagcagaaccttaggcaattttcaaaaccttgcattttttggtgtgattttggtttatttgagcccagaaaaaaatcgttcaacaattccaaagctgaaaacaagcaacaaatcctttggcaaacaaaaatctgcacttttctgagattctggacgcatggcaaaaatctccataaaaccctaacaactcaattattacaattcacacatctttcaatcgaacaaagcaaaaagcaaagtggtcgccttcatcatcatctttacctttaaactttgcttactctaccatatgcccc

SEQ ID NO: 18571 - DNA, 312 bp, Glycine max
  unsure (1)..(312): unsure at all n locations
  Clone ID: PAT_MRT3847_116774C.1
gacggcgaaaagccaaaaaacaacgaaggacgcagannagcanggctgncacgggggcatcgccgaaagggaacagcagggcnncagcaggcnctacaagcaagncacngagcncaaacnacnaggcaaaaacangcccngangnggaaggcanngnngccaaggcagcgaaggaagccacngcnagggacaaaaccgnnccagcngcacancngcgaangcacnaccangacngnnncggacgggggcgagaagccgcagagccgcgaaaggcaaaaggaagcaacaaagcagaaaaagaagggccaccaa

SEQ ID NO: 18572 - DNA, 642 bp, Glycine max
  Clone ID: PAT_MRT3847_116775C.1
atatttttttttctttttttttttttttttgtttaattttttttttttttctttttttttttctttttttttttttaaaaaaaacttggggggaaaaattgggggccccccttttgatttctcggggaaaaacttttccatccaaattttaaaaaataatgaactttgtttttttttgtttcactttgatttgaaaaaaaaaaaaggcgggtgttccaaccgggggcaaaaccgcgattggtctttcgtgccaaaaaagagggcgattaggctttattttttgaccattgggtgaaatttttggaatgaggaaacttttggtgttaaaaaaattgggaaaaggtgaaaaactcctggagggttaataaaaaaagggggaaaaaaggggctttttggttttccctgtgggacaaaaaaaagactggtaatatttggcgtctgggaaaaatacaacttgagggggggggtggtcctaattttattggggggggaaccttttggttttttggtaggggttgggggttttgggggctctctttttttgggggccaaaatttcaactcggaatttttgggtttcaacttgaagggcattatttttagaggtggccattgtatactggtttttgagaacattaaaatt

SEQ ID NO: 18573 - DNA, 511 bp, Glycine max
  Clone ID: PAT_MRT3847_116776C.1
cttcatgtggagacctttatgatgatcacaaggcttaccatcacagggtttcttacagaatcatactggctgtaattggttctggtttggctgtttttatgtcagtaactatagttgtcttgctgtttatgatcagagagaggcaggaaaaagtagccaaagatgctgggattgttgaagatggcaccaatgacaacccaactataattgcagggacgatttttgttgataatctaaaacaagcagtagatcttgatgtcgtcgttaaagcaactctgaaagacagcaacaagctcagcagtggaactttcagcactgtttacaaggcaatcatgccttctggggtggtcttatctgttaggagactgaagtctgtagacaagacaataatccactaccagaacaagatgatctgaggaacttgaaagactgagcaaagtttgccatgataatctaatgcgtcacattgtctatgtcacttatgaagatgttgctcatcgcctgcatcaat

SEQ ID NO: 18574 - DNA, 463 bp, Glycine max
  unsure (1)..(463): unsure at all n locations
  Clone ID: PAT_MRT3847_116777C.1
ggcagacattaaagttgatgcagcagcancaacaagggcagcgcagccgaagaagaaaacattcaagaaattcancttcaagggcgtggatctggacacacttctggacatgtccaccaacaaactgatgaaaatgttcagtgcacatgcacgtagaaagttccagagaggtctaacgaagaagcccatggccttaattaagaagctccgcaaanctaaaaaggaagcaccancaagtaaaaagccagaaccantacncacccatctccacaacataattattatacctaagatgattaatancatcattaaagtctacaacgacaagactttcaatcgaattaaaatcaaacccgagataattaaccattatctcgctgaattctctatgtcatacaaacccntcaagcattatagacctaatattagtgccactcactcttccagattcattcctctcaaa

SEQ ID NO: 18575 - DNA, 489 bp, Glycine max
  Clone ID: PAT_MRT3847_116778C.1
ttggcatactgagtaaccttcctgttagtgataaaaaagtgacagatgcactgaagagagcgaatttgttgccgattttggtatccattatggatttaggcacaggaagtaactcacctgcaaaaagtatcttaatggagagtattgcaggcattgcaatccggttcacaagctcctctgacaagaaactgcaacttctttcagcaaaacatggggtgattgctttgcttgtaaaactgctctcaagtggttcagcaatcacaaaactcaaagctgcaaccgctctcggtcaactatcgcagaattctccatctcttaggcggtctaggaagtcgaggtggttgtgtgttgctccctcagtggatgcatattgtgaagttcatgatggttattgctttgttagcagcacgttttgtctgatcaaggcaggtgctgtttctccccttatccaaatattggaagataaggattgggaagcagtggaagccg

SEQ ID NO: 18576 - DNA, 1375 bp, Glycine max
  Clone ID: PAT_MRT3847_116779C.1
gtaacttcttgttgcttttcacttatagttaacaactttcatcactaccattacgtgcattacagatccatcattcatcccaagttggtggaaggcgttggcttcgatctttttgatatggatttagagtttgaatatcaagaagaatacaggaggaactcaaggggagtgcaactcttcacttgcaaatggttgcctttctcttctccgaagggcctggttttcctttgccatggttatggtatggaatgcagtggcttcatgagagaatgtggtcgtccgctagcgtgtgccaaatatgctgtgttcggtatggattatgaagggcatggacgttctgaaggtgctcgttgttacataaaaaaatttgataacatcgttaacgattgttatgactttttcaagtcagtcagcgagctgcaagagtataaggcaaaggctagattcttgtatggagagtccatgggaggagcagtgagccttcttttacataaaaaggacccttcattctgggacggtgcagttctcgtcgcacccatgtgtaagatatcagagaaggtgaagccacacccggtggtggtcaacatattaactaaagttgaagatataatcccaaagtggaagatagttcccacaaaggatgtcatcgattcagcctttaaagaccctgctaaacgagagaggataaggaaaaacaagttgatataccaggacaagccaaggctaaaaacagcattagaaatgttgagaatcagcatgagccttgaagacagcttatataaggtgaccctgccgttttttgtattgcatggagaagctgatacagtgacagatccagaagtaagcagggcattatatgagcgagccagtagcaaagataagaccataaaattgtaccctggaatgtggcatggcttaacatcgggggagactgatgagaacatcgaaaaagtctttgcagacattataatgtggctagacaagcacaccagcaatgccactcatgcttcatcacaacaaattgagacttgtaactatgggattgagagatttacaacagttgcatcatcaccaaagattgtaaagcaagcaaacgggcgaagaagctatctttgtgggttgaaaggaaaccgcatgctataccactcagcaatttaaaattttaaattgttgtgctactatggtagggagttagggactgtgatcatgtggcatgtacctatataccgttttattatgtggccatttccccgtgctcgcctaattggtaggagtccacttacaaaaagtaaagcgaaatgtggcaaagctccaaatagcgtcgtttcacaaaatttccattgcgttaacatcaataacaaaattcgatgatact

SEQ ID NO: 18577 - DNA, 255 bp, Glycine max
  Clone ID: PAT_MRT3847_11677C.1
ggggaaaaaaaaataccccttcctaaaatttaaacctttacaaaatttttgccaataaaagggaaaactccttgtttttccataaaatttattgaaaaaacttttgcgggcgggataaaatgggttcaatttaattttataaaaaccagtctttaattttttttttaaggggttgaacaaggggaacaaaaaccccttttagggtcaaccaaagtcggcccaactcatttttttggatatttgggggggaaaaac

SEQ ID NO: 18578 - DNA, 784 bp, Glycine max
  Clone ID: PAT_MRT3847_116780C.1
tctttcacttgcaaatggttgcctttctcttctccgaagggcctggttttcctttgccatggttatggtatggaatgcagtggcttcatgagagaatgtggtgtacggctagcgtgtgccaaatatgctgtgttcggtatggattatgaagggcatggacgttctgaaggtgctcgttgttacataaaaaaatttgataacatcgttaacgattgttatgactttttcaagtcagtcagcggtatggatccaaataatttaaattctcaactctattgaaacctgagatattttggcaaaactttatggctcataattcatttgcatatttcagagctgcaagagtataaggcaaaggctagattcttgtatggagagtccatgggaggagcagtgagccttcttttacataaaaaggacccttcattctgggacggtgcagttctcgtcgcacccatgtgtaaggtatgaactaaaaataataataaaatttttaaacaatatttttagtctaggaaaataaatcatactaatggaataaaaataatttgagtaactctattaattccattaattgaatagttactttttcctacgtaaaaattaaacatggcttattcaaatgttgaaacaataagccagatatcagagaaggtgaagccacacccggtggtggtcaacatattaactaaagttgaagatataatcccaaagtggaagatagtccccacaaaggatgtcatcaattcagcctttaaagaccctgctaaacgagagagggtga

SEQ ID NO: 18579 - DNA, 639 bp, Glycine max
  Clone ID: PAT_MRT3847_116781C.1
gaatatcgagaggaaaagaggaggagggagggtggcttgagggaagggttgatgatgatggggttgaaggaagaaagtaataataagtgtaagttaaagaattcggttgtggtctcgtcggcgaggtcttcgaagatgaagctgtggatgatacgcgccaccacatcggtgttactgtggacctgcgtcgttcagttaacgacgctgggggatatgtggggcccgcgggtcctgaaagggtggccgtcgtgtttcacgcacgacgaatccgccgcgctcattgagttgccgtccgccaccacgcccagagttctcccacccaagagggtttataagaacaacggttacttgatggtgtcgtgcaatggaggactcaaccaaatgagggctgcgatatgtgacatggtggcgattgctaggtatttaaacgtgacgcttatagtgcctgaattggataaagcgtctttttgggctgaccccagtgagttccaagacatctttgatgtggatcattttattacatccttgagggatgaagtgcggatattgaaagagttgcctcctacactcaagacgagagtggacaatggtttactttacaccatgccaccgattagttggtctgacatatcatactat

SEQ ID NO: 18580 - DNA, 477 bp, Glycine max
  unsure (1)..(477): unsure at all n locations
  Clone ID: PAT_MRT3847_116782C.1
gggcatgggtgtcagtttagctattggaggggtgtgtgtagttttccaccctttggcatattcttgtggcatatccctttctcatgtgctagagtcacatctttcattcttgtggcatctaaagggaatatgctaagatgcctttgtcatattgttggaatattctaagatgcctttgacatattcttgtaatattctaagatgcctttggcatatccttagaatattcctcttagattcacatgaaatgaaaattaaattcacaaagtgaatttgatttagttagtgaccttggctataaataaaaacatgtgtaacacttgtcacaactttgatgaatgagagttttgtgagacacacttcaaaagttcaactngtatccctttgttccttcaatttttcatgccactttctccttctctccctcattctcttcctccattgaagcttccactctaagcttcttatccaagacac

SEQ ID NO: 18581 - DNA, 611 bp, Glycine max
  Clone ID: PAT_MRT3847_116783C.1
ggctcgagctcgagccgaggtcggagccagggtttacaaacccatccccgacctcgtatttgtttttccaagcatggacctttccatcaacacacgcaccccttacacgctgcatcatcatcgctccgccggttgagatgttcccgccgccgccgcagacgaccctcccctccctgccggatctactcctcacggccctctccgtctgcttcctagtctcgtcctcgaagccccacatcggcggctccacccgctgccccttcccgcgtcgcttcctcaaaatccccgccatgtccctcacaaacacaacaacgtcgaaatcctcgaaaaacaacaatctcaacaacaccctcctccctccgcgccgccacagcttcgcgtccccgcagtcgctctcggagtggctgaagccgcggctcccttccgagtcgttcgcctcgtggggcgtgaagccgggcaccaagaacgtgcacaacctctggctcgagctctcccagggggaaaccttcctcgctgactccacccctccggtacgaaccgtccacgtcgtcctcgttcgcgtcaccggaaaacacggcatgatccttgtagaatcgcaccaggagttgtcg

SEQ ID NO: 18582 - DNA, 1339 bp, Glycine max
  Clone ID: PAT_MRT3847_116784C.1
ccgcgacgaagctcggattcggtaaactcgagccgcgcaatttacaaagccatacccgacctcttatttatttttgcacaaaaccacttaattttgaccccaactccattctcctctatttttcccaccatggacctttccatcaacacacgcaccccccacacgccgcatcatcgcttcgccaccacacgccgcggttgagatgttcccgccgccgacgcagacgaccctcccctctctgccggatctcctcctcacggccctctccgtctgcttcctagtctcctcctcgaagccccacatcggtggttccacccgctgccccttcccgcgtcgattcctcaaaatccccgccatgtccctcacaacgataacaacaacctcaacatcctcgaaaaacaacaacaacctcaattcccacctccctccccgccgccacagcttcgcgtccccgcagtcgctctcggaatggctgaagccgcggctcccctcggaatccttcgcctagtggggcgtgaagcccggtacgaagaacgtgcacaacctctggctcgagctctcccagggcgaaacctccctcgccgactccacccctgcggttcgaaccgtacacgtcgtcctcgttcgcgtcaccggataacacggcagaatcctagtggagtcgcatcaggatttgtcggacggcagcgttaggaagcgcgggaggcccctgtcggagaagatgaagcccaacgaggaccccgaatccgccgccgtcagagggattatggaggagctcgggtctgcgattggtggcggagcgaagaattttgaaatcgatgacattgtcaccattgatcccaattcgtatgagatgagggttgaagagcgagattcgggttcttacccgggtttgcccggttgctacgttttgcacacgctcagtgccaccgtggagtgtttgcccgaaggggatttttgcacctacgaggtggatgagtatggaggggtttttgaagacaaaattgttgcggatgaagctgtttctgttaagaagcattattggacttgggttagtgctgattccatcggcacttgaattcatgtaaacctttttttttatatatagttgagtttaaggataagctgacatttttttttctgtgtcatgttgaaagtttttatggatatgaatattaataccattaccaacaggtttttttttttttatattgtaagtatatttgaggtaataaggtggggaaattattagagtgaagctgctacttcttgtacttgatgtcaataaagcagggtagtatagaatttgttgtaataaaaaaaaaaaagggcggccgcc

SEQ ID NO: 18583 - DNA, 837 bp, Glycine max
  Clone ID: PAT_MRT3847_116785C.1
ctctcccttcaacgcaaaaacacacacaacccttagtaatcatcatgtcctctcctctcttcttgccctcatcattagaccctcgctttcatcatcaccaccgcatcttttacctcccaccaaccgcaccaaagccatcatcctcctccgcctctaacatcaccaccacaacaacaagaacaagaagaaagagaagcaaggagagagagaagggttagaagggtgaagaagcatgtcttcactcaagaagaagaaaccctattacccgcttccgttaattcctatctagtactactactttacttctgattcaaaagggtgatcttcttcttcttccaagcttatcaattatcatgcatatgctactttcttctctcttctcggggaattgaagcgttgtggtccgattgtttgctagatcaagcaaattaacctatatactggtctatatcatcatcaccttgcacctctctctctctctctctctctatatatatatatatatatatgtgggtttaatctcttactttctttatcttttcacttttttcagttttggtttgatttaattacttgattaaaacttacatatatggatttgaatatatagtacgtggttttcgagcttggtgtttctagatattataataatatgatggtgaaaaacaaaactagtactctctttttcttttttgtcgttttgttgttgagcagtgagagcactgtcactttgtgccttcttttacttgtaaattcgagatggagcttgagctttgttactattgcttcaatttaagtttctggatacagttgggaggtatagatctggatttccat

SEQ ID NO: 18584 - DNA, 1071 bp, Glycine max
  Clone ID: PAT_MRT3847_116786C.1
aaataaacaaaataccaccatctatatatttctctctcccttgagaaattagggtatgtatctagcaaaccccaacaagctttaggatttttattttctcttccttcaacgcaaaaacacacaactcttagtaatcatcatgtcctctcctctcttcttcccctcattattagaccctcgctttcatcatccccaccgcatcttttacctcccaccaaccgcaccaaagccatcatcctcctctgcctctaacatcaccaccacaagaagaagaagaagaagaagaagaagaagaaagagaagcaaggagaaagagaagggttagaaggcgaagaagcatggcttcactcaagaagaagaaaccctattacccgcttccgttaattcctatctattactacttcttattcaaagggtgatatgatcttcttcttccaagagtctcatgcatgctactttcttctctcttctcggggaattgaagcgttgtggtccgattgtttgctagatcaagcaaattaacctgtatactggtttatatatcttcaccttgcacctttctctctctctctctatctctctctctctatatatatatatgggtttaatctcttactttctttatcttttcactttttttcagttttggtttgatttaattacgtgattaaaatttacatatatggatttgaatatatagtacgtggttttcgagcttggtgttttagatataataacatgatgatgaaaaacaaaactagtctctttttttcttttgttgttgtgttgttgagaagtgagcactgtcactttgtgccttcttttacttgtatatgtgagttggagattgagctttgttattgcttcaatttatgtttctgaatacagttggaagtatagatctggatttccatatatatgtatgttaataaatgttgttcttcatgagaataacacagttggattgttcaaaactacattattttgtgtactataggttagagactttaatgttcatgaccccagtcatcatcatgctggattgttcaaaactatgatgtttttgtgtac

SEQ ID NO: 18585 - DNA, 258 bp, Glycine max
  Clone ID: PAT_MRT3847_116787C.1
ttttctttttaacaatccatatcacacgtggatttgtattagagctgaagagggtcctctattgcaaagatacctcaggggccttgtattgtcctgactaacattatgttcatcttgcccgcaaagaaggctttgaacctctaactactattgctaactcttgaacgtaacataatttatcagagacaatccttgaccccaggaacaaatccgggagctctgtacatttttattgggagacataatcagccctgccag

SEQ ID NO: 18586 - DNA, 544 bp, Glycine max
  Clone ID: PAT_MRT3847_116788C.1
cgccgtctcgatcttcttcttcttcgacgtagtaacagagcgcgcgcgttgattcaaaccatagcatggatgagacttcagctctcatcgaagccattctcagagagcaagaggaagaagaagaagaagctcacagaagaagaaggaacctcaccacgcaaaacaccacaatcaaaagtaacaaccaatggcaaacggtgtcgtatcacaagcgcaaccgcaacaacaacaagtcttcctccaagcagcctctcgccgccgatccttcccccgatgtcttcagctctgttcagcgccattccgagcacagccgccgccgactactcgagtctcagatcgcctccgaggctgaagcagctgcagccgccgctccgagcagatcgaagcggcattccgacgacgaagacgacggcgatgcggagcatgaagccagcgccgttcaagaggtgaagaaggcgaagcagaagaaaccgaataagccgaatgtgacggtggccgaagctgcttctagaatcagcgccgatgatctcgacgcgtttctcgc

SEQ ID NO: 18587 - DNA, 379 bp, Glycine max
  Clone ID: PAT_MRT3847_116789C.1
ccggaagtagttggaggttggcctaacgttaagtagcataagcaaagtctttatatcgaagagacctaatctaattttatatgtacacaaccattacggtaaggaatctagtgggagctagttttttatgggtgaaaatgattaagagaatgctaacacattattagtatactgatactaaataactagaaataagcatatttattatgctaaaaatataaaatgtattttaatacttaaagtaattaaaaggtaatattaagcattttttgttacactatttacttaatccttatatttgtctcaattttaaattgtaggaaaatagatcctctcgattttttttctctccgtttcttaaattttagtgcctacacgt

SEQ ID NO: 18588 - DNA, 416 bp, Glycine max
  Clone ID: PAT_MRT3847_11678C.1
cccttgcgtgcggttagaaatgataaacagtctttgaggtggtcatcaaaaattgacgcgtgaaaggacacacctgctgtcagctagttgatcaaggatggcaattggtaaaaaagatgtatggagagttgaatgtggaatcccttttagatttcctctcacaagtatttgcaatagcatttttaatgagatgctcattaaatatagctatgaaaaatttctgggcccggctatagctccacgtatgtttctacaatccttcaataattctgtttctttgtgagtgccgagatgataacttaatatatgttcatgaatatgtcaagccttactatattggaagttaattgaaaagctatctagctggccataatagtaccattactgatggtattgacacaactagagcgactttg

SEQ ID NO: 18589 - DNA, 235 bp, Glycine max
  Clone ID: PAT_MRT3847_116790C.1
caatgcgtcctccagagctggggcgttgtccgacgagctggccctctggtccatactgctctgcggccttctacccgccggcgccgacatctatgggctcacccaatgcaaggagtctatgcagttcgagaatcgtgagaagcagtcgatactgaagctggagtcgtggctgaagcttctccaagcgggcagcgcccgcgcactgggccattaggcgagcgtggaagacaagaag

SEQ ID NO: 18590 - DNA, 359 bp, Glycine max
  Clone ID: PAT_MRT3847_116791C.1
ctggagcggacacaagaggggtctgagcatcgatactcacaatatatatttctctagcaatcaaggcctcatacatataagcacaaccgggcactctgagctacttcagagctttaatcatttgtcttatagcactaatcggatcaactaccgcttaattgctggttggatcctatgccaaactttgcgcaccggctgctgaagtcctgatgaagtacgtcagggagcatatccacagcggcttcatcactaccaacatgctctgataacatggcacttacagagcgcgcatcgtcaatgtttgtcgatagaacggagcctgcggactcatcaccaatgactgaaactctaaaggacac

SEQ ID NO: 18591 - DNA, 515 bp, Glycine max
  unsure (1)..(515): unsure at all n locations
  Clone ID: PAT_MRT3847_116792C.1
tcttttttttgggcatttcaggaattgactctgtctcctccatccccttcttctctcctccaattaaccatgatgcagatcagctccaccatacccgcacacaatcttcacatgttccaaatgagacgcgccagtttccgatgtcgtgcctctccgttgaacccaaccaccaccacaacgacgataacaacaacaacctcgtcttctccacagtccatgaaaccggtcaccgactccacccgcctgcacctctctaacctcgacaaactcctccagaagcaatcaccaacaactcaacccaaccacaaacaacaacaagaactagccttagccaccacaattcaaagcaacataaccacaacgacgacggagaagaaaggaaagaacgtcctggaaggcctcaacctggcacgtctctggccggacatgaaagccaccgaggaaatgtcgncgngccacctcaaccgncttcagcgccttctttccaagacgggcgagtactcgccgcgaacacc

SEQ ID NO: 18592 - DNA, 664 bp, Glycine max
  Clone ID: PAT_MRT3847_116793C.1
aggcttgtgaaataataaatgttcacttttgctttactttttcaattgtgtcatgtactttgcatttgtctacttatttgtctacttattgtagtgccagctgaattcagaaatactgatgagtgattatttactttatgtgctgacgggctgcttgcattttatttagggaataggggctgcaaggtagttggaatctgaaggcatacagacacatttaacctttgtctacatgtagttgttttaaaaaaatattttacagcaagctcttgagcttaatacatgaaggattctgattaatggggtactgagattccacttgtaccatctaaagggtactcagattattgttgtaaaaagttgtttgtgacataaatgggtttcattttcttttgtgcctacctgccttatttagtccacgattttataggctagcctgtgaaccaagaataaacaataaaatgtaaaaactaataataagtaaactaaaaatttgaaaattttataacttatatttttatttttaattgattaaatttcaatatacagtaaatatatcaatgaaacccaagtctgtttagtgggtgtggtaaaggaaaaatagaaaaagaatgttatgtaggacaactctggttggaagtgtcaatgagaaaaatattggaac

SEQ ID NO: 18593 - DNA, 278 bp, Glycine max
  Clone ID: PAT_MRT3847_116794C.1
tttataaacccacctcttgcacattcttttcgcgctttatttaagtgagtggaatgttccatactacgctgacaatggcgaacagaaactgatcagccatgtatctgaaactcttacagctctcaagctggcgagtgatcatacggttagaggtgttagaactaacattcgcattcttaacgctaaagagaacagccagtggagctactggatacggattaactgtagtgacaaaaacaataatctttcctttgctccgcgctgggggagtctttcct

SEQ ID NO: 18594 - DNA, 509 bp, Glycine max
  unsure (1)..(509): unsure at all n locations
  Clone ID: PAT_MRT3847_116795C.1
cgggattcgaggtcaagaatcacgtggggcccggtgtggttctgtcctacgttatctctggaatctctgccatgctctctgtcttttgctacactgaatttgccgtggagattcccgtcgctggtggttcatttgcttacttgagagtggagcttggtgatttcgtagcattcatagcttcaggcaacattcttctcgaatacgtgattggtggtgcagcagtggcacgctcatggacatcctacttcgccactctctgcaaccaacccttcgacaagttcctcatccaagtccacggcctcgcagcagactacagccagctcgaccctatcgccgtcgtcgtgctcgtcgtcatcggcttcttcgccgtcttcagcacgaaaggctcctcccgcttcaactatatcgcctccatagtccatgtcattgtcctcatcttcatcatagttgctggcctcaccaaagccgaagccaaaaactactccgattntctcccctttggccctcgc

SEQ ID NO: 18595 - DNA, 241 bp, Glycine max
  Clone ID: PAT_MRT3847_116796C.1
tgcaagacagagggtcggtgagaagacagaaggtcggtggagaagacagaggtacgtgagaaacacagagggtacgtgagagacaagaggtacgtggagagacacagagggaagagtcagggttttagacttgcaaacctcccgatcaaacgattcgacggaaatggatcgcgcgcgacgatattcatatctcgcagcggcaggttcggtgatggaaccaaccgtcgtctcgtcgatcggt

SEQ ID NO: 18596 - DNA, 1390 bp, Glycine max
  Clone ID: PAT_MRT3847_116797C.1
tgccattgtttgtccatgctcagcaggcacttagctgttcatggtctagtcttctacaagatggtagagcaaaggttccagatgttcatgacattcttagtggatcagacttgaaagtggaagtgatggaggaaacaattctgagggatctcacacgtgagatgtgttcactcctctctgtcattgcttctcctccccttaatacccgggtcgacccacgcgtccgatctgggcatgttagtcgattagatatgtcttctctaaaaaacttggatacagttgcatcatgctccatggttggtttccttctaaagcatgaaggtctggcccttccaacactacgaatgtgtttggaagcttttacatggacagacggtgaagctgtgactaaaatttcttcatattgctctgcattggtagttcttgcgatagtaacaaatcacgcagaactcattgaatatgtttctagagatctttttacatccattattaaaggtttagcccttgaatcaaatgcaataatcagtgctgatctagttggcatttgtcgtgaaatatttgtttacctttgtgatagacacccagctcccaggcaggttttgatgtctctccccaatattaccactcatgatttagttgcctttgaggaatctttaacgaaaacattcagtctaaaggaacaaaagcagcttacgagaagcttgtttcaattagcaactggtaacaaattgaaagcacttgcagcacagaaaaccgtgaatatcattacaaatgtttcaacaagaccgcgcccagccaatgctcctgagtccaaagttgatgatggtgatgttgtggggttggcagccatcatgtgatatttgttttgagctcacggaaggttttgtgtacaggagtgagctcgtattgagaagattttggcttttcattatttactaacaaagggtgagaaaacatttccttccccttcacaacattaacaagcaaatttggtgggagtacaaaaattttatgcccttcctctttattcatagcaacttgtgaatcaggtttacactatgcacaatttacttgatttgcagtatatctcttcagcataacagaaccacacctggcagttcagacttttgtattttttttccagaattcaaagtccggctgcgatcagattaaaatttcgttattttaagtaacttcacatatttatttgttattagttgaaattcatgtagatgtggtaaaccccactagatgtaggatgagatccacttcatttgatgggatctatatacatttcagcagggtgtttggttcagaatcgtgttagaatatccaataacctaatttaattttccgttgagaaattgatcgaattaaagcaattttatat

SEQ ID NO: 18597 - DNA, 810 bp, Glycine max
  Clone ID: PAT_MRT3847_116798C.1
tttttggactcaggattcaagacgctgatgtggttttttcttttcaagagaaataaaattattgttgatatttgtgttgtggtgatttatttagtctttagaaactgaggttttcactttttcacatgaagtagtgttgtcatttttcaggtcacgggtggtgtcgatatcaaggcatgagagatggttagagaaaatgctgtaatgggtggtgccagtgaagagcgtggtgttcgggtcactcgagcaatggctagagctgttttgggtggggtctctgcctcttctagaccgtccttcaagaagcaacacaagaacaacaagggtttcggtagggtagcactagcaggtcactaacataagagaaagggtgtgctacatcaaaatctccagacacaacacaaagggagctgtctacttttgtcaactcagatgttagagcaaaattagcaaaagatttaccctcaatatcaatggtacagtcacatgacgctaatgtagctgaaaggcaggaaggcacagaggtagtgcaaccttctatgtctgttatggcaggtcctctgctttcaatgcaggactctatgaagtctgatgaaatccttcgctctccaaacaaagatggtttggacattgtggacattgattcagtggagttaaaggatcctcaagtttggagttcatatgcccctgatatatacaatagtatatttgtcaaggagtttgaaaggagaccgtcaagtgattacatggatatgttgcagcaagatatcactccaagcatgcgtaggattctgattgattggcttgtgg

SEQ ID NO: 18598 - DNA, 250 bp, Glycine max
  unsure (1)..(250): unsure at all n locations
  Clone ID: PAT_MRT3847_116799C.1
gannctcagnccnanccgtaacnnnnagcnncgtgaatcccggctcgnggcgangncgnnagncnagtncaccggnntcaataantagagnnnctatnttgntancacgntccncannacngngcnnggncgcntagccnngngcagtnacgtgnnnnggggcngcgagcananngagncncanaananagnnnccgaggnnangtngngctcnccngggctgaccgntnggtgcagagtgcaaactang

SEQ ID NO: 18599 - DNA, 510 bp, Glycine max
  Clone ID: PAT_MRT3847_11679C.1
aaaatccttttttttttttttttttttttttttttttttttttttttttttttttttttttttttttttttttttttttttttttttttttttttttttttttgggaaaagggggaacaactgggaggtttttttttgttccaaaggaacattggtttgggggatttttattttctttttttccatgggaaaaaattggcattggaagggttacatatccggggggatatccccccgctagggggtaccccagttttaaacttgggggggccctttgaaaagccaaaaaaaggggggcgggttcgagttttttttttccaacacaggggttatccccattggcaaagaccttggggtataaggaaaaccccctgccctaaaactttgaaactacttgggggggggacaagccacaaaattgtttcccggggcgggcaatgaaaatttctccgattttcttgaacaagggggctttttggaggagggggggctctaaaaaggcaaccaggg

SEQ ID NO: 18600 - DNA, 559 bp, Glycine max
  Clone ID: PAT_MRT3847_1167C.1
tcctctagagcggccgcttgcggtctttactttttttttttttttgccggtttataacctaacccttattaattgaccaaggggattttattaccttgtaattacaccactttgatgacacaaactcaaaactaacttattgcatgtttattaaattagaggaccactaatttacatgacacacaaatttataagtaaaaacgtgacatttttttacttgcagttaaaagtaaatatattatatttttctttcttttttttaagcctttctttatattatataacttaatcataaattattttataataaaaaattatattccttttattgattgaatcttttacgcactgatttggatgctacaactttttgaatatgaatgtatccaaacacctcgttttgtaaatctttgaagagcaaacaaatattggtttcaccgtacatatatcaagatttacttttagtgtgagactattgccattgcacgacattttttttctggttttaggcttttaacaatttgcaagaaaaattatttttatggttttggggggctac

SEQ ID NO: 18601 - DNA, 875 bp, Glycine max
  unsure (1)..(875): unsure at all n locations
  Clone ID: PAT_MRT3847_116800C.1
tgcaggtaccccggtnccggnnaattcccggngtcgacccacgcgtccgcactgcgctcacgcacgctcctaagcttttattaccactgtgctctctttttcacactcttccgtttcgagctctctctcacacacattgaatttcaaggtcgcgacgcgaaatatgagctctgaataacaaacaaacagagttggtgtcgatatcaaggcatgagagatggttagagaaaatgctgtaatgggtggtgccagtgaagagcgtggtgttcgggtcactcgagcaatggctagagctgttttgggtggggtctctgcctcttctagaccgtccttcaagaagcaacacaagaacaacaagggtttcggtagggtagcactagcagatgtcactaacataagcaagaaagggtgtgctacatcaaaatctcaggcaagaggaggttacaagaagactaacacaaagggagcttccaatgtctccattcaagttttgtcaactcaagaagatgttagagcaaaattagcaaaagatttaccctcaatatcaatggtacagtcacatgacgctaatgtagctgaaaggcaggaaggcacagaggtagtgcaaccttctatgtctgttatggcaggtcctctgctttcaatgcaggactctatgaagtctgatgaaatccttcgctctccaaacaaagacgttgatatgatgattactgagaaactaaaactttcagatggtttggacattgtggacattgattcagtggagttaaaggatcctcaagtttggagttcatatgcccctgatatatacaatagtatatttgtaagggagtttgaaaggagaccggtcagtgattacatggatatgttgcagc

SEQ ID NO: 18602 - DNA, 401 bp, Glycine max
  Clone ID: PAT_MRT3847_116801C.1
ggacgctcccccatttacctcgtattcaaccctctctaactcttctttttccctcactctttctaccttcctggagcgactcatactgaactccgggtgggggacatcatctttgccttagcaaacaaggtatcttataccatgacttaacttgcatctgactactacttgttcaattacttctactatcattcccttttcttcaccgcacaaaacttgatcaaatttcttttagggcaccttcctgtctattcaacatttacattacatactaagaagcaacacgcatcttcctttgtttaacatcatacctttattcctcaatcttcccataacactcaagatcaaactccttaaaaatatagcttctacattaattttgataaccttacacttattaa

SEQ ID NO: 18603 - DNA, 169 bp, Glycine max
  Clone ID: PAT_MRT3847_116802C.1
gaacccttcagtgagagataacacaagtcatagtccattggtaatggtatggttagatagatagtgtgtggaaaatgaagtttggtttggagtttggacacactatgtagcttgattggtggaagtatcataacttgtgcctgcgagccccatggagttattctattgg

SEQ ID NO: 18604 - DNA, 300 bp, Glycine max
  Clone ID: PAT_MRT3847_116803C.1
agccttccgccaacccttccggaaggggaagctttaccaaaggcaggaggacctggtctaaccggaattggcctcttcggggttggcttttgtggccttcaaccctgccctttcactgtgggaggtctcagtagggcctccctcctctaagggacctcctttcattcaaaggtggggcccggtgtggccaggagatcaagactgacaggcctattggattaatggtggcatggctttgaagggagggagtggtgcctctggccaaaaaaaaaaaaaaaagggccggccgtcttaaaggtc

SEQ ID NO: 18605 - DNA, 1163 bp, Glycine max
  Clone ID: PAT_MRT3847_116804C.1
cattcacagtcatatccactcttcaaattcttcacaacaatcttcccattaaacctcgcaaacgtggatatgactgtgaatggaaggaggattcttgggtgccagcttattatgctttggctgttctcaccatgttgtggtctgcggcagctatggttgaagctcaagtttatgtcatcagtgggactattgctaattggtatttctccaaggaacatcaaactcctaagcggagtattcgaactcctctcagaaatgtttttggtccttcttctggcacgatatgtttgtcaggattgcttgtctgtgttgttcgaatggtgcgttctgcggttgatagtgcaagacaagaggatactcctgggatagtgaaccttgtgttgcggtgctgtgtaaatgcattgctgacagcagttgattttcttaacaagtttaccataaactttgctgcaataactggtgaagcctactgctcttctgcaaggatgacatatgaacttctaagacgcaatcttctctctgctgtttttgtggagaccatctcatctcgcatcctggctggaattgtctttgttttttctgcatcatacacaatagtggcctgtgttatcttaaaagctggtaccaatcttgggtctgactcatattttgtggctgcgatggcatgggtgctactgatggtagtgctgggttacctcgtgcatgtgctagacaacgtaattgacacaatttacgtctgctatgcgatagaccgggatagaggagaggtttgtaaacaagacgtccatgaggtttacattcaactacccattagtagaagtctcagacagtctgttactacaagaactctaggtgtgtaaataattcttgagatacaaatgtttttgaatcctgggattgctattttatggacagtgtggagttagaattgtctgtgactgtgactatgacttgtgagcctattgtgcatactcctgaatgtttcttctttaaaatttgttttctattttttttctaagggtaacttttagttaatctgaaagttgactgcagctttgtgtaacctgaatgatgtatattttgtttggggggaaagaggcacaagtttaccctgtcaaaaaaaaaaaaaaaaaaaaaaaaaaaaaagcggccgctctagagga

SEQ ID NO: 18606 - DNA, 261 bp, Glycine max
  Clone ID: PAT_MRT3847_116805C.1
gtattcacttaaactcttcctaaactcatcttttctctaaagccctctctcaaacgttcttcttctttttctccctgccgaaccttagcattttttcccgtgaactcaatgagcggactgcaatagcaagcgtacatgggctgtgacttgtgagataggtttttccttcctccccctatggatgacactggatgaattcttcttcttcaacctctctttgatgattaagttgcagttggccacacaaaggatggggatttc

SEQ ID NO: 18607 - DNA, 191 bp, Glycine max
  Clone ID: PAT_MRT3847_116806C.1
gggggttgatttttttttttttttttttcttttttttttagacagaacagagccttagttattcctctcatatagggcgtttgcaatggatttatgggcaaaaaaaatcaaggagctatttttactttttcatgagatcaccattattttgggaactagaattgattggggtatgaacaggggatttgcaa

SEQ ID NO: 18608 - DNA, 454 bp, Glycine max
  Clone ID: PAT_MRT3847_116807C.1
ggtaagattaaatgctaagtgcatgtcattttataaaacaggaagtggctattaatctatatgcatgacgagtaaatacaaaatgctaactagttgctcaaaggcgttagtctaggaattaaaagtagaaatgtgctatgagagagtgtgacatttaatgttacaatgtactatcccactatgatttccaataaagatcttttatttactgatgagtgatgtttattctccaaattttcttacacattcttctacttctttagtgaagaagcgaatgcatttagtgcattggatgcataggatacactgcaatacttgccatgctaagcaagaggactggttggagaatgttgcccgaagatttagacttggacagaacatatatgcggtgttataagtgctttgggtgctgttctacagatagaatgattcttaatctatgggttgtagacag

SEQ ID NO: 18609 - DNA, 638 bp, Glycine max
  Clone ID: PAT_MRT3847_116808C.1
cccacgcgtccagcgatatcttcgactgtgggaagcttctttttctgatcttttacgtgtcaatataaattcccttcaaagaaataagctttccactctttttcaatcaatcaccaatggctccttctttcacttacgtcaaaatcttctcttctctcgtcgcagacggattctccaacgctctcaccagacgcgggtacgctgttgcatcacaaagtgcaacaaagggaggagtggcctcaatgagcggcaagatggcaccaaagtcaggggaagataacaaaggggtgtctacgtacaaggtttcgtgggtgccagatccagtcactggttattacaaacccgaaaacatcaatgagattgaccctgcggaattgcgcgctatgcttctcggcaaaaaattcaacaactaatgaaatattgattccacggaatattgattccgatatgctctgttttctacttcatgaagagaagaccttgattcgcgtttgggggggttttccttgtccatttatttgctttagttagttttagaagtcagtagaatgaccaccattagcagctgatcgattgtaatgtcttctaattctaatgttattgaatattgattatatcaagtttcatatttttcaaat

SEQ ID NO: 18610 - DNA, 597 bp, Glycine max
  unsure (1)..(597): unsure at all n locations
  Clone ID: PAT_MRT3847_116809C.1
attcgagctctgtacccggggatcctctagagtcgacctgcagaaaatgtatatgacatcatgcctagtaccagtattcctcctttaccctcaaaatctagtgagatggcctcaaaaatactgatgcagcttgataagttggtttctcctaaagaaaaatctccaacaaagttgtcctcatccatgttacgaggacaggctcttcgaagtatggagacagtagattcatcaaaattccttgataatgtatgggataatggattggatggcacacatggaaatttgtctgctggtgctcaaaagttaaaatcaaagatagatgaaactgagagtggtcaatcgaaacttgttgctcctactgatgtattagttcctgttgatgcatatgctacagcccctaagaagcaagatatatctattttaaaatctggagattcctctggaacaaaatccaattctcatcctccacaaaagaagagggcattccatatgagtgcacctgaggtttgcgattntactaaattattttctggtataggtttatttagttatcttgattttcagatttgaaaattaatgggaatattggtttatatc

SEQ ID NO: 18611 - DNA, 503 bp, Glycine max
  Clone ID: PAT_MRT3847_11680C.1
cagcaatccgcgggaggaggagccggtcgctcagctaatcctcataattggcctcctgtgcccagcttcatcccggtggaaccgtgcttttatcaggacattgacgtggagatccctgtacaattccaggaaacagttcgcctggtctactatgtatatctcacgtatgtgttggcactggtggtaaatgtagttgcatcacttttcttcatgttattcgctgccggaggaattggattgctattgttggctattattcaggttgttctattcacaccttgttcattcctcttctggttccgacctgtctacaaggccttcagggatgacagctcatttaactttatgatattctttttggtgcttttctttcacacgatgttctgtttcattcaagtgttgggtctttcgcaatacgcttgtggatggtctaacacagtttatgccttccaagagggccatattttcatcggtctcttgatgctgtgttcagcagtcgcatt

SEQ ID NO: 18612 - DNA, 403 bp, Glycine max
  Clone ID: PAT_MRT3847_116810C.1
gcctcatcataagattctctctttcatctccccattgaaaaccctcgccaaagttattgacttttctggttcaacagcaatgggtttgcttcaatttcttcttctgatctctctaggggtgaggagttagccagttttttattctttttctgagattcccacatggatcgggggtttagatttctgtgtcaggcaggaactacgagattagtttcatttgtaggaataacagtggctatagttttcatggttcagtattctgaacttcctagtagtaaattcttatcttctgttactaccaagtttactagtttcacaatggatacatcatcttcagttaattctaaagtggagggtaataatttgcacctaaatggttcaaattcaaactctactcatgcat

SEQ ID NO: 18613 - DNA, 1663 bp, Glycine max
  unsure (1)..(1663): unsure at all n locations
  Clone ID: PAT_MRT3847_116811C.1
ctttacttctcgtcttgttcaaccaagttgaaactttatggttctgaagctatggaattgtgtaaacctgacttggaggagaggatgaaagtgttggcaatgagtacaacagaagatgaagaaatgggagacacatttgctgatagagcagaaacttactaccaaaagaggcctcagctactgtcccttctgcaggacttgtacaatggctacataaccttatctgaccgttacatccaaacactggccaaacacaagcaccatagtagacactcttctcaagtttcaactgtagatgaaggcttctctgaccaagaagaagaagctagtggtgtgagccacagtgattcagacattgaaagctcaatctcctaccaacacccccaacacatgatgatgccaataggcctcccaaaaagctccatgcttgatgttgatgctattgttgctgagcttttgataaggaatattgagtatgacatgttgatgcatgaagttggtgtcatggagaggaggtactgtgagtcctcaaggaaaagtgagcttcaaaagagccttcttgaggtgttggagtctgagaggattgttcttttgaatgagaatgctagcttgggctatagggtcaacactttggtggaagaaaacaaggagcttgcatctgagtcagtgttcatcaagagaaaagccggtgagcttgctaagtgtgtgctgaagatgagggaggatcatagagtgtacttgctgcacaggaaaattgaggatcttcaggctcagatacatgccttggagaagaggaacaaggagtactatgataagcttctgagaagagatggtcatgaagatggtaaaaaaggtgtggctttggaggtttgtgttcagatggacaagcaaaagaggttcaagtggaaagatggcaacacttctgggatgaagaaatttcatgggaagaagtcccccccaagtttgtggaaaaagctgaagaacatggatttgttgttgtgtggtactaatccaacttgtgcttgatgatggatgattcatggctggtagtgtttttttgagtccatagaagttttatttaaagttaaatatgtatactttttggcgattttaaagggtagtagcagtaggttattactaggttaattactcataagccatggtgtacattccaacatgaggcctttaacatagaaatgcatgaagtcacccctctagctaaatcattgacaactaattgtagatcagttcaacatcatcttgtaaaagctagagtggatttgtacttttgcctccgttattttagatgatcttttctactatattattattatgtaagaggcttatcttaaacaatggtgtaatgagtgagaaatgattcagttactaaaaaaaaaaaaaaaaataaaaagaaaaaaaaaaaaaaaaaaaaaaaaaaaaaaaaaaaaaaaaaaagaaaagaaaaatataaaaaaaaaaaaaaaaaaaatgaaaaaaaaaaaaggacaaaaaggacacttgcttatagacacaataaaaaaaaatggaaaantgggggggggccccctttataggatacactttctttgcccgcggactaaaatcttattttttttcttttttccccccactaaaaaaccgggcggggccttttttacccccc

SEQ ID NO: 18614 - DNA, 851 bp, Glycine max
  Clone ID: PAT_MRT3847_116812C.1
taattcggctcgagcaaaaacatacataactttctttcaaatcacgttcttcttcacctctgtttcacttcgctagctgctcatcaatcctcttcctacatttctcagggggacttgaagcaatgatattaatggagagggacccaaacatgggcaaggaaaaagtgatttcaaattccacatttcttccctcatccacaaaagtgttcaaggacaagggcatctccaacaacagcatgccctcctggcttctcaccaacatttctgacttggaggagagaatgaaagtgttggcaatgagcacaacagaagaagaagaaatgggagacacttttgctgaaagagcagaaacttactaccaaaagaggcctcagctactgtcccttctgcaggacttgtacaatggctacataaccttatctgaccgttacatccaaacactggccaagcacaagcaccatagtagacactcttctcaagtttcaactgtagatgaaggcttctctgaccaagaagaggctagtggtgtgagccacagtgattcagacattgaaagctcaatctcctaccaacaccccccacccatgatgatgatgccaataggcctcccaaggagtagttccatgcttcttgatgttgatgccatttatgctgagcttgtgatgaggaatgttgagtatgacttgttggtgcatgaggttggtgtcatgcacaacaaaaagaagaagaagtgggacacacttttgttgaaagagcagaaacttactaccaaaagaggcctcagctactgtcccttctgcaagacttgtacaatggctacataaccttatctgaccggtacattcaaacac

SEQ ID NO: 18615 - DNA, 503 bp, Glycine max
  Clone ID: PAT_MRT3847_116813C.1
tttttattgaacaaccaaaattattattttttagcacccccaccaaaaaaaaatcccttcactctggatagtggagagagacaccattgccccaactcatggagcctatcatagcgcacgccaacataagtttttggctacataatgagtgcacacatccgccaagttatccttaccctattggtaaaatgcccacactcttccatacttccctactgattacgcgattcattgattcttacaaacattgcttattgactgaacatttcattgactaatcttcattgcccacaggatccgaattgtaaaataaaaacactcttagccatcaattcttagcatggaagacgacctaaagctgctgcttaatcctgcatttctcaccgtcaaggaaagaggggtaactagtcttgcttactaccaagcgtaaaagcaggatgatcacaactcttgagcaccctaagcctattcatgggggataaaacatgcgccatggtacatgt

SEQ ID NO: 18616 - DNA, 286 bp, Glycine max
  Clone ID: PAT_MRT3847_116814C.1
ggttccattccggagtcatctagctgtctactagcgtaccagcctgttgtcttccttttttatcaaataggggttccaatttgaagaattcatgggaagggtcgtcacctcctaatcaattccctttaattttcacacaatgtctacggaacctttgacgattaaaattcaattgaatcgtcgggggggccaacaaaccaattgcacactttttaataaaaacaacttgggtgcattaggaaaactttgtgtataacttcaaaggtttaaagaacattacttttct

SEQ ID NO: 18617 - DNA, 384 bp, Glycine max
  Clone ID: PAT_MRT3847_116815C.1
ggagcccaaaaaccacccgttcattttaaaaacaaaatttttaaccgaacaggcccaccccatcaagggatctaccctccccaaaaaaaacccccaaaacaacgcggccggaaaaataaaagaaaaaaaaccccccacccaaaaaatattttaaaaaaggcaaaggccccagcccagggaaaattattgaaggccccttcccgaaggggaaaaggggaaaaaaaaccccctcaaagagcaacaccccccaccatcagggggaaacccacccaaaggggaaaccccaccccaagcctttccgaaaaaaaaaaaccgttttttttgcccccacccggggggggggccgggttttcccccttccctgttgaccggacccgggggccc

SEQ ID NO: 18618 - DNA, 466 bp, Glycine max
  Clone ID: PAT_MRT3847_116816C.1
ggcttttagctatacccaccatgttcagaactagaaagcgactagctacgcttccataagaataggacatcgctccattattatatcggggagcttgatggctaccacatagtaagccgattgactgcacactgcagacacaccataaaagtgttgagcaaatccaccgctagaattaattctaccttggatattttctagaatgaaggcattacccagagcaaaacaagctgttccttaaagatgcaatgcaacctggagaaatacgactttatctagcatttaagagcatgcgaagaacactcttgatctttggtcttgattctggggatgtgctaacacaaacacgagcattgtcgagaattgcaagcatgctggttactgactgcttgtgaagtgctactgacattaaaatcaagagagaaatcctggtttgggaaattacggagaacccagttgaccaatt

SEQ ID NO: 18619 - DNA, 276 bp, Glycine max
  Clone ID: PAT_MRT3847_116817C.1
gttcatccaatgtctgctttctatgagatagactttgaatgaggtgttgagggtacagaactgaataaggcatggtccttgctcttaaagagctcacagtctggtgggggacataaatgtctgcaattacaatatgatacagtaattgtcatgatagaagtctgcaggtggtcctgggaataatagtgatatggataatacctttactaggtattcttcactaggaggggaataaatggagaacaaccatgttaaagtactttgagatgtataacg

SEQ ID NO: 18620 - DNA, 294 bp, Glycine max
  Clone ID: PAT_MRT3847_116818C.1
aattcccgggtcgacccacgcgtccgcggacgcgtgggtggtcaacttgcgatggcatccatggcttcacttgatttgtttagtggaggggaacaaattgatgcccggaaacttcaagagaaaatgatggttgttcagaaggaaagggaggagaaacttgctgagattctgaaagatagactccaccagtatgttcaaggagacaaggagggttttattagtcaggccgatgctgaagcgacatatctttaatatggcaattacggagttgatatgctgaacacaattggctat

SEQ ID NO: 18621 - DNA, 214 bp, Glycine max
  Clone ID: PAT_MRT3847_116819C.1
tccgtccgattccggtcgccccgctcctcggctgcggagacgacgaggggacaccaacttcttccttggtttggcctcatacagccagctgtcctccctttgtccttcttttagggtgttcgtctggagagcggccagccaatggtgccgatccaaagctggtgccctaaaccggtaaccgatagagcggaggtgggctattggacctggaacc

SEQ ID NO: 18622 - DNA, 299 bp, Glycine max
  Clone ID: PAT_MRT3847_11681C.1
taggtattagtgtttgcttcctttttttttttttttttcaattgcgggggaaaatgagtgaaagattgaaagtaagctttaatggttatagttttttttccttcaagtgaagccccctccaattattcgtgttttgtaaacgagcaggagattctttgaatctagtttcctatagcctagtcagaacagaagaaaacatcaaaatttcagatttgttgtgtaacatcttccgtgcttgttcagatgtacctactttaatacaactggtcgagagaatacgttaaataacttagctaaaa

SEQ ID NO: 18623 - DNA, 227 bp, Glycine max
  Clone ID: PAT_MRT3847_116820C.1
tgtttttttcttattttttttttttagatagaagctggttattttgggtgagaatctggtttgactgaaagaattcctcctatcgaccgactgaggtcctaccaactgaactacaaaaggaatgggtggaccgcattgaaaaagggaaacaacaatcgggctagtaagggatggataactacgtttctgtattaattgacttggattagggtggcaatgttgaaagg

SEQ ID NO: 18624 - DNA, 212 bp, Glycine max
  Clone ID: PAT_MRT3847_116821C.1
aacacagatatgtagacgctgttttttaggaaccacaaggaaaagccgggtcaggggaaggactggccgccaaaggagtacaacgaagtctgcgaacaagggatgagggccacgctctcggttggagcgaaaaatctaaccgacacggagggaaagaactacgagaaaaaggagagtgagtctgacggggactgagctaatgcaaaagcaga

SEQ ID NO: 18625 - DNA, 433 bp, Glycine max
  Clone ID: PAT_MRT3847_116822C.1
gcctttttgggtgggtgggggttttttttttttggaaataaaggaagggggggttcactcaaaatgcaaaggaggaggggtttcaatcaaataccaactcatcaagggggtaggaaaaaataaaaatataccaaaattcaactattttgcgtaaatccttaacatcatagtgtgcgcccatatactatgaatggggcaaaatgatttcaaattcatcttttaatcttaccattatattctgctcaccctaccatccgaaggtagaccccagttttgagcttatattcatcatttaatctttccaagttatcacgagcaaccccagaggggcgaagagagtatacttgataataggggttttcagccataatgatggggcacccaagcctacggatgggtaaaaacccggacggctctacccataatagggggg

SEQ ID NO: 18626 - DNA, 403 bp, Glycine max
  Clone ID: PAT_MRT3847_116823C.1
cccttctttttttttttgggggattttttcttccctttgacccctccggcaccagagacgaatcccatgaaatagtttgcactatccgatattctacacattcaagatactcctgcggtacctcttgcaacatccttactgaaagatagttctgattgcacacacaagttcatgattgatactatatcatggacttctcatgtatcacacactatcccgagtgagatatgcggaacgctatgcggcttgccgttaactaatttcaatggataaaccatatgacaggttatgcacaacgatgtgtaccccacttttgtggctgctaactaagcacatccgatggagcatgttcatagaccgcagaaagctcatatgagaaatgttgcacaagcaatgatcacac

SEQ ID NO: 18627 - DNA, 267 bp, Glycine max
  Clone ID: PAT_MRT3847_116824C.1
aaactgaaacaaccccaacaagagggcgaacattacaaaaaaaacaggatttaataaaaaacaacctgccaaaaaaaagtgggaaaaaaaaaagcgaaaccacatcatgctagcatcatagacatgttactgctaacccccaatggccaagctcaaaacgaattcttatcttacccactcaagaataaaacgggggagcatttttacacccccacctaaatgaaaaccgggggccaaccccctacaaaaccgtgagaggaaaaaccc

SEQ ID NO: 18628 - DNA, 405 bp, Glycine max
  Clone ID: PAT_MRT3847_116825C.1
cgaaagcgcgggcaagcgcacatctataatggctctgctgatgtgggctacttgcgctgccaaagaactataagtcaattatacctaccaacctgctctgtaagctctcataatccttcatcaaatgattagctttcttctaagaagctcataactgttgctattcacagggagcgggtccttcgccattgctgacacacaaccattgtaatcagtgaccatgccccaaagcatcatggacaggttgagactgagaagctgcctcagacaccagtgacaatgactcatatgaatgtcttggactgctgtcaaatcccacacccaaccagagacataaactctaccaccttagcgtaaattgctgacgctcgcattaaagtgacagagacaccgggactgctaatc

SEQ ID NO: 18629 - DNA, 280 bp, Glycine max
  Clone ID: PAT_MRT3847_116826C.1
ggcaatgaaagaaaaagattaattggttggtcgggcggttcagaaaggtcaatccaaaaaacaccaaagtgactaaacatgacagaaagaccagtgggggtatgtattgacaattttgtttaatccttcatatcaatcttctatgacgcagccatccggggacttcgctttgatattgaattttcctaattattattattattatatttttggtgaaaaatgctattggttctttgtgtgtaagaagttaatccctcctttatactatacctaattattt

SEQ ID NO: 18630 - DNA, 183 bp, Glycine max
  Clone ID: PAT_MRT3847_116827C.1
tttggtatatgggggtcttagctcccgattgaggagagcatgcttgcttacaagatggaggagatggggttgagtgatgaagagggtgacgaggaggacggtgaagagagtggcgtttgcggaaggggatcaagacgatattcctttcaaaggacgattctttggaggaggagggtgagagga

SEQ ID NO: 18631 - DNA, 241 bp, Glycine max
  Clone ID: PAT_MRT3847_116828C.1
ggctatgtcatcattgagtctggcatcagattctagcacagcaaaaccttcccttatgttcttcaaaatgtttgggccttcttttgaagctgattttgttgagtcagttgtgaaaatgggccaaattggtgtcaagacaggtttccttggagagattaggcgcgtgtgttcagcttttaattgaagtaaatatgcaattaatgatcaattggtcataataaaaatgtatggcttctagaaa

SEQ ID NO: 18632 - DNA, 444 bp, Glycine max
  Clone ID: PAT_MRT3847_116829C.1
aaaaaaaaaaaaaggggaattacctctgggtcgggttacatttacggacaaaggatgactccgggtaatacatttactttgctacaattcatttaggaataatttacaaaagcactgtttttttttttttcacataaccttattaaaagccccccccccccctaaaattgggggtggggaatttgggattcccgttccaaagtacaatttccactaacttgggcaccccccctgaatttggcaaaatttgattttttttttttaaaaaatttcaggcgggggaagcctctcccactcaactggagggccccggggggactattaaaaattgaatggggtgaataaactgttagcttattgctccagttggggcaattagggggccaaccttttttccacacaaagtttttgaaatgttcccaggctcccgtggattaaaacccc

SEQ ID NO: 18633 - DNA, 499 bp, Glycine max
  unsure (1)..(499): unsure at all n locations
  Clone ID: PAT_MRT3847_11682C.1
ccnnagctnggaattcggctcgagcaacatcggagctcgaaggagacgggaagggagagagagagagagagaggttgctttcgtgtcctaccatctcgaccagcacgcacacttcattttcgcgaccttaagcacgtctctaaatacactgcatacgagaagccagctatgttcagaaaacaacatatactgcatggatttttccccattaaacacaaatcctattgtgaactacactcacttaagcatcagtgacaacagaaaggacgataattccgcagtgtgggttgctaatagaaatcaacccgttgacaagcattctgcagttttgatgctaaaacactatggtgtactcaaaattgaatcatccaaagatgccaaacccatcattcttttttcttcacctcaaccactgaacaacaacaacaccgaagccaagctgctggatacaggtaactttgtggtgcaacaacttcaccccaatggaacaaacactgtg

SEQ ID NO: 18634 - DNA, 415 bp, Glycine max
  Clone ID: PAT_MRT3847_116830C.1
aaaaaccaaaagggcaaaatgggatatgggaaaaaaccccaaaatggaaacaagggcttggggaaattctcacccccagccggaattcaatcacaggaaaggaaacaacttcaaaaagaggggcgggggggaaaaaaaaccaaaaacggggggaaaacaaaatagaaaacccccatcaaaaaacgtttttttttcccccccaaaaaaaggggtcccaaaaatggccccccttcccacaaaataaaaatcatctcagttttttaaaacgggggggggtttttgggaacaggggccaactcaaagggggggggggggggacaacaagagggattcccgcttggatttgcccccccccgataagaacccaagggttttaaacacgtgaaaaaaggggaatttttccacccttggtagg

SEQ ID NO: 18635 - DNA, 590 bp, Glycine max
  Clone ID: PAT_MRT3847_116831C.1
ccacgcgtccggtaaaagtggcatatcttgggaaataattttgaaagtggttaagatgagaaaatgcttttataaaagtagtagcagtatatatatgtggctatgaaaaatgtcccgatgcttttgcagtgtgatgattataaagtcaaacaggagcaaattgccctcctcacatgacatgttgctgcatgctcaacaacacagtaaacctctgcacatgctattaagaattcccccaatgaccctgaccctggctgtggtggtgccaatgagttgtggcccaccacacttgtagccacactgatggctatgaatggatgagaatgtgggggcagcttaggtgaagggcatggagcagaaggtgggtttgggagcgagccggcaaggcggggggggagaagaaagagccgggctgtgtgggggggggagaaaggggggggtggggatgtgactggggggggggtggtgaggaaagaggggggggggggggaggggggtgggtgaggaaaggaggggggcgctgtagggggggcagggggggacgaacgggcggtggggagggggggggtggggggggggggggcatgggg

SEQ ID NO: 18636 - DNA, 369 bp, Glycine max
  Clone ID: PAT_MRT3847_116832C.1
cacccgtcctctagggtaaaatgaaagccagaaccgagaagcaacccctctttcccctacttctctcttccatagagattgtcctccaaagagaaaaaatggcggccgcgtgaagaaaatcaatacgcgcacaatttgcatcccttacctccaccgatgcgttctgcatctctcactttcagtcttactatccatcatactcatattattcgtgagctgccgactgttccacctccagcttgactactcgctcctccaccttctttcaccgatcttcctatccgacacgtgtaaacctctgcggttcctccgctccctccgtccgcttctccatcgaccgctccgtctatacgtaccggtccatctctg

SEQ ID NO: 18637 - DNA, 690 bp, Glycine max
  Clone ID: PAT_MRT3847_116833C.1
ttctttttgctttctcactaggaacacgatggtttctcttcccatagttcaatatgaagagaaaatcatcgaaaccgttgagcgcaaccctgtcgtcgtcgtcattggagagaccggttccggcaagagtactcaactctctcagatgctccaccgccgcggctacggtaaaatcgccatcactcagccccgtcgagtcgccgccgtctccgtcgccagacgagtcgcgcacgagctcggcgttcagctcggggaggaagtagggtacgccattcggttcgaggataggacttcgcacagcacgcgcataaagtatcttactgatggtgtccttctccgagaaagtttagctaatcctgaattgaatgagtattctgtgatcatattggacgaggctcatgaacggagtttaaacacggatatattgatggggctaatgagacgcttggtaaatatccgtcctccgatctcaagttttgatcacgtctgctactcttgatggggaaaaagtatctaagttctttgccgattgtcctgtattgaacgtcccgggaaatttgtatccggtgaggttctttatagccggagcgtccctcaagctaccttgattcttcgctgaaacagccttgatttacatacccgtaagccggggaattttatttcctgaatgatgactgactaagatgacat

SEQ ID NO: 18638 - DNA, 575 bp, Glycine max
  Clone ID: PAT_MRT3847_116834C.1
ttgaagattacagccactgaactgtgcaaattacaaattgcagatggtgttatacctgagccactcttgatctgcgatgtgcaccaccaagtggctcaggtataacaccatctgcaatttgttgttgcacatgcacattctcaatttacctctcatcagataaaaaaggctatcaaagaacccatggatgagctcatgaagatgaacacagaagaactgttaaaacatcgcatgcttaagttcagaaagattggtggattccaggaaggtattcctatagatcctaagagaaaagcccagggaagaagaaaactaggaaatctcatgcttcaggcaggggaaagtggatgattgtgggcaatattgcaagatatttgtcagtttgtgtgactgatctggttctgaaggtgtacatctccataatttgtattgttcagcttgtatggttaaacacatgctgactttattttcatatactatggtgtgtgcgaatagcacataatattaaaaatgatgttagatcatcaaatgtaatgattattatattatatttataaataaaataagtttctctc

SEQ ID NO: 18639 - DNA, 2972 bp, Glycine max
  Clone ID: PAT_MRT3847_116835C.1
cggcacgagcgtaattgtgacctcgagccgctcgagccgatcgagcccctcgagccgatcgcctccatcactatggggtttgactctttttccttcttctaataacaaaaccctgtttcctttgccttctccttcactaggctccccaagcaacaacaacaactactcttttttctctttcatcgacgatcttcactaagctctttcactcaaacacacacccttgattatatcactttctcttgttctcttaccgtagaacattgcatttactcctatctctcactctggatcttcaacttcttcctgattttgctgatttgggggattgagttggaaggggaaacatggctgcttcttctgcatctctttctggtgcttctgcttcggatcttctgaggagttcaaccagcggtttcaatggtgttcctttgagaaccatggggaagggaaagttggttttgaagaggagggactttacagttgctgccaggctgaggaaggtgaagaagcatgaatatccttggcctgctaaccctgatcccaatgtgaaaggtggggtgctgagccacctttccttgttcaagccactcaaggagaagccaaagcctgtcactttggattttgaaaggcctcttgttgatctgcaaaagaagatcattgatgtacagaagatggcgaacgaaactggactggacttcagtgatcagattctctcattggagaccaagtaccaccaggctttaaaggatctgtatacgcatctgactcctattcagcgggtcaacatcgctcggcaccctaacaggccaactttccttgatcatgtgtttaacataactgagaagtttgttgaactccatggtgatcgggcaggttacgatgatcctgctattgttactggtctagggactatagatggtagaagctacatgttcattggtcaccaaaagggtagaaatactaaagaaaatattcagcgtaactttgggatgccaactcctcatggttacaggaaggcccttcgcttgatggaatatgcagatcatcatgggttccccatagttactttcattgacacgcctggggcatatgctgaccttaaatcagaggaactaggacagggtgaagcgattgctcacaatttgagatccatgtttggtctgaaggtgccagttatatctatagttattggagaaggtggttcaggtggcgccctagccattggatgtgctaataaattactcatgcttgaaaatgctgttttttatgttgccagtccagaggcatgtgcagcaatcttgtggaagacagctaaagcttctccaaaggctgctgagaaattgaagattacagccactgaactgtgcaaattacaaattgcagatggtgttatacctgagccacttggtggtgcacatgcagatccagagtggacctctcaacagataaaaaaggctatcaaagaaaccatggatgagctcacgaagatgaacacagaagaactgttaaaacatcgcatgcttaagttcagaaagattggtgggttccaggaaggtattcctatagatcctaagagaaaagccaacatgaagaagagggatctatctattgctaagattcctgatgctgaactagaagttgaggttgagaaactgaagcaacaggttttggaagctaaggaatcttctcctgttcctccaaaactagatctggatgagatgctaaagcaactggcaagggaggtcgatctagaatactctgaggcagttaaagccacgggcttgacagacagtttgttgaaactaagggaggaagtttcgaaagcaaatgcagataatcaaattgttgatccattgctggagggtaagatagaaaagctaagggtggagtttgaacagcaattgcgtgcagctcccaattatggtaggctgcagaataagcttaactatctgagcgaattatgtaaagttaagcttctgtcagatggaaagaagaacaatgaggctgtcacatttaagcaagagttgaagaaaaaaattgatgatgccttgagtgatccgaaaataagggagacatttgaagcattaaaggctgaaattaaaggtgttggtgcatcctcagcaagtgatttggatgacgagttgaagaagaaaatcattgagtttatcaaagaagtaaaagaagtaaaagaagtaaaagaggtaatagaaaatcaaattgaaagtttggtaaactcgtcggatgatattaagagcaagatactgcaattgaaattggaggttcctaaggctggagagacgcctgattcagaaccaaagaatagaattggtgctttggtgcaactaattaagccgagcctagtggaggccgttgactcgtctggcttaaaagatctgtttgaaaatctggtgtctaatgatggaagtttgacacatggagatccagctagagacagtctcaccgatgaccagtagagggtgaaagttggtgcaaactgcaccatttcttaataaatgctgctcatatggtgctggctgcaacaagttaatgaatggaatagtgaaaactgcaccagtgtgagtgatcttgatacattaccatatcagctggttgtacatcatctagaattatggccatacttcttagggacaagttttggtaattttaaggagataccgtgttaatggtgactaatattttttctgtaatcttcaaatagaggaccagaagggggaataaaattgaaaaccatgttgtctttgtttgagtcaaaatgttgcagttatattttgaatgattttttatgttttcttttcttttcatgttcattttggtcttttttaatcatttaaaatgttcaatttttccctaaatagacttagatgaacattgtataaattgttgagtttgaggaaccgagtaatatgacgcttggtactgtaatgttatttgcaagaatgattagtctt

SEQ ID NO: 18640 - DNA, 482 bp, Glycine max
  Clone ID: PAT_MRT3847_116836C.1
tcctactcgtccgcccacgcgttcgtacggttgggagattatcgacagaagggtgggggctgctagaagacgacagaagggtacggttgttagaagactacagatgggtacggttgcgagaagacgacagaagggtacggttgctagaagcgacagaaggggactccctacgacaaacaacaacaacttctttttactttcatattctctcctctttcattaacgatctctacgaagttctttcactcaaacacacccttaatacacccttaattatatcgcattctccttctcttaccgttagaattagattgcacttattcctctctctccctctttttctggatcttcaacttttccctgatttttgctgatttgggggatttgagttggaaggggaaacatggttgctacttctgcatctatatctggtgcttctgttttggatctttctgaggagtttaaaccacggtttcaatggt

SEQ ID NO: 18641 - DNA, 2685 bp, Glycine max
  Clone ID: PAT_MRT3847_116837C.1
acgtccgcccacgcgtgcgtgcggctgcgagaagacgacagatgggtacggctgggaggggacgacagatgggtacggctgcgagaagacgacagaagggttcggctgcgagaagacgacagaagggtacggctgcgagaagcgacagaaggggactccctacgcataattgtgagttgcgagacacactcactcactcactcatagcagcagcataagaagtatcgcctccatcactctggggtttggctttttccttctttgaacaacaaaaccccaatctgtttcctttgccttctactccctacgacaaacaacaacaacttctttttactttcatattctctcctctttcattaacgatctctacgaagttctttcactcaaacacacccttaatacacccttaattatatcgcattctctttctcttaccgttagaattagattgcacttattcctctctctccctctttttctggatcttcaacttctccctgattttgctgatttgggggattgagttggaaggggaaacatggctgcttcttctgcatctctttctggtgcttctgcttcggatcttctgaggagttcaaccagcggtttcaatggtgttcctttgagaaccttggggaagggaaagttggttttgaagaggagggactttacagttgctgctaagctgaggaaggtgaagaagcatgaatatccttggcctgctaaccctgatcccaatgtgaaaggtggggtgctgagccacctttccttgttcaagccactcaaggagaagccaaagcctgtcactttggattttgaaaagcctcttgttgatctgcaaaagaagatcattgatgtacagaagatggcgaacgaaactggactggacttcagtgatcagattctctcattggagaacaagtaccagcaggctttaaaggatctgtatacgcatctgactcctattcagcgggtcaacatcgcacggcaccctaacaggccaactttccttgatcatgtctttaacataactgaaaagtttgttgaactccatggtgatcgggcaggttatgatgatcctgctattgttactggtctagggactatagatggtagaagctacatgttcatcggtcaccaaaagggtagaaatactaaagaaaacattcagcgtaactttgggatgccaactcctcatggttacaggaaggcccttcgcttgatggaatatgcagatcatcatgggttccccatagttactttcattgacacgcctggggcatatgctgaccttaaatcagaggaactaggacagggtgaagcgattgctcacaatttgagatccatgtttggtctgaaggtgccagttatatctatagttattggagaaggtggttcgggtggtgccctagccattggatgtgctaataaattactcatgcttgaaaatgctgttttttatgttgccagtccagaggcatgtgcagcaatcttgtggaagaccgccaaagcttctccaaaggctgctgagaaattgaagattactgccactgaattgtgcaaattacaaattgcagacggtgttatacctgagccacttggtggtgcacatgcagatccagagtggacctctcaacagataaaaaaggctatcaaagaaaccatggatgaactcacgaagatgaacacagaagaactgttaaaacatcgcatgcttaagttcagaaagattggtggattccaggaaggtattcctatagatcccaagagaaaagccaacatgaagaagagggatctatctattgctaagattcctgatgctgaactagaagttgaggttgagaaactgaagcaacaggttttggaagctaaggaatcttctcctgttcctccaaaactagatctggatgagatgctaaagcaactggcaagggaggtcggtctagaatactctgaggcagttaaagccacgggcttgacagacagtttgctgaaactaagggaggaagtttcaaaagcaaatgcagatagtcaaattgttgatccattgctgaaggataagatagaaaagctaagggtggagtttgaacagcaattgcgtgcagctcccaattatggtaggctgcagaataagtttaagtatctgagcgaattatgtaaagtaaagcttctttcagatgcaaacaaggacaatcaggctgtcacctttaagcaagagttggagaaaaaagttgataatgccttgaatgatccaaaaataagggaaacatttgaagcattaaaggctgaaattaaaggtgctggtgcatcctcggcaagtgatttggatgacgagttgaagaagaaaatcgttgggtttatgatagaactaaaagaagtaaaagaagtaaaagaagtaatagaaaatcaaattgaaagtttggtaaactcatcggatgatattaagagcaagatactgcaattgaaattggagcttcctaaggctggagagacgcctgattcagaatcaaataatagaattggtgattttatatttaaaaaatcatctaaaattattatggccatacttcttagagacatgtttggtaattttaaggagataccgtgttaatggtggctaatattttttctataatcttccaatagaggaccagaagagggaataaaattgaaaaccattttgta

SEQ ID NO: 18642 - DNA, 2987 bp, Glycine max
  Clone ID: PAT_MRT3847_116838C.1
gttgcgagatacacactcactcatagcataagaagtatcgcctccatcacttgggagtttggctttttccttttgtcccaacaaaaccccaatctgtttcctttgccttctactgcctacaacaaacaacaacaactactcctttttccctttcgtattctcttctctttcattgacgatctccacgaagttctttcacctcaaacacacccttaattacatcgcattctcttcctctttctcttaccgtttgaattagattgcacctactcctctctctttcactcttctttttctggatcttcaacttctccctgattttgctgatttgggggattgagttggaaggggaaacatggctgcttcttctgcatctctttctggtgcttctgcttcggatcttctgaggagttcaaccagcggtttcaatggtgttcctttgagaaccttggggaagggaaagttggttttgaagaggagggactttacagttgctgctaaactgaggaaggtgaagaagcatgaatatccttggcctcctaaccctgatcccaatgtgaaaggtggagtgctgagccacctttccatgttcaagccactcaaggagaaaccaaagcctgtcactttggattttgaaaagcctcttgttgatctgcaaaagaagatcattgatgtacaaaagatggcgaacgaaactggactggacttcagtgatcagattctctcattggagaccaagtaccagcaggctttaaaggatctgtatacgcatctgactcctattcagcgggtcaacatcgcacggcaccctaacaggccaactttccttgatcatgtctttaacataactgaaaagtttgttgaactccatggtgatcgggcaggttatgatgatcctgctattgttactggtctagggactatagatggtagaagctacatgttcatcggtcaccaaaagggtagaaatactaaagaaaacattcagcgtaactttgggatgccaactcctcatggttacaggaaggcccttcgcttgatggaatatgcagatcatcatgggttccccatagttactttcattgacacgcctggggcatatgctgaccttaaatcagaggaactaggacagggtgaagcgattgctcacaatttgagatccatgtttggtctgaaggtgccagttatatctatagttattggagaaggtggttcaggtggcgccctagccattggatgtgctaataaattactcatgcttgaaaatgctgttttttatgttgccagtccagaggcatgtgcagcaatcttgtggaagacagctaaagcttctccaaaggctgctgagaaattgaagattacagccactgaactgtgcaaattacaaattgcagatggtgttatacctgagccacttggtggtgcacatgcagatccagagtggacctctcaacagataaaaaaggctatcaaagaaaccatggatgagctcatgaagatgaacacagaagaactgttaaaacatcgcatgcttaagttcagaaagattggtggattccaggaaggtattcctatagatcctaagagaaaagccaacatgaagaagagggatctatctattgctaagatttctgatgctgaactagaagttgaggttgagaaactgaagcaacaggttttggaagctaaggaatcttctcctgttcctccaaaactagatctggatgagatgctaaagcaactgacaagggaggttgatctagaatactctgaggcagttaaagccacgggcttgacagacagtttgttgaaactaagggaggaagtttcaaaagcaaatgcagataatcaaattgttgatccattgctgaaggataagatagaaaagctaagggtggagtttgaacagcaattgcgtgcagctcccaattatggtaggctgcagaataagtttaactatctgagcgaattatgtaaagtaaagcttctttcagatgcaaacaaggacaatgaggctgtcacatttaagcaagagttggagaaaaaagttgataatgccttgagtgatccaaaaataagggaaacatttgaagcattaaaggctgaaattaaaggtgctggtgcatcctcagcaagtgatttggatgacgagttgaagaagaaaatcgttgagtttatgatagaactaaaagaagtaaaagaagtaaaagaggtaatagaaaatcaaattgaaagtttggttaactcatcggatgatattaagaacaaggtactgcaattgaaattggaggttcctaaggctggagagacgcctgattcagaatcaaagagtagaattggtgattttatatttagaacatcatctagaattattatggccatacttcttagagacatgtttggtaattttaaggagataccgtgttaatggtggccaatattttttctataatcttccaatagaggaccagtaggggggaataaaattgaaaaccattttgtatttgtttgagtcacaatgttgcagttatatttagaatgacttcttatgttcttttcttttcatgttcattttgctcttttttaatcatttaaaatgttcaatttctccctaaatagacttagatgaacattgtataaattgtttgagtttgaggaaccgagtaataaaatgacgcttggtgctgtaatgttatttgcaacagggaagaagaaaactaggaaatctcatgcttcaggcaggggaaagtggatgattgtgggcaatattgcaagatatttgtcagtttgtgtgactgatctggttctgaaggtgtacatccccataatttgtattgttcagcttgtatggttaaacacatgctgactttattttcatatactatggtgtgtgcgaatagcacataatattaaaaatgatgttagatcatcaaatgtaatgattattatattatatttataaataaaataagtttctctcacacaaa

SEQ ID NO: 18643 - DNA, 205 bp, Glycine max
  Clone ID: PAT_MRT3847_116839C.1
caggcccgccacagccacgccgcccataaaactgctgacgaggatggagcagctgaagctgctgggcaaagcagagaaagcagggacgctagcggcagcagagaagggtggtttgtccctcgcaacaatagagaggctgggaaccccctcataagcacaagcagtgggtgagggagctgccgccaaagagcacggagctccaggg

SEQ ID NO: 18644 - DNA, 669 bp, Glycine max
  Clone ID: PAT_MRT3847_11683C.1
aaaataaaaatcatttcttttaccaacttgaatggaacttgattcacaaacttgaatgaaaatttattagcgttccccttttgagagaagggaaaatatttacacacaatcttcatctaagctcctatttttatttacagtttcaactcgctcacatttaatttttagcacttttagggacaatcaaggcaaaaagtaaagggttacttaagggttgccatcatgttttatcgaccatagagataatcatcatcctcaaactttgcaactcctgacattgctaaggccaagggacttttcatctcattatttgttggtggaaactgagaataacaatcaatcacccatcctttcccaaaaaaactggactttttttttttggagagaagaggttttttttcacctttcagtattgcaataatctcatgtatgccaggtcgccgagatttttcatttgggacacatgcagctgctgcttcaatcattctacccatttgatttgaaaatttaaaactgcacttgagttgaggatcaagcaactcttcaatggctcctttccccttctgtaaaaaaggtttagcccataagaccaagttctcttctcctgaagatctccttgcctcaattggcttacggccagtaatgagttccaacaaaaccactccaaag

SEQ ID NO: 18645 - DNA, 193 bp, Glycine max
  Clone ID: PAT_MRT3847_116840C.1
cttctgatacctatactaaccactaattcattcgttctttcttctcttcaccgaacgacattagttagacagtagaacctgtacatttcatatattttcatcatcgcaacaaaggcatcaatcaatcaagaaccatggcaggctacagtggcgacgagaccgcacctttgatcggcttactcggtgcagatgc

SEQ ID NO: 18646 - DNA, 432 bp, Glycine max
  Clone ID: PAT_MRT3847_116841C.1
attacttcttattttgtcgcttttatccacttgctattgagttgttccaaaagtcggaaggaacctgaatcactccctatttcgttaataaaaacgtagaggttataataaactttggtttatctgagaaccacaagactaggaaaattagaaaaggtcgatcaagtatctaaaaagcaagttttacctttcgtgtaaatattctcactcaattctaaattcataaatgtagtttagtatgatgatttttgaattctaaatatttcaattttttaaatttttgcttgtaaatggtttttattattatctacagggtaaataaattatactttagctgattaatttgtacagttgactttaggtattaatcttataatagatgtataatttataaaggtgctatcatttgcatgttttttttttttgtgtgtg

SEQ ID NO: 18647 - DNA, 462 bp, Glycine max
  Clone ID: PAT_MRT3847_116842C.1
tacggctgcagaagacgacagaagggaatgtccactgatttcttgctttctggtggaggcttcttccacaaccaggaccccttttcctcctaaatttgaccaaaagtactgggtgagaccatcaaagtatatagattatagaacatcaatagtggaacaacacgtaccactcaaaggatttcaaaaaataattatggttatctcagaatttaatcctacaaaacataaatcaacctatcaacagcaaaagggcaagaacaacacttacatcaaaatcccacgatggatcacccttcctttcagttatatcaaccgcacccttcaactcatcaattttaggcagtgggcgtgggcgatctccaatttcatcactgcacgtcaacaacacataagcacacacaccaaaagagctgcagagaaaaaaaaaacataccttgtccagggtgctggctcattgtcaca

SEQ ID NO: 18648 - DNA, 107 bp, Glycine max
  Clone ID: PAT_MRT3847_116843C.1
ggcctagtcagcttgatgcttaacacatccatagagaggggggtgacaaagacggacccttggttcttcgaccctacaagtgttgtagcctaactatgaactaccta

SEQ ID NO: 18649 - DNA, 265 bp, Glycine max
  Clone ID: PAT_MRT3847_116844C.1
cccttgcgtccgcccacgcgtccgttcatttttgggatctaccctctctattcattaaacaatatcttattcttcagatttatgcctctccttgacacaataacaattcaagggcaattcaatctcacaaaactctgaccttacctgcatttttaagtctgataaataaaggcttctgtttgagaggtgaagatggaattgtaataaagctgggaatttaattggggaattgtgggagaagaaaaaggaggaaatcatccacaat

SEQ ID NO: 18650 - DNA, 274 bp, Glycine max
  Clone ID: PAT_MRT3847_116845C.1
ggaggaacccaaataaacatcttctctccaaaacaaaatttaatcttcacatcattttatcaacaaattcatgccaggggggcatcaaaaatctctgtttgggtagaaaccaaagaaaaaacccgcccctgtcatgtttactgggcccacgggagggccccaaaaaaaggggttggcccacaatatctgaacaagccttcaatttcaggacccccattgggataaggaattgccccaaaaaaaggggccccgctttatttttttgggagaaagg

SEQ ID NO: 18651 - DNA, 531 bp, Glycine max
  Clone ID: PAT_MRT3847_116846C.1
gttgcctctgccctaattcgctgggagagggaatcatgagaaaaccgacactcgacaacgttgttgggcatgtgaccaacacatgcatgagactgagtcgttatctctgtccttttgaggttgtgacgtcgaagttgggcatgccgtgaagattttcttctttggaaatcaatcaaaaatgttttgggcttctgtcgttcgaatgttatattgaaagcaatgtttcactttcggcattggatcaggggaaacatctatctttttggcataagcatggctgaaagaagctaaggccctctatgtacaaaggtcttctatattgatatccaagacatttgttttaggataaatgatgttttccaacatggggcatctcaaattccttcaacgctgaaacaacgcaatctcaatattaatccacatgtccctgacatgattatttggagtgagaacataaatggagtttgcactactaagtcgggttctgcagcaccaaactcatcatggtcaagttttttaagagtcgtttcc

SEQ ID NO: 18652 - DNA, 503 bp, Glycine max
  Clone ID: PAT_MRT3847_116847C.1
gctaccgattccgttccaaggaaggtttcccgtcatcactgtatgacgtcctccttctttgggggggggggggggaaagtggggaaaaagatgtgagaaagcgacgcgcttcgttcaacatatcataccaaaaatgtaaacaaacaagtagagcaggtccgatagaatggccgaaatggaactaaaacgaaagttaagcgttatgcgaaaggcaaagaatttgaacgcgcggtctgcgtttagtggtctaccagaagaacccgtattataaatagcgaaagaaaaagtatggttataatggttctaagcatagcgggggggtacgtgttgggggtagtattggccttatagttagtgtaaaagttgttgcacgtatcgcgatttgttctgtttgtaacgtaaataggttactggtcgctaaatacttggaacggtactattacacgtgttaggtagtggtgccataagtggtggtacagtaagcttatctaggaaaggtaggt

SEQ ID NO: 18653 - DNA, 458 bp, Glycine max
  Clone ID: PAT_MRT3847_116848C.1
cttttgatgaaccactcccaacatactccacactgcatggacactcacaattcaccacatcacatttgttacattcactgaatgtcaaagcatatgtggaagattttgagaggtcaaatattggaacagattgctgcgaacaagatgaacaaggatgacacataacccatgtaaagctgctaccagtgtccatgattatcaagtgatggaacaggtggttcacctatggagaaattaattaagaacacaacatttctagggctaggaacaagattggagatatattcattactagaagtttgcttaagcattttatgcgagtaatgatcccaagtggtgtcttttgaattgtagagtgatagtgttgactcatagtgtatgagaaacactgggttaatagatgaggttatgatggtggcagtggttaaggtgaaatgaaatatgaaaggcaatgaaac

SEQ ID NO: 18654 - DNA, 418 bp, Glycine max
  Clone ID: PAT_MRT3847_116849C.1
aaaactaaaaaaaaataagctaaattttaaaactaaaaaacaaataaaacagacaagtataaattttataaaacccaaacaaaaagaaaacaaacaacccggaaaaacaaccataaaaatccaacatctacttacataagacaactcaaaagtaaagaaaaaaacaaaaaaaaaaagtagctgaaaaagggggaagccacccgaagcctgctaactcttcacctccattcatgcctacttttcttttcgccgcccttattctcacaagacctagtcttacctcccgcctaaaaaattctagacagcttggagtgcaatacagaactggatggggaaaaacaaggttggctttattgagcggcgcgggggggaaaaagggtttggacaaaccgctaaaacagttacgctgctaccacct

SEQ ID NO: 18655 - DNA, 558 bp, Glycine max
  Clone ID: PAT_MRT3847_11684C.1
ggaatttggcccgaagattgaaaggtttgagaatgaaaatcagttattgggtgagaaaagtaatcgtgatatacgacgagctccaagctttagtggtccattaatgcttccaaaccgagcttcagcaaatagtttatcagccccaatcaaatcttctggaggattcagagattccttggatgataagtctaaggctaatctagtgcaaatttttgacgattttcagtgacatcagaaaatttagatctggtgaaggatattcctgtaagttcagtttcacgccgatcttcacagggatcaccaatgaggaaatctgcgagtgttggtgattggatggtggatttcaaacaaatgtcttccaatgattctgccaatatcaatattcctgcatcacttctagtgcctcatcttcacaatctttttcagcagacatctattcaacagcttctcagaatggaaagttaccaccattacctcgcaattcagagaacaatggaagtgttgatacagcagtttcagagagggaacaactactgctgggcagaatttcagaactcc

SEQ ID NO: 18656 - DNA, 769 bp, Glycine max
  Clone ID: PAT_MRT3847_116850C.1
caaaccttttgtcaaatatccttagacaaaatgtccatggcagaggaggagagtccaagtgtgatgccaaaagtgatcaccttcctctcctctcttcttgaaagggtggctgagtcaaatgatcacaaccaacagcaccagaagatctcagtgttccatggcttgacaaggccaaacatctcaattcatagctaccttgagagaatcttcaagtacgccaactgcagcccctcgtgcttcgtcgtcgcctacgtctacctcgaccgattcactcagagacaaccctcccttcccatcaacaccttcaacgtgcaccgtttgctgatcactagtgtcatggtagctgccaagttcatggatgacatgtactacaacaatgcttactatgcaaaagttggaggaatcaccaaaatagagatgaattttcttgagttggattttcctgtttggtttgggtttccatttaaatgtaaccccaggcaccttccaagcctattgtgtcaatctccaaagagaaatgttgttgatccaacaacctctaaattttgcagattccaccctaaatttaggacaatcactaaaggctcacttgtgcttcaatgaggatgaatgttctcatcaaaagcaaacaacagctagctgtttgattccttgcattttctcagtgcatgtgtagtatggttgactagtgtaaatgtagtgattctattacagactggcaagtaaactacttttccttgtgcaaaaaaaaaaattattttttattttt

SEQ ID NO: 18657 - DNA, 196 bp, Glycine max
  Clone ID: PAT_MRT3847_116851C.1
tttttgatttacacatgaaccctagaaactttaaattatcacccaatctcgggggggacagcataattactatgcccgtgctatttccaaccattaaagtggcaacttggcagtacatacacctgcacttggactaaactgaattgtgacacttatccagcacaactattaatagcagcccctcttttaaagtctt

SEQ ID NO: 18658 - DNA, 148 bp, Glycine max
  Clone ID: PAT_MRT3847_116852C.1
gatcccataaaaaccacaagcaaaccctaaaaagtccactgagatatatagaactacctccaatttcacaaaatgaagaaggtgtttgtcgcatttgtacctctgccagtggtatttgtccgcacattgacaccttcaaattcaaacc

SEQ ID NO: 18659 - DNA, 267 bp, Glycine max
  Clone ID: PAT_MRT3847_116853C.1
ggcgcactcagagaggaagcttatagagagagagagagagagagtgaggagagcgtattggctcttcatcaagattggtatttatagggattccatgcacaagaggcgtgccactggtggcaaggacaaggcttggagattgaagagcaagtatcatctatgccttaaggcatgcaaacacctacttatcaagcatcaagtcactctagaggattcgtgtaacatatcactgcttctcatacaggtcattgaggctaaatactggct

SEQ ID NO: 18660 - DNA, 519 bp, Glycine max
  Clone ID: PAT_MRT3847_116854C.1
acgagaaagttgggattcatatataaagacaaactggcggaaaggcatttgaagatgggagatgtatatcaaattccagctggttctgcattctatctagtgaacatagaggaggctcagaagcttcacattatctgcagcattgacccctctgagagcttgggaatcgatattttccagtccttctatcttggaggaggagcccatccagcctcagtactttctggattcgagcctcaaatccttgaaactgcttttaacgcatcaggagaagagttgcgaaaaatgttcactaggcaacacgagggtccaattgtgcatgtgggggattcacatgccacaagcatatggaccaagttccttcaacttaaggaggaagacaaactgcagcacctgagggagatggtgcaacaagaacaagaagaagaggaggaggaatttgttgctgaagaagagaaacaaacaagttggtcgtggaggaagctcttggaatctgtatttggggatgagatcaagaac

SEQ ID NO: 18661 - DNA, 179 bp, Glycine max
  Clone ID: PAT_MRT3847_116855C.1
cacaagtttatatagcgctacaattctctcaccatctcaactcgccatcaggattgaggacggattgcaaacatgctagatcaggttcgacacatctacactcatcgacatacgctgctgaacagctccatatactacttatcgcatctgatatacagagcattgactgagattactgc

SEQ ID NO: 18662 - DNA, 337 bp, Glycine max
  Clone ID: PAT_MRT3847_116856C.1
gcacgcgacgaagctagaattcgctcgagcaacatgtttaattattggaacataaatacaacattcaagttgattctaaaagcagacctattctcaattttctacagaccacagtagtggacatattttagcgaacaataacaagagattgaatctcactgttacactcttatgccatattttacttttccacaggctcctgtcagatcatatgctaatgcataatcctcatcatgatctgtaagaatgctccaattttaatgggtcattcgtccaaatcaatacaagagattataacaaacatcatttgttcagaatcctttgactcttttaaaat

SEQ ID NO: 18663 - DNA, 451 bp, Glycine max
  Clone ID: PAT_MRT3847_116857C.1
gacccattactggaaccattgcttcttttttttttttttttaaaaagccccaaacggaaatatttttcattttgataacattatccctcctgttccaatcaggccaacaagggccttgggttttccattttatcccaaaccattccaataaacgggggacagaattcataaaacacaaaaccaccttatcttctcctttcaacggaacctatttgggggctcccgaacctggtcaaagtaaccctcgataggcggggtaagggtcgccctaaaccgattccccggagaaggagccaaattaggaaccaaaagggcctttttcaaccctttgggaagaggctgaaaagcctcttttttcatcctcaaaagaataaattctcgaggttgtgtccccctatgcttccttataaaaaccctagtatacttcttgggcaaactcctcccatttttc

SEQ ID NO: 18664 - DNA, 334 bp, Glycine max
  unsure (1)..(334): unsure at all n locations
  Clone ID: PAT_MRT3847_116858C.1
tcgcatgcacgcgtacgtnnagctcggaattcggctcgannctcgagccgattcggctcgagtnaanatntacngctcaagatagantaagagtganananagtgcatggacggnagagagantngtcaccnattgntgnnangcngtangcgaagagcngncaanggttccaaccatggctnatccaccactgcagatgcatgtcatggctgnccatatgtgatgcccgcatgcttnccctnnccactncnacnangancgnccacannaccnagctgctactgnagacttntngnanaccacgatttctnagcttncctntnccanangagg

SEQ ID NO: 18665 - DNA, 685 bp, Glycine max
  unsure (1)..(685): unsure at all n locations
  Clone ID: PAT_MRT3847_116859C.1
gatgttattcaactaatcgtatcattttattatcttaactttcatattggacctaatcactctaattcatagttgattgcatgtcagtgatcatcttttcataatcaactaatttgtagaatgataaagttcataaaaacttgcatgattaaactagtggcttgaatccctttatgaatctctatattattcatcattaaccctaaattaaatcccaaatgaccaattgaggtttaatttagggggaaaagtattttcaaaccttgaccattggttggcaattaatttaacaggaaatcaacagttacttgttaatttagggttcttagttataattagaatcaggggaaaacgggtacatgataattcataatttgacttatctccattcacacatttctttctcaaaaactttttgcttagcttaatttattttttttagtacaattggtgaaacaatatcaaacacaagataaaatcccaaaattatnttagtttgtgcaaattggattatttaagaacacaactagtttctaggatactttatctaatcttntcgagtccagaatactattgcatagagtacacttgccctttaacaaacattttactcatcaattagaacactacaaactccccctttatttngtctcgtaaccacaaaggcacttttcaagtcttttga

SEQ ID NO: 18666 - DNA, 575 bp, Glycine max
  Clone ID: PAT_MRT3847_11685C.1
attctagacacaacaaattaagatgctccacatcattagagtctacgtggcggcgtaggaacccaaaaggctcatactgagggctccaggaactaacctagaacaggggaaacaacgacgtgcttcttaacctgaacagaacaagattgaataatcaaatcattcatatgtatgtaaactccatgaagcggctgatcttattcagaacaaattaaacattggaagacctatttccggggatcaaaaaggggaacgtgtagttgagttccccgcccaggcatccacaggggcctgaacattccttgacaaattgaacaaagagaatgccccaagaaggatcaggaatggggttactattattaccagcggcacacagatatttaaacctgtccttcttgttgctacacggtaaccttggataggacacgttcgtgaacgacgcccccatcacaatcaccggtcccgaagggatcaactctccgaacacactcctacccaccagttgcccctgtggtacagcaaggtatatgctgagactcggcgccgccggcggcgccggcggaggaaggaacgat

SEQ ID NO: 18667 - DNA, 184 bp, Glycine max
  Clone ID: PAT_MRT3847_116860C.1
ccttgggcagagagatggtggtgactaatggacttcggatgccggtccattagaggcatttaagaggtttggaaagaagcttgaagagactgaaaagaagcgtagagagaagagcgaagatgatacattgagaaaccgctatggaggagaaaaaatgcctgacagccgggggtatccccacagt

SEQ ID NO: 18668 - DNA, 262 bp, Glycine max
  unsure (1)..(262): unsure at all n locations
  Clone ID: PAT_MRT3847_116861C.1
cgtccggtttcgttctctgtgtttgcggctgggggtgtccgaacgancgaccttcttcgtttctcgcggggtttaangtctcntgggtccggcaaagactcacatcnncnttgtcgtcnttggccctgtcccctctgggnngtcaactcccnctggtcctttgctctttttcttggcggtnttgacgtgggggggggggggaggttccngccggcggctgcggcgctgcacaggaggggagggaggtgtgcctgggtgcttg

SEQ ID NO: 18669 - DNA, 109 bp, Glycine max
  Clone ID: PAT_MRT3847_116862C.1
ttcgtccgtttgctctcgggctctttatattaaatcatgctgttcgattcgattctattgtcctatggaaccgcagcatcagcccaagctggagcccgagccagagctt

SEQ ID NO: 18670 - DNA, 356 bp, Glycine max
  Clone ID: PAT_MRT3847_116863C.1
acaccatgagtgctttaaccaaatcttggattgtggcatcaagcatatgggcattggaggccttgtttgacaaccagcgtatgcatatggaactatgcggggggggaggaaaacaacctgcaaacacttttttttttcttatagaaaaaatattattttgtcctctgggggcttgatgcggatcccacccgggggagaaaaccgacccacagcatttggttaattttctcgagggccattgctggggggctaggactgcaaaaatttaattaagggggggttatcttgagtgaagataaaaaaaaacggtgtatttagactgctttttttcctaccccctcccaaaaaaccccctt

SEQ ID NO: 18671 - DNA, 1890 bp, Glycine max
  Clone ID: PAT_MRT3847_116864C.1
ccacgcgtccgcaaaatcctgcaagtgagcaagtcagtattgcagaaaatatggtaaatgacgctgcaggtgtcacagataatactgcaaaggagcaggtagcaggtagtgcagaggatccgacaaagaaccaagcagcgggtggtgcagaagatcccccaaaggaccaagtggcaggtggtgcagaaaatcctttaaatgacctgatagatcttgcacaaaatcctgaaagtgaacaagcaggtagtgaggaaaatctgttaaacaaccaagcaggtggtgtagaaaattctgcaaagaaccatgcagcagctggtgcaggagatcctccaaatgaccaagcagcagatggttcagagaattccgcaaaaaacatatcagcacgtagtgcaggagatcctccacatgaccaaacagcagatggtatagaaaattctttaagcaaccaatcagaagctacagagaaacttgtaaatgatgaacagggtcctgcagaaagttttgtagaagatgaagtacatgttattgaaacgcctgaaaagtgccaaaaatatggtgttgagacccctataagcagcaaagcagaacgcctcccagaagaagcaaaagagatactgaaatcattggcaagtaaatgggaggatgtatttgatgcaaatgcattgcaggtgatccctctcaaaggggcaatgaccaatgaggtattccagataaagtggccaactacgacaggggaattgtcacgaaaggttcttgttagaatgtatggtgagggtgtggacgtgttctttaatagagataatgagatccaaacatttgaattcatgtcaaagaatgggcaaggtcctcgtctactaggacgatttacgaatggccgtgttgaagagtttatccatgcacggacattatcagcatctgatctacgtaatccatctatttctgctcttatagcagccaaaatgaaggagttccatgatctagatatgcctggtgaaaagaaagtccatctttgggatagattgcgaaattggcttagtgaagccaaacgtttatcgtcccctaaagaagttgaagctttttatttggatacaatcgacaaagaaatctctattttggaaaaggaactatcaggctctcaccaacaaataaaattttgccacaatgatttacaatatggtaacataatgcttgatgaagagacaaattctgtgaccatcatagactatgaatatgctagttataatcctgtagcatttgatatagcaaaccacttctgtgagatggctgctaactatcatacagaagagcctcatatccttgactacaataaatatcctgattttgaggagcgtcaaagatttgtgcaggcatatctgagtacctccggtgagcagcctagtgacagtgaagtggagcagctacttcaagaaattgagaagtatacacttgcaaatcatctattctggggcgtttggggaataatttcggcacaagtaaacactatcgactttgactacaaggagtatgctaaacagagatttcaagagtactgggcaaggaaaccttatcttttaataaactctgaagcgccttctccttataatgtgcctgagggtacaggagagctagcctcagcattgcccaccaaatcgaagaactctggtatctttaggaagatgaagagagttttgggtctcggtttgttcaagtctaagagctaggacaacaattctgccagctcttttttgtttttttcttagtttctctttgactgaaaatgtcaaatgagaaaagttgagaatagttacacaaaataatgtaccaaacaagcattacgttttggtattatattttattcattttttttaaaagggcgaccgcgctcggccg

SEQ ID NO: 18672 - DNA, 2453 bp, Glycine max
  Clone ID: PAT_MRT3847_116865C.1
attctgcaaagaaccatgcagcagctggtgcaggagatcctccaaatgaccaagcagcagatggttcagagaattccgcaaaaaacatatcagcacgtagtgcaggagatcctccacatgaccaaacagcagatggtatagaaaattctttaagcaaccaatcagaagctacagagaaacttgtaaatgatgaacagggtcctgcagaaagttttgtagaagatgaagtacatgttattgaaacgcctgaaaagtgccaaaaatatggtgttgagacccctataagcagcaaagcagaacgcctcccagaagaagcaaaagagatactgaaatcattggcaagtaaatgggaggatgtatttgatgcaaatgcattgcaggtgatccctctcaaaggggcaatgaccaatgaggtattccagataaagtggccaactacgacaggggaattgtcacgaaaggttcttgttagaatgtatggtgagggtgtggacgtgttctttaatagagataatgagatccaaacatttgaattcatgtcaaagaatgggcaaggtcctcgtctactaggacgatttatgaatggccgtgttgaagagtttatccatgcacggacattatcagcatccgatctacgtgatccatctatttctgctcttatagcgaccaaaatgaaggaattccatgatctagatatgcctggtgaaaagaaagtccatctttgggatagattgcgaaattggtttagtgaagccaaacgcttatcgtcacctaaagaatttgaagctttttatttggacacaatcgacaaagaaatctctattttggaaaaggaactatcaggcccacaccaacgaataggattttgccacaatgatttacaatatggtaacataatgcttgatgaagagaccaattctgtgaccatcatagactatgaatatgctagttataatcctgtggcatttgatatagcaaaccacttctgtgagatggctgctaactatcacacagaagagcctcatatccttgactacaataaatatcctgattttgaggagcgtcaaagatttgtgcaggcatatttgagtacctctggtgagcagctgagtaacagtgaagtggagcagctacttcaagaaattgagaagtatacacttgcaaatcatctattctggggcgtttggggaataatttcggtatcttcactttctcactcagttttatttgttttataggatgggtgtagctgagtccttagagagagaagtgattccataaacctggtttttgtgcatcatttccataaaaatggcatttccataaaaataaacttaaacattattgtcgtcgtcatcatcatcattcattattacaactgatgaaacaaaaggcaattgtatttgctattgctttgtcataaagcatatttctcttgaattttttaatgttaggtgtctcctatcacagtgcttttggatgttggtataaacaaagcatttgttttcttttgggcatcatttccataaaaataaacttaaacattattgtcgtcgtcatcatcatcattcattattacaactgatgaaacaaatggcaattgtatttgctattgctttgtcataaagcatatttctcttgaattttttaatgttaggtgtctcctatcacagtgcttttggatgttggtataaacaaagcatttgttttcttttgggaagtaagttacaaattttagctttttagggaaaaaagataaaataaactttataattttagcctctaaattgcgttttctcttgtgagacaaagcactattgggtgtagaaagactaatccaaaaggtcatagtgacaagaaatagttgcaccccatttgggtttttatgaacttcgaaattctcccaagttcccatctgggctgcacatattatgtagtttgttgccattagcagatgagaatttctccatatttgattattataaatcctacacatactatatagtatatacccaatagtaaagagggtaggaattttgttcttcattgtttcatcttctgattaatttgttcaggcacaagtgaacactatcgactttgactacaaggagtatgctaaacagaggtttcaagagtactgggcaaggaaaccttatcttttaataaactctgaagcaccttctccttataatgtgcctgagggtacaggagagctagcctcagcattgcccaccaaatcgaagaactctggtatctttaggaagatgaagagagttttgggtctcggtttgttcaagtctaagagctaggacaacaattctgccagctcttttttgttttcttagtttctctttgactgaaaatgtcaaatgagaaaagttgagaatagttacacaaaataatgtaccaaacaagcattacgttttggtattataattttattcatttttttt

SEQ ID NO: 18673 - DNA, 284 bp, Glycine max
  unsure (1)..(284): unsure at all n locations
  Clone ID: PAT_MRT3847_116866C.1
ctcaaagctcgcataccctcctcatgtccacttctctccttcaccctcctccaattatctcttccttaaaacccacaaaccctccgccacacacctctcctcttccttncatgccaccccagcnacaatgcctcnacctncgccgctgccaacacnaccacccgctcgccgctgcctttcaccgtgccggcgccgcccgcggcaagttcgagcgcaagaagccccacgtcaacatnggcacnatcggccangtcgaccnacggtaagacnaancnttnagcgng

SEQ ID NO: 18674 - DNA, 207 bp, Glycine max
  unsure (1)..(207): unsure at all n locations
  Clone ID: PAT_MRT3847_116867C.1
nngtcgcangcncgcntgcgtggagctcggnnttnngctcgngnnacanaccaggtctcgntgtgtnatttcntnttggaccntcaanngcctgcttngttggnttggntcnttccnntgtttgacantgccnntctttntctttcnntccacccagaagggantttnnntttgtnngcnaatntccngttncnttgtccngttncg

SEQ ID NO: 18675 - DNA, 377 bp, Glycine max
  Clone ID: PAT_MRT3847_116868C.1
ggaacaaaaggggacaaatcacccccatggtttaattacaaggggtcccaaatcatgaaccggccaatagtttattggtgaaagaaattaaagggaaatacaacgatgagggagtttgattttaagggtagaaaaaacttttattaaaaccaaacttttttttcttgtaccctttggaaacatcggacccgagtctggatgcaatagggggggggtccatgatgtaatgaaacgtgcacttttccacgggtttttttttaaggtttttggcctttttttccgggaagcaccccgttgtgaacttggatctgggccggcccaggttccaggcccattttccgtttcggatccgatttttggggccgaatttcgagctt

SEQ ID NO: 18676 - DNA, 296 bp, Glycine max
  unsure (1)..(296): unsure at all n locations
  Clone ID: PAT_MRT3847_116869C.1
aacgtcgcangcacgcntacgtaagctcggaattcggctcgagtgaaagtatggnntgnaggtangcncngnnngnnnganannttnnnntgangtatgggccttggacacagcngctaanccttatgaatggcgcaagctagagccagaaggagaggncccgcctccttgcatgtatgcaactgcaagtgcacgctctgatggacttcntctgcnttntggaggcagngatgccaatantgttccatnntcaagtgcatatggacttgctaaacatagatatggtcgtngggnat

SEQ ID NO: 18677 - DNA, 2861 bp, Glycine max
  Clone ID: PAT_MRT3847_11686C.1
ccacgcgtccgaagagagaaagagggtcccactggaagagtccgaagcggaggggagaggaagaaggaacatgtcaggcgttagagatgatgggcgttgttgttggtgttggtgtgcccaccctcactctctaatctctaagactctctactcttctcttagtgctctaatctaattattattatcaacataagtcacaacaccaccattcttccattctctctctttcttctacactattcattcaatccatgccggtcaacgtgaggtgctgaaggtcaatcgtggtctttcgaaatggggaacgggagcagaagctactcggcgaaccggagcgactacaagcttctagaagaagtcggttacggcgccagcgccaccgtctaccgtgcaatctacctcccctacaacgaggaggtcgccgtcaagtgcctggatctggatcgctgcaatataaatctggacgacatacgtagggaggcgcagacgatgagcctgatagagcaccccaacgtggtgagggcctactgctccttcgtggtggagcggagcctgtgggtggtgatggcattcatggcgcagggctcctgcctgcacctcatgaaggctgcttatcccgagggattcgaagaggccgccatcggatctatcctcaaggagactctcaaggcgttggagtatctccaccgacacggccacattcaccgtgacgttaaggccgggaatattctcctcgacgataacggccaggtcaagctcgccgacttcggcgtctccgcttgcatgttcgacaccggcgaccgccagcgctccagaaacaccttcgtcggaactccctgctggatagcgccggaggtgctgcaacctggaaccggttacaatttcaaggcggatatttggtcgtttgggattactgcgttggagttggctcatggtcacgcgcctttctccaagtatcctcccatgaaggttcttttgatgaccattcagaatgctcctccggggcttgattatgatcgtgatagaaagttctccaagtctttcaaggaaatggttgctatgtgcctggtaaaagatcaaacaaagaggccatccgtggagaagttgctcaaacactccttcttcaaacaggctaagccaccggagctttctgtaaagaaattatttgctgatttaccgcctctgtggaaccgtgtaaaatccctccagcataaagatgcagctcagctagcactaaagaaaatgccttctgcagaacaagaagctatatctcaaagtgaatatcatcgaggagttagtgcatggaacttcgatattgatgatttgaaagcacaagcggcattgatgcaggacggtgatgatattgcagagatgagggaagaagatgaaaacaaattcttcagctcttacaagggtacagctgattcccagtttattgtggatgaaaagaattcaaataacttgcaacaatatgagttcacatcacaagtaggtagtaacgacataccacagtgtgagaaaagaaatggatcagttgctgaagcaacaccatctactttagagaatgatgtgggaacaagcaaagttaaaactcaatcagtgaaacttggtaaaacccaaagtggacccctgatgccaggcttagtgcttggtcattcttcatctgaaagagggcgtacatttgaaaggtttgagaatgaaaaccagttagcgggtgagaaaagtaatcgtgatatacgacgagctccaagctttagtggtccattaatgcttccaaaccgagcttcagcaaatagtttatcagctccaatcaaatcttctggaggattcagagattccttggatgataagtctaaggctaatctagtgcaaattaaaggacgattttcagtgacatcagaaaatttagatctggtgaaggatattcctgtaagttcagtttcgcgccgatcttcacagggatcaccaatgaggaaatctgcgagtgttggtgattggatggtggattacaaacaaatgccaattggtcagtcctccaatgattctgccaatatcaatattcctgcatcacttttagtgcctcatcttcacaatctttttcagcagacatctattcaacaggatcttataatgaatctgttgaatagcttgcaaactgccgaggcaattgatacttctcagaacgggaagttaccaccattacctcgcaattcagagaacaacggaagtgccgatacagcagtttcagagagggaacagctgctgctgggcaaaatttcagaactccaatcccggatgattaatttgaccgacgaactgacttatgagaagttaagatatgtgcagttgcaacaacagctaactggtctctacagccaggaacaaaatggggaaagagaggaatttgcatgaaagcagataattatgaacctccaggcgagtgatcaatcatacgttgggctccaattctttctctttgctgaggagaactactttttggatgtttatagtcagtccttgataagtgtcatatatatatatagatatatatattctctgatccagccttgtgttcaataaacttttgtgacgatctataatacccagctagtgcaaatgagcaagatgatgatctgtcatagttaatctcattatttatttcatttaaagattcagatgtaaataagcttctctgttgtatcatactgcaacgtgctatgtttgcagatcaatccgaaattctcgtgataactgataagaaagttgtgagtactaccccgggggagaaataacatccctacatattgaactgtttttgttattactaaaaaaaaaaaaaaaaaaccctcgtgccaaattcc

SEQ ID NO: 18678 - DNA, 166 bp, Glycine max
  Clone ID: PAT_MRT3847_116870C.1
gtttctttttaaacaaagacatcggtattggagtgatagacaacgcatgacggtgagattcatccgacgaaatcacaatttctcacttggcaactccgtcacatttaatatctacccgtaacaccaacatcccgaattacttgataaattatttagatagcctgag

SEQ ID NO: 18679 - DNA, 204 bp, Glycine max
  Clone ID: PAT_MRT3847_116871C.1
aattctatcagtaattagcactttgttctgtccctgagtgattctctacataacaaagcaaccaacataatgcttctaaattctatagtttcctactcaaaattacaacttcattcactcaatcataaacttgaaaactaactttgaattggaaagtttaaatccattacattcttaacaaataaatcatatctatgctggaga

SEQ ID NO: 18680 - DNA, 494 bp, Glycine max
  Clone ID: PAT_MRT3847_116872C.1
gatttatgcgttcgataaaatttttaattttattaattaattttaaaaaaattatttttaaaaaaaatttaatattttttaaaaaattatttaaaaaaaaataaaaataataatattttatttaaaattataattaaattaataaattttaaatataaggggggggcatttttaaaaaaataaaattaataaaccggtgatgggaaagatatcttttttttataaagaggtgaaaataaatacgggggggtgaatttaaataaaatagtttggaaaaaaaataagttaaaaaaattaaattattttaaaaaataaaatatttttgaaaatttagctaatattaagaaggaactatcggaacagctttcaaaaaattgtcgatatttaataatcaaaataaaaagattataatttcatataaaatatcaaagatattattggtaataccaaagtgaaaggtttaaattatatattccccaaaaaggatttttttt

SEQ ID NO: 18681 - DNA, 106 bp, Glycine max
  Clone ID: PAT_MRT3847_116873C.1
aagaagaaatgattgggaggtgagttactaaactcccccgaaaacataatcaacagacacttaatggtacaataaacaagacggtcacaagaatgttgatataaga

SEQ ID NO: 18682 - DNA, 461 bp, Glycine max
  Clone ID: PAT_MRT3847_116874C.1
ctttattagcaattaatctacttgccgtacaattcttgaagcacatgtgagcagcacccaaatgtcggacgagccaccgtcaccagcatcgccggagacgcccaaggagccggcaacgcaggcgatagaagtgccgctaccagctgtgccggagacgaccaaagaaccggcaacgccagcgtcagaagtgccgtcaccagcagcgcccgagacgaccaaggaaccgccaacgccagcgtcagaagtggcgccaccagtagcgccggagacgaccatggaaccgccaacgcaagcgtgagaagtgccgtcaccagcagcgccggagactaccatggaaccgccaacgcaagcgttagaagtgccgacaccagcagcgtcggagacgaccatggtaccgccaacgcaagcgttagaagtgacgtcaccagcaagtgcggatacgaccatggaaccgccaacgc

SEQ ID NO: 18683 - DNA, 232 bp, Glycine max
  Clone ID: PAT_MRT3847_116875C.1
cttgactagtgggcaagggctgacataacgatccacaccgactggttgtgctacgaccggaatcaagatgcgccgggtactgctacttcattaataagtacagtagacctccctcacttattaacctctctatagaggatcacgatgctctagggtctactaggacagacacactattgtaagaaaggggcgcagagacttaactcacagaggaagcacagtgcacattttc

SEQ ID NO: 18684 - DNA, 472 bp, Glycine max
  Clone ID: PAT_MRT3847_116876C.1
tttgaatgcaagaaagaagtgctgcaggatggcaacaacttttgcttctatgtatgggatgatctacaagataaagcccacaaagtcaatagttctatgctgtctctgaaagacctacatttcctttctattctttagttgtaatagaaatgaaacatacataaccagacgagagtacataatatttcaggaatttccggaagccttattgtaatttaattctattctatttcgattttccttccctttagtgttgttggttaagttgatgcatttagttgatagagtttttattctttttacccttttgtgagttttcggatctgtttacaatcacggaattatgttacttctttctgtccgataacctttaatgaggttctaatatcaggtagcagaatgaacctctcagtcagatttgttttttcacttcttcattgattgatatattgcagcacactttgtggttaaa

SEQ ID NO: 18685 - DNA, 535 bp, Glycine max
  Clone ID: PAT_MRT3847_116877C.1
ctttgtttttttttttttttttttttttttttatttttttttttttttttttttatttttttttttttttttttttttttttttttttttttaaaaagcaaacagaacttttttcagccagggggaacaggctggttcaattcaggaaaatctcaaacccgggcggaaatttacaaaatttagtttactaatcacggccataagggcctgggtctagttaattctaaccctcggccaaacaaaaggcccgacttttagctgggttcccccacagccccgtttttttttttaaattccccttcatcgggaattggaaaaccctcaattttatgcgaaaccttattgggagaaaccttcaccttataaacggaaccatttgcaaacccagtctccgagccatccaggggcaaggggccagcctgccatattcggaggggcccatcctcaaatccgggggcataggattctcccccaggaaaaaaacaaacacgggggacaggaccatggggccccttggtgcatgcaatctcattcc

SEQ ID NO: 18686 - DNA, 1271 bp, Glycine max
  Clone ID: PAT_MRT3847_116878C.1
ctaaatccttccaacactagccatcatgatttccttagccgatgcctatcatgtagtggcagccactgtcccattatatgtgaccttgatactggcctacatttctgtgaaatggtggaagatcttcacaccagatcaatgttcaggcataaacaaatttgtggccaagttctctatcccacttttgtcttttcaagtcatttcctccaacaacatctacaaaatgagcctcaaactcatgtatgccgactttctccagaaattgcttgcatttctggccttaatagcaatcactaagatcagtggccgaggaggcttgaaatggatcataactggtttgtccataacaacacttcctaacactttgattcttggaatccctctcgtgaaggctatgtataagagtgaagcagttgttctcctggcacagattattttcttgcagagcatgatttggtacaatttgttgttgttcctttatgaacttgatgctgtcaagaccaggcctactgcagctgcatcatcatcacaaggatcaggagaaacagacacaggtcgtgaagtacaatcaaaaggagaagaagacgcagaacctagaataaaaaggaagaggaaggtcttgctcattcttgtcacagtgggaaagaagctaattaaaaatcctaatacatatgcaactttattgggttttatttggtcaagcataaaatttaggtggggattacatatgcctgaagttgttagtcagtcaatcgaaatattgtccaatggaggtctaggcatggccatgttcagcttaggtctgtttatggcatcacagtcaagcatcatagcatgtgggccaaggatggcaatggtggcaataggactgaaagttgtgcttggacctaccctgatggctgtggcttcctttgtgattggattaagagacacattgtttaaagtggcaattgttcaggcagctctaccccaaggaattgttccttttgtttttgccaaagagtataatgtccatccagccgttttaagcactgcgatcttgttaggaatgctcattgccttgccggtggaattggccttctacttcctattagcaatttgaagagcaaatgttaaatatatgctagctagggacatcgagaataacagcattacattgccgtaaaataacaatttataaatagttgtaaatttactgcattattgattcattgtaattagaaaacatgtgatcactcaactaattaatactacttaattaatttgtctat

SEQ ID NO: 18687 - DNA, 388 bp, Glycine max
  Clone ID: PAT_MRT3847_116879C.1
aaagggaaaaggggggggactttcaaaaaaaaatttatgggaaattgaaaaaaaaaaagaaaaggaaggggttgtccatcagggccccccccaaaaacatgaaaaaagaaccagagctaattaattacccccccgtctaaatctcaagagggaacaattttggaccccccaccggggggcccttataaaaaccccaaaaaaaaaatcttttaactggagaaaggggggggtttaagcatatccttgacaattccccaaacaagctgggtttttgggggggtgtccccatccctaagggacccgttgggaaacaaaacactcccctacaattgctgccccaagaaacgaatttttgccttttcccccctcaagttccaaattccagcgt

SEQ ID NO: 18688 - DNA, 241 bp, Glycine max
  Clone ID: PAT_MRT3847_11687C.1
cacctcttatttggaataaggtcatggcagaacgaggttaaacttaaaactttatgcagccaaaatcaaaatatttcggcttgtgatgagttggagacaaacagactattgtcgacctagacaatttattgctcatatcctattcaaaaataaagcgactgtcttctttaaaaggacatgttcaactaaaaatgtgggggggcagagatttctacatgaaagtgggattgccagtaattat

SEQ ID NO: 18689 - DNA, 472 bp, Glycine max
  Clone ID: PAT_MRT3847_116880C.1
aggaatcccgaaattcgggccccccaactgggtaagaaaacacatgggaggcccctactcggggccaaactcggaaaaaagcaaaaatggccctttgtggttttctctggccctcccccttaaaaaaaaaaacctcgggtattaaaaaaggtgggggggcttttgggggaaaaagggcaccacccttttccgcataattaacaaaaacaggggtcccattatgggttattcaagaaaaaccgcccaaaaaagccctgggtaaccatggggttttaaaaaaaaggattctcaaaaaacccaaatctacggggggggcaaaagggccaagattgggaaaaaccccaattggcccgctaaaaaaaaaaaaaaggatttccttcatttccgaaacccaaacaaatgggggggggggcaggccccaaagaattaaaggcctttcttaaaaatgcgccccatggagcgcggggggcac

SEQ ID NO: 18690 - DNA, 258 bp, Glycine max
  Clone ID: PAT_MRT3847_116881C.1
gtgattctaaacatggaaactataatggatgagtttgagatcattgggaatccaaagccatatatggattctgatataccaacagtgagagcttcagattcagcttcagctgatagcactgttgagaatttgcccaggagttataatagtaataatagttctgctggtcaaaatgcaagtcacaataacacgcagaatttcaggccaactattcaacctccataccaaccacctccactttacaaaggccgtgggcca

SEQ ID NO: 18691 - DNA, 273 bp, Glycine max
  Clone ID: PAT_MRT3847_116882C.1
ggatcatgcggctatgctagacgctcactcttatattaaatcagactgcatgttatcgaaaacgtatctccgtttcttcagtccgaccaccgaaagaaaaaacaacacctccctcaaatcaacagaccccaccgcggagatactctacacttacaaaacacaccgcccatggctatctacaacagactcacccccaacgacgtatacacactcccaaaacaacaatatatcctgtacgtaatccgcgaactcaaatacttactctagaccaca

SEQ ID NO: 18692 - DNA, 663 bp, Glycine max
  Clone ID: PAT_MRT3847_116883C.1
cccgcgtccgaatttattttcgcactcgccggaccactctcctcctccgcctccgccatgcctagcaagcgcaagaccagatcctccgcctctcccgctgccgcgccgccgagcaagcgcgcctccagatcctccgcctctcgcgtcgccgattccgcaccggtcaaatctgaagccgaggaagttgtggcagcttcctctgtcgtcaaagaagaggcgcaagcaagcttcacggacgttactgacggcaacgttagcgatggcgaggggactaacgccagattcgtcggagagcctgttcccgacgaggaagcccggcgccgctggccgaaacggtaccaggaaaaggaaaagaagcaatccgctgggccaaaatcaaacagaaacgatgaagacgaggagattcaacaagctcgacgtcactacactcaggcagaagtagatgggtgcatgctttacaaactttacgatgatgcccatgttaaagcagaagaaggagaagacaattacatttgtaaaattgttgagatatttgaggccattgatggggcactgtattttacggcacaatggtattatagggctaaagacactgtcattaaaaaacttgcatatctcattgaaccaaagcgagttttcttttctgaagtccaggatgacaac

SEQ ID NO: 18693 - DNA, 250 bp, Glycine max
  unsure (1)..(250): unsure at all n locations
  Clone ID: PAT_MRT3847_116884C.1
cagaacttttcaagatggtttgtgaagaaaatgaaactgatgttgatattggaatacctgcggtcatgcttcccacaagatgctggattgaccttggaaaggcatatagaaaataaatccaatgtgncaatccagttatactctccactgcgtccattggttgatgttncggaagtgtttttgtggctnatggctgttggnaccatttnaattncttctnatnggtctgcctggagtgatagagaancac

SEQ ID NO: 18694 - DNA, 581 bp, Glycine max
  Clone ID: PAT_MRT3847_116885C.1
acatgtatagtacccaacaaataaatggggagagattgcctaatatttgaaacaggatttggagaaccgaatttctatgcccaccaatacataggaatgtatacctaaactaatcctattaaacctccgtatgttgagcctagctagattatctcactgtcattgtgctccatcataaatgaggcatgctaggtttaacatatctacactaatccttaggctaaagcgtgatctatcaatgcttaacacccattaaacaaattccctgcacgttgtacaatacatgatatttgtcccattgtagtgtgaagaatcataatgaattgatatacctctacggaaactagaacctgtatgtgctctaatcttacacaagctaatggcatcggataacgatctataacactgactgatcacagtccaatattatgctaaggagtttaacatgattagtgactcagtgatacaaaccgttaataccactccgaccaacccaagcgtgcgggttatatctattgcgaataatgttgcatattggaaaaataaagacattgccgatttctgcctgaaactattaccct

SEQ ID NO: 18695 - DNA, 597 bp, Glycine max
  Clone ID: PAT_MRT3847_116886C.1
gactctaaaccaaacccacgcgtccgctctgttgtcgtgtcttcttcgtttggattaaggttgcaggtaatgctatggcgaacaccgatgaacccaatctcataaacttctcctccgttggtgaaccctcgaaggttctcatggacaagtatttgaagatactcaaagaatttgtggcctccaacgatcaaggaaatcgatgaagtctcacttcaaggttcactaggtcctgatggcctctacatatttccacatcttgcacccaaagactatgcctcaaccacctgcttactttcaaattctagtgttgattatgttattacttcttcttctagttgttctaaaacaaatttattatttcattgtaaatccagttcttgatgttaaaacaacacctagtactagctctcaaactatatgggaccttagatttggtcatcctgatgctaatgtactaaggcttatgcttaatcattgtaaatatacccatagttaataaaactatgttcaaattttgcgttgaaaaacacaaaccaaaaaaaaatcattacaattataaactacattcctccccctcacatgataattcttcttata

SEQ ID NO: 18696 - DNA, 285 bp, Glycine max
  unsure (1)..(285): unsure at all n locations
  Clone ID: PAT_MRT3847_116887C.1
aatgtgcaacacatacttatattttcttatatattctgaagtaatatattattttttttaaacaacctaaaccttattaatcttcatcataaggtttagagttgaaaaacaaaatataaagttctccttctattaataatcggggnttataaccacatttactataaacaaaaaatcctctatttatttgaaattcatgtaattaacctatataaacacccctcctttgtgtactctaacacacggatttcaatccattataaatcatttctcctatttaaacat

SEQ ID NO: 18697 - DNA, 383 bp, Glycine max
  Clone ID: PAT_MRT3847_116888C.1
atctctccccaaaaaactaaccttttatattggaaaaatttatcccatagtccattaataaacccgatacatcaatggttttatttcacacaaacaacttaacttacacctccaattactcaaccattctcaaatcatacaattcaacttccgccaaccattaaataaacaccctacaaattgtacatctcttaccttcacaaaagacaaaattattcttatttgaatacactttctaacttaatagcacactaatgctatataccatttttctctacaaaaacaagccaactaaacaaccttcaaaaccctgcgtgcaacgaaataaactttttcttgtcttgccataatatattcatattgcacaacatttactaaaacac

SEQ ID NO: 18698 - DNA, 362 bp, Glycine max
  Clone ID: PAT_MRT3847_116889C.1
gggggaaacatattactttgggcttatgggtttaatctaatgtaaaaaaagatttcttacatggtttattttattatccatctcttagtctttaataacatcaatctcgaaacatccccccccacattattaatctcctcttgtcatcatatgggtaatttccaatcagctttccccgcactacttttatttgcgtccttttttttgcattacaagaatttcaatgtccttatttttatgatcaatacccaattaaagaattttgcttagggttgtataacaagccatttcgaagtccaaacttatctctcttcaacaaaaaagtccggtttttctggcttttgcaaaaaaactccataatt

SEQ ID NO: 18699 - DNA, 2857 bp, Glycine max
  unsure (1)..(2857): unsure at all n locations
  Clone ID: PAT_MRT3847_11688C.1
ggctcgagagagggtcccattggaagagtcggaagcggaggggaggggagaggaagaaggaacatgtcaggcgttagagatgggcgttgttgttgttggtgtgcccacccatccccaatccaaacactcttctcttagtaccctaatctacttattattatcacaaacacaacccaacccttccatcttcttcttcttcaatccatgccggtcaacgccagctggtgctgagggtcaatcgaggtcttcctttctcaatggggagcgggagcagaagctactcggccaaccccgccgactacaagcttctagaagaagtcggttacggcgccagcgccaccgtgtaccgcgcaatctacctcccttacaacgaagaggtcgccgtgaagtgcctggatctggatcgctgcaacagcaatctggacgacataagaagagaagcgcagaccatgagcctaatcgagcaccccaacgtcgtgagggctttctgctccttcgtcgtggagcggagtctgtgggttgtgatgggattcatggcgcagggctcctgcctgcacctcatgaaggctgcgtatcccgagggattcgaagaggccggcatcggatctatcctcaaggagactctcaaggcgttggagtatctccatcgacacggacacattcaccgcgacgttaaggccgggaatattcttcttgacgataacggcctggtcaagctcgctgactttggtgtttccgcttgcatgttcgacaccggcgaccgccagcgctccagaaacaccttcgtcggaactccgtgctggatggcgccggaggtgctgcaacctggaaccggttacaatttcaaggcggatatttggtcgtttgggattacggcgttggagttggctcatggtcacgcgcctttctccaagtatcctcccatgaaggttcttttgatgaccattcagaatgctcctccggggcttgattatgatcgccgnctttgtggaaccgtgaaaatcctgatagaaagttctccaagtcttttaaggaaatggttgctatgtgcctggtaaaagatcaaacaaagaggccatctgtggagaagttactcaaacactccttcttcaaacaagctaagccaccggagctttctgtaaagaaattatttgctgatttaccgcctttgtggaaccgtgtaaaatccctccagcataaagatgcagccgagctagcactaaagaaaatgccttctgcagaacaagaagctatatctcaaagtgaatatcaccgaggagttagtgcatggaacttcgatattgatgatttgaaagcacaagcggcattgatgcaggacgatgatgatattgcagagatgagggaagaagatgaaaacaaattcttcagctcttacaagggcacaactgattcccagtttattgtggacaaaaagaattcaaataacttgcaacaagatgagttcacatcacaagtaggtagtaatgacataccaaagagtgagaaaagaaatggatcagttgctgaagcaacaccatctactttagagaatgatgtgggaacaagcaaagttaaaactcaatcagtgaaacttggtaaaacccaaagtggacccctgatgccaggcttagtgcttggccattcttcatctgaaagagggcgtacatttgaaaggtttgagaatgaaaatcagttattgggtgagaaaagtaatcgtgatatacgacgagctccaagctttagtggtccattaatgcttccaaaccgagcttcagcaaatagtttatcagccccaatcaaatcttctggaggattcagagattccttggatgataagtctaaggctaatctagtgcaaattaaaggacgattttcagtgacatcagaaaatttagatctggtgaaggatattcctgtaagttcagtttcacgccgatcttcacagggatcaccaatgaggaaatctgcgagtgttggtgattggatggtggatttcaaacaaatgcagtcttccaatgattctgccaatatcaatattcctgcatcacttctagtgcctcatcttcacaatctttttcagcagacatctattcaacaggatcttataatgaatctgttgaatagcttgcaaactgccgaggcaattgatacttctcagaatggaaagttaccaccattacctcgcaattcagagaacaatggaagtgttgatacagcagtttcagagagggaacaactactgctgggcagaatttcagaactccaatcccggatgattaatttgaccgaggaactgacttatgagaagttaagatacgtgcagttgcaacaacagcttgctctctacagccaggaacaaaatggggaaagagaggaatttgcatgaaagcagataattatgaacctccaggcgagtgatcaatcatacgttgaactccaattctttctcttttctgaggagaactactttttggatgtttatagtcagtccttgataagtgtcatatatatatgttatctgatccagccatgtgttcaataagcttttgtgacgatctatatataaagcccagctagtgcaaatgagcaaaatgatgatcggtcatagttaatctcattatttatttcatttaaagattcagatgtaaataagcttctctgttgtatcatactgcaatgccctatgtttgcagatcaatccgaaattctcgtgataactgataagaaagttgtggggactaccccgggggagaaataacatccctacacattgaattggttttattattattactatatcggatttgaacttgtataggctttttgtattctacatggtaaaatgagtcaacatggt

SEQ ID NO: 18700 - DNA, 266 bp, Glycine max
  Clone ID: PAT_MRT3847_116890C.1
gaggaaagcatctgaatcattgtatttcgaacagaactataggacccaaacgatactacaacacaaattacatagacaacaaaaaccctccaatcatctggagagccttgacccggggcttggacgctaaactactcttgacattatactcagcaaatgggtccatcacaaaaaccaccaccactaccacctggatgggacaaaaccattgtacaattcaaatatgccccgcgtatagcgctaactggcaattgctgacacaccac

SEQ ID NO: 18701 - DNA, 152 bp, Glycine max
  unsure (1)..(152): unsure at all n locations
  Clone ID: PAT_MRT3847_116891C.1
ggctcgagctcacgtgagtcctgcaactggtataataagaccagatcaaattgttgaagtatcactgcatcatgaggaatttcagactctggaagagcttgctgatggccgngnccataattcttggngcgaacactcccgagacaaggaag

SEQ ID NO: 18702 - DNA, 352 bp, Glycine max
  Clone ID: PAT_MRT3847_116892C.1
acgctcgatcaactgaacacagaccagagctcatgctgaagtggttagtgtctgtatcagccatagacacaaggtttacgacctttggcatttatgtccaaagacatggttttggtggctataatgttacaagagacctcggtgcctatgctcttgtatgcactgccatctttcgcatgggcaatggtattccgttaggagtgttatgggcaccatcctcactaagaggacaaccttaccgtgtgactgattatgctatgttgggggggtatcaccacagatcacaaccggcatggtagtcatctgcagtctcgagtcactgcctgagttcattttcacaagcagattcttg

SEQ ID NO: 18703 - DNA, 424 bp, Glycine max
  unsure (1)..(424): unsure at all n locations
  Clone ID: PAT_MRT3847_116893C.1
tggtgggttctttgcaattaacaatatatgagaagtactcttctccaattttgttaacctcaaataacccagcaccagtaccgacatcagactcctgcaattcatctggtctagctgttcataataacaacaccagaagcctttgcaattctattattatcacttttgctcagcctcctcattgcactaactccatgcttgctgagataatgtgttgccaaatcagtcagaccctggtccaaaataaccaagtccggtttaaacttcaatatttgcatgcatagctcctcaatatattcttcttcaatctttaataagagaatccagtcttctgcatgcatatctacatctgtcanaccttggccaatctcaacacctactgttgtagtagcttcaatagctaagtcagcaattaaatccccaa

SEQ ID NO: 18704 - DNA, 501 bp, Glycine max
  Clone ID: PAT_MRT3847_116894C.1
acgagctttactcccttttcaacctccatcataactgcaaacagacccaaaactcaaacataaacaaattagatccaaatttgaaacccacaaaataaaaaacacaactttgtcgccaattaggttatgtttcaaaaaagaaaaggtagagactgttgggaggaggaagaatgattttcagtgtcacacggtagccggcaaaaaacctgcatcgcaagaaataagatccagatctgactaaaacttaaattggatagaacaattagtgatagcggcttatggtcgttcaattcagcaagggaaggttgtcatgtacccaccaagctagacagtcgtgcactagtttccatattgatgtatgaaaaatggaaaccaccatcgatgttgtgcccacacccaccatgaactaccattgaaaatgaagatagagaaatcatcttcatatttggatctagtttcattttgtgcaaatctgatttcaatttttgcatacttgattcg

SEQ ID NO: 18705 - DNA, 125 bp, Glycine max
  Clone ID: PAT_MRT3847_116895C.1
cactcttttgctcgtgcaacacttacatataggaaggccagtcttggcggtcacaggagattgcaccaaggttgcacccgccctacatgaagcctatattatcacatatatgagcgtttaacaaa

SEQ ID NO: 18706 - DNA, 285 bp, Glycine max
  unsure (1)..(285): unsure at all n locations
  Clone ID: PAT_MRT3847_116896C.1
gcaaaaagcaagctcatcctaaagttttaaaaatngcagcagcctcctacaatngntctctcttnaccatccttggctggcacaggcncnnaagctgggacacatcanccccgaagtcggganggtcagcatgaggnagnccgtcaacaagcaggcctcctcnggaagcccatggtaaggcccagaccgngtcaagtacttgggcccattctctggcgaggccccgtcctacctncantggcgagttcccaggtgactacggctnggacaatgctgggtttcngc

SEQ ID NO: 18707 - DNA, 499 bp, Glycine max
  Clone ID: PAT_MRT3847_116897C.1
gaaaataaaagggggggatttcccctttttttttggggaaccccacccttgggggccaaaaaaaaaccattttttccaggccaaaaatttaaaaccctgggaaatttaaaagggggggggggaaaacccccaaaaaataacccgcttcagggagggaacataaaccccaaccaatttttttgggaaacggggggggccaatcaaaacaatcaaggaacaaccttaaaaggggaatttgggaaaacaaaaacaaattaaaggccttaaccattttaaaaaccaaaggggtaaggccaattttcccaaccattttttgggggaaaacccgcaaaaggggggggaccaaaaaaaaaggcttttttttaaaaatttttaggggtcccccaaaaaacctggggaaaacttttaaaaaaggggggggggggccccccgggggcagggctttggaaagctacctggaaaacctttggacccgccctggtggaggggggatttcccc

SEQ ID NO: 18708 - DNA, 480 bp, Glycine max
  Clone ID: PAT_MRT3847_116898C.1
cttgcaccttcaacctttaaaactggctttctttcctacacaaccaacagcgcaaaagtggtatttttaaaccaaaggccacagacaaggaacttcagaggctccggcaatttctgcagcacctgtgacagaagcctgcaagacccataccacttctgctccctctcttgcaagataaattatctcgtcagaacaacggactctctctgcggctacctcttcgagtgcaactacctgccgctactggaatctgggctcgacgatggtctaatgatgactcctgattcggttctcgaaccgtctggttcaggggggtacggaggggtggattgtaggaccaccttggcttgcactgccaccaccgagattgtgaggaagaagaggaccggcggtgccgctttccggcttccgtttccggccggcgtgctcgccggtctcggaaatctcggcgtgtctcatgaacccggaggaaagggaacc

SEQ ID NO: 18709 - DNA, 433 bp, Glycine max
  Clone ID: PAT_MRT3847_116899C.1
tactttgccatgtaattaaacaatgttgtgctgtaaataacatttatgtggtttaatttaaaaaaaaaaaaaaaaaaaaaaaaaaaaaaaaaaaaaaaaaaaaaaaaaaaaaataaaaaaaaaaaaaaaaaaaaaaaaaaaaaaaaaaaaaaaaaataagtattataaaaaagaaaaataaaataaattagtttggttgtgggtttaaaaattttaaaaatgggaaaaagataaaaattatgaaatttaaaaaataaaaaaaaaataaaagtatagccttttgaggaaataaataaaaagcgagaaacaatagccctttccaacattttaaacatcctgaaagacaaaatgggacacgccctgtacaccaacattaagccctgaatctgtggtgtttacacacaatataaccgctaaactttaaaacggccta

SEQ ID NO: 18710 - DNA, 265 bp, Glycine max
  Clone ID: PAT_MRT3847_11689C.1
tttgttttgatggtttgaataccaaacaagccatgagcaagacgtcatacttgaccagcaatttttcggcatcatttatttgggggcaactgagtggagaggcttgacttctgataggttttttagggcttcgcttcaagaggcatttgggtagggaaaatcttgtaaaacccctgctccttttaagctttcacataattaaattaaaacttttaatgagatgcttattcaacacagccatgaaaaattaccgccattttctttt

SEQ ID NO: 18711 - DNA, 2681 bp, Glycine max
  Clone ID: PAT_MRT3847_1168C.1
ttcccacgcgtccgcgggtgtattcctgatgataagtttggtgggttcaaagatgtgggcaccaatgtgtcttgtgttgtttcaaggagggacatggcaacccagatgagcccacaggggatgtgcaggtagatgaacacttaccgtgacaagatggtccaagaaacatagggccttattcactggctgaggctcagaacaagtcaaaagctggaaaaaagaaaaagtaagcactcaattgtcaacttgggatgtttctgaaacgccaaaacctgccccaaaggcaaaaagtgaggaagccaaaatctctgcatgggagaacttgcaaaaggcaaaagcggaggcagcaatacggaaactagagatgaaattggaaaagaggcgagcatcctctatggataagattatgaacaagcgtatattggcttagagaaaagctcaggaaatgagaagttcagttccacacaaccaaactgatcgggttgtaagaacttgtgtgtgtagtgcggtggtggtggcataataataataataatggtgagagaattgagtaggagtacatgttgttggtgtactgtttaggaataatgaggttaggtttttgagtgtaatgatgtgagactgaaaggtcgaatctaaggttgaaaaaagatttgaggttggtccattgttgtggaatttttcgcagcagcatttggcagggcgtgagcgtgagggcgattttgctcacaccgatatctagagtggtccagctccaaacccgaacgaggctgcagtacgcaacaagaagaagcacagtcgtttagggagaaagagagaaaaaaaggctaaaggtacacctacatacactactacacctcatctagtttttttttttttcgttgggaaggaaaagattacaaacacgccacgagggcttttaatttcggaaaaattgacgctgatattcaagaacccgtggagttggattctgccagaaactctttctcttccacgcgtccgggtacccctgaaaagtgaaaggtcttgctcccatttctttaacggcttgttttttattttttaataatcccatcgtaattatcgctttttctcgttgtccactaagaatgtcaagacaggagatcaagatctgaagccttgttgaagaggctgcttctttggatctgaacaatgcctctggctctggatctttgccgcgccttcaaacattgaaaaagacttccatttcttctcgaaggtctggtactgccactttccctagtcctggtacactcaattatcgcgttgcaatgcacaagggatggagctccgagcgagttcccttgcatgcaggtgctacccggaagcacgttttgccgttcaacaatgggaaaacattgccgtcaaagtgggaagatgctgagaggtggattctcagccctgtttcggcagatggcactgggagggcctcgcttaatgcaccccaaaggaggccaaagtccaagagcggtcctcttggaccccctggtgttgcgtatcattctatgtactcgccggccgcgccggtgtttgaagtggggaatggggggagttttatggaaggttctccgtttacaggtgatgggttaataatctgcacgagctctttgcatgcgctgtgctcggcactgggagggcctcgcttaacagagtcagtcatcatcaatgcccctccaagaggataagtttggtgggttcaaagatgtgggcaccaatgtgtcccgtgccacttcaaggagggacatggcgacccagatgagcccacagggtagctcacgctcctctcctaatctgaggccttctttctctgcctccaccccatcaaccttgcctgtcacagaattgcggactgttggttcctctaaagtggatattagggatgtgcaggtagatgaacacgttaccgtgacaagatggtccaagaaacatagggccctattcactggcagaggctcagaaaaagtcgaaagctggaaaaaagaactaagcactcaatcgtcaacttgggacgtttctgaaacgtcaaagcctgcctcaaagacaagaagtgaggaagccaaaatctctgcatgggagaacttgcaaaaggcaaaagcagaagcagcaatacggaaactagaggttacttcctagttcctagtgaatagtgattactttattttgagaattccgaataagtaattttctaaaaatgtttactctgaagaaaaataatcattataatgattatggggattattcttcctttgtaataaatatttagatttaggagttcagcttttggaattcacccttttttcttgagttgctgaaatttttcccctgtcgctcagtttcatttggttatcctcagttagctgtatgtcccttagagtgcttaagaaatgcctcttattttttgtgtgtaaaaaaagcctttttttatttgacaaaacttagatacagtattctaatgctgttctctaatcaaaacatttcatcttgaaaattgcggttgatttaagtcacagagacaagaacaatggtgactgaaatgaaatgtcgattttgattggagtatgatactgagaatatctatgatgctcattttaagttttattcttttttattatgatgcaccaatcatacattatttggaccatattatcatccatttaaat

SEQ ID NO: 18712 - DNA, 348 bp, Glycine max
  unsure (1)..(348): unsure at all n locations
  Clone ID: PAT_MRT3847_116900C.1
aaacataatattataagcttgcttttacttttaaggaaanntttagacagaaaggaaaaggccttccttactttttaggggagggcgttcctctggaggggcctggttaaaaaaacctttgtttaaaagaacggtacctttgggaagctgggtttaacttccccctggtggtgtccctgctcccttagggggcccgagtattttggtaaaaaaaatttcggggggcccttcgggggcgggggggggtgccctaatttgggatggccgggggctttttttggcacaacagggttctttagctggctaaggggggggggccccttaggggccaccgggcccggggggcct

SEQ ID NO: 18713 - DNA, 1532 bp, Glycine max
  Clone ID: PAT_MRT3847_116901C.1
ttgagaggttggaagacttgtgatgtggagtatcaatcttactttgctcttgatgatctctgggaatcgtttaaggagtggagtgcgtatggagcaggagtccctttggtacttgatcaaagacaatctgttgtgcaatattatgttccgtatttgtcggctattcaagtatatggtcaatcagataagaagtcaaatgctaagccaaggtacaccagtgaagatagtgacggtgattactgccgagattcaagcagcgatggaagcagtgacagtgaatatggaaaaaggactgaactttttacagcacaaagaaatagtcactatcatacaggtgatgcttcgtttcaaatgagcacactatctgtacatgataaatgcaatacaatgcaagaaggattttcaagtgatgatagtgaaactgggaatcctcaagatctactattcgagtattttgaacaagatcctccttatagtcgtgaaccattggctgacaagatacaagatcttgcacgccactatcctaccattaagtcattgagaagctgtgatttattaccagtcagttgggtgtctgtggcatggtatcctatatatcgaatacccacaggtccaactttaaaagatttagatgggtgctttcttacataccatacactccatacacccttgacaggaaatggaggtactcaggccccaattttggtttatccaaatgacattgatggcggtgtgccaaagatttccttaccaacttttgcaatggcttcctataagttaaagggatctatttggacacaaaatggagttagtgagagtcaagtagtaaattctctcttgcaggctgcagataactggttaaggctgcttcaggtgaatcaccctgattatcagttcttcgtatcgcatggcacatacaacaggtgaatcaaatgagatgccttaaatttctgtgttcattgctctttgcaaacttggtatggtccttctatccatcaatccatccatagagactgatgatggagttgggatttctaatgtggattcttgttactcattgcataagcagcacaaaagatgagcttgtctcaagtgaagaatgaaatagagattgctaaagtaaaaaaaaaacagaaaaaaaaaagattgctaaagtgaaaattaaaagaaagaaaagaggttttgtatggagaaaaacggtcaataagtggaagaccctaatggaaagggagtaaaagctaaaatacagcaaaaaaggttcacagggaaagaatatatgtgggattaagctagatggtcccagactttttcagctaaaataatggttgagtttttagacttaaatatttacttgtagtcgtgttgtgattttagaaaaaaaaataaaaatggaatgtgtagatttttctgtgtaacaaggtacaatgttggctctaagtcagtgtatctgatgaacaccttgttacttggtgagaggaaattagatgctactgtacaatattctactacttcaaagtaagtgttgtgcctac

SEQ ID NO: 18714 - DNA, 1570 bp, Glycine max
  Clone ID: PAT_MRT3847_116902C.1
cttcttccctttgccttcaacctcgttttcttttcttcgtcttctatcacctattccgattctcttcttccttattttattgatcctctctgcgattaccaattttctcatttcctccgttttctcggcgaccgaacggaggagtagaacgcagttctgaaaacgattggaaaatgctgggaactgcactgcaattcggcggcgttcgcggcgatgatcggttttacattccggtgaagacgcggaagagccagaatcagcgcaaacagagtcacagagccaagaacaatgaacctgaaaacacggatttagcttcgaagagcaaaatcgatgtctctgaggataacaacagcaatagcgatagtaatctcaaccaatctctgaaaccaactctttctccgtccgtagaggctgtcagtaatatcgataggttcttggagtttacaacaccgtcagttcctgctcagtatttctccaagacaacgatgagaggatggaagttttgcgatgtggagtatcagtcttactttacattgagtgatctgtgggagtcttttaaggagtggagtgcgtatggagctggagtgcctttggtgcttgaccaaagtgattctgttgttcagtattatgttccctatttgtcagctattcaactctatgctcactctgctgagaagtcaagtgcaaagccaaggtacaccagtgaagacagtgagggtgattactgccgagattcaagcagtgagggaaacagtgacagtgaatttggaaaaagatcagaactttttatagcacaaagaaatagtcaatatcatacaggtgatgcttcgtttgaaatgagcaggctatctgtacatgataaacacaataacaatacaatgcaagtgggattttctaccgatgatagtgaaacttggaatcctaaagatcttctttttgagtattttgatcatgatcctccttatagccgtgaacctttttctgacaaggtatcctatatatcgaatacccaccggtccaacattaaaagatttagatgcctggtttcttacataccatacactccatacacccttgacaggaaatggaggtactcaggccccaattttggtttatccaaatgacattgatggcggtgtgccaaagatttccttaccgacatttgcaatggcttcctacaagttaaagggatcgatctatttggatacaaaatggagttagtgagagccaactagcaaattctctcttgcaggctgcagataactggttaaggctgcttcaggcgaatcaccctgattatcagttcttcgtatcgcatagcacataccacaggtgaagcaaatgagatgactttgtcgttgcattctcatggctaaatcctaaagttattagccttaaatttctgtgttcattgctctatacaagcttggtatggtccatctatccatcaatccatccatagagactgatggtgttgggatttctaatgtgaattcctgtttcacattgcataagcagctgaaaagatgagctcttctcaagtgaaaaatgaaatagagattgctaaagt

SEQ ID NO: 18715 - DNA, 212 bp, Glycine max
  Clone ID: PAT_MRT3847_116903C.1
ctcgagccgctcgatccgctcgatcggctggagcactcaacctaaactatgcaagttgataaagcacataccaataaaactggcaagcgatggctcccatgctaaaaaagggttctcagatcttcgaccgctctaaggcttcctttatcaggttcttctgtccaaccttgtccaatctccgttctcagataaaggtgttacttacagcgttg

SEQ ID NO: 18716 - DNA, 131 bp, Glycine max
  Clone ID: PAT_MRT3847_116904C.1
gggagcgaagtgaattgacattgcagtgactcggggtgagttgagtcaccagtggtggaagatgtgactcgggtgatggtggcggtgatcgggtccagcattaggggatatgctgacctgtgcgatatcag

SEQ ID NO: 18717 - DNA, 448 bp, Glycine max
  Clone ID: PAT_MRT3847_116905C.1
cccgcgtccgacaagccgttagttcattctgccgcgtctccaccacactcacgaccatggaggccgacgctattgctgtggactcaacggagttaaagttgacggagctattgaaggaggtcaacgtagaccactcacatcagttctctaagctcgtcgacgacaccgtttccgccattaaaacctccattgacaaaatccccaacgatttcaaggtaactgctgatttagcttcgcgctttgttacggacattggtgctgataaggtcgagttcaagtttaagaaaccagcgtctgttaagattggtggaagttactccatacaaagtattgcgaaacctgaagttaatgtggatcttattatcagggtgccaaaggaatgcttccatgagaaggactatttgaattacagatattatgctaagaggggtctctatctcttgttgat

SEQ ID NO: 18718 - DNA, 254 bp, Glycine max
  Clone ID: PAT_MRT3847_116906C.1
ggagcagcagcagctcatcgacgaccacttcctcttcgacaagcccgtgtcgcccctgctgctggcctcgggtatggcccgcgactggcccgacgcccgcggtatctggcacaatgacaataagaccttcatggtgtgggtcaacgaggaggaccacctgcgggtcatctccatgcagaaggggggcaacatgaaggaggtgttcacccgcttctgcaccggcctcacccagattgaaactctcttcaagtcta

SEQ ID NO: 18719 - DNA, 278 bp, Glycine max
  Clone ID: PAT_MRT3847_116907C.1
caaaaactcactgcatcaaaaccttctaattcaagtcgcatgttcttctaccttaaggcagaagtgaagaaccatgagccaacctacactatttagcagtggattcgagcttgcatcttctgtgacaagctctgtcgttcttcacagatcatggaatgttatcacgtcccgttatgccggaatcgttacaaacgtgggacacggagtatcatggaaagtttatagagaaccaggttcggatttgacgattatagcctttgaggtcaagctagattttt

SEQ ID NO: 18720 - DNA, 277 bp, Glycine max
  Clone ID: PAT_MRT3847_116908C.1
cttgagatctttaaaggaacattatttttgaatcctctcaactatctccagcggggggctctaaaaaacatagctacctacagttcctgtttccccaaaatacgaagccaatctctccccccaaagccccaattgtaaacccccatagctaaagacatagttccatgaatccttgccaaagcatgagattccaatccacccttctcatcaataatccaccgactttaggccattgataacctggactaaggctccgaagcctttgagctccaacctt

SEQ ID NO: 18721 - DNA, 911 bp, Glycine max
  unsure (1)..(911): unsure at all n locations
  Clone ID: PAT_MRT3847_116909C.1
aaaactacatgcactcttttcaatgtaatttacatcacaatcgtcgtacccttttgtcatcataggaaggtatatgatgtcattgagtccataacacaaaaaattgtaatttttttaaaactataatatatacaggtaaattgagtcaactgactatttacattttgccttttttcaattaattatgtcaaataaaattgattacataatacataatacagcaaaccataaaacccatcaggactcactgacaccttcctttcatgcgccatccatccctacacacttgtgtttgttttccaacatatatatgcattgaaaaacatgaaacaaaatagtagaaaaagaatcaaagacaacaaataaagaagtgaaagaatcatcaacaccaacaattgcatatactaccacctcccctccactaactcctatctatcaagttaaagtagatagacacaactgtttcttccacactcctctcttttgatgttgcggccactgctgcacatgtggatccccctccattctaatcatgcaagctttgagtgtggtccccttcatgtctaaagtaaacaacacatcacgtgcctgcgcagtttcttagcagaagccaatggcctcaccacgcacaacgaactgactctctctcagggaataatatttttccttcatcaattgactaataaaaattctcaccacccaacaatacgtacgtgacatcattcaatacattaccaaccacgaaacaaaatttaatctccttccatcagtttctcccttctcttatccaaaattctgcaatttctttctatannngtatatataaagaatcacagtgtaatgtaaattagctaataaatatagctacttgatatcatnttatagtgtnatgaattaatcttcaagcgttg

SEQ ID NO: 18722 - DNA, 1143 bp, Glycine max
  Clone ID: PAT_MRT3847_11690C.1
tttttgaaaaatgaaatattaaattatattgaagactgaagtggcactgtggcaggaagatatacatacaatagagtggaagtaaacataaatggctgtacacttgtttccattttcgagataccagaaatacaaatgaaaaaatattaagttctacaaaggaaaaaatatatatataaattgaacaggaaatctacagtatgtgcctcaaagttagcaaattccaacagccaaggaagattcccatgcctattcattctctcgcaatgttgaccggagactgacagacatatctttgtccttttttatataaacaaatgcatctcctcatggaatcttttgcttgccatgaatggcttttggggaatttaatcaggttttaacaaaatcaacgccgtcacgcttccttttgtttgactttgaaaagaagcacatatgatgagcccaaccctttttcttcttaataagtggctgcaatttagcatccttcttctcaacaagatcagccatgtacctgaccacagcctgtgctcccttttcagcaacatgtcttggaggtatttcaagaggattctcttccactttcaggacacgtaaacgagtgagcatcctaaaagagtcaggaaggacacgaatctgattgttgctgatatccaactcctcaagcatttcaaggttcccaatggacctcggcaaggatcgcatgtcagcaaagttgttccctatgttcatcttcacaagcgaggtagcaaaacacaggctctcaggcacgtactcaagctcattaaaactcacattgagctccttcaagttcgacagagactacatcgtcgtaggtcgctttcgaacattgttgtacaagcattgaccaatgacaagactaattaactcaaccacttactcatggaatcttttgcttgccataaatggcttttgggtgctttaatcaggttttaacagaatcaacgccttcacgcttccttttgtttgactttgaaaagaagcacatatgatgagcgcaaccctttttcttcttaataaggagctgcaatttagcatccttcttctcaacaagatcagccatgtacctgaccacagcctgtgctcccttttcagcaacatgtcttggaggtatttcctcgt

SEQ ID NO: 18723 - DNA, 464 bp, Glycine max
  unsure (1)..(464): unsure at all n locations
  Clone ID: PAT_MRT3847_116910C.1
gggnnnnnttttttttttttttttttttttttttttttttttttttttnnaaaaaaaagaattttcccattatttggatggaattcttccccattcaccctttttattttccaagaaaccaattagaaaggttttaaagccgctttttttggatttaaactttttaaatttggtttcttggcttgaaattttttggattggccgtttctttgaccttagaaaaaacaacctttgaaaattggcccccaattaaatagaaccacccttttttgagtcttgaaaatcgtactttaaaggggatcccctcaaacttttattcaaagaacttgtttaacaaattatttgcttaactttgctccaaatggaacggaatttttttccacaatgaatcctagaacatgacttattattggggctgctttttaattccaagcttacttgtaaatgggtggtggaggggaaac

SEQ ID NO: 18724 - DNA, 220 bp, Glycine max
  Clone ID: PAT_MRT3847_116911C.1
cataaacgccggccaaaaccatttatagggttacctattttttcccaaaaaattcaaagagacccttttactccacatttgagggacctttatccagatggggaacgccccctgaaaactctattgccttgaacacctctttcagtccgatgaccccattccaattgacaagaccggcataggcagatactacgccctcaacacattcttattcgagacc

SEQ ID NO: 18725 - DNA, 480 bp, Glycine max
  unsure (1)..(480): unsure at all n locations
  Clone ID: PAT_MRT3847_116912C.1
gcacgagatgcccatggggaagacatggtggattggaccaaaggctaatcatgcatccgtcaaagaaagactagaggctgcgatgggatacttgagagaatacacaaacaacaacattcagatatgggttcccctgaggaggagcgcaggccaggagcttgggactgatgagtcggatacgattgcttttgaaaggaacaggaacgtaaagcttaggttgtttagaagccaagagggatgcgtgggggttcctgtgttggaaagagggagtggcacatgcctgggtgtactagagatagtaatggaggatgaggtagtgagtgagatgatganngtggtgaaggtgtgtgtgcangggcgcaaaaggtgcctttggcactggcatgggctccatgcgtccaacagaagcaagccaagtactgcgggcattcaagggatgagagctatgtgtcgactgtggagagagcgtgctttgtcgga

SEQ ID NO: 18726 - DNA, 580 bp, Glycine max
  Clone ID: PAT_MRT3847_116913C.1
ggctcgaggagaaacccaccctggagaagatccgtatgcggcttggaagcgacctcggttcgcaccacccacccttcagaaaacataaacctaattagcctctgcaaaacgaaacacccgtcaccctctcatctcagagcttccatatagaaaccctaaacctaccgaaccctttcaccgcttgttctctgctctttgtcgttcttgtgtgattcgcaatataagggtttggcatggcgagaagacacagcagcagcagcagcgagtcaagtgaggatgacgtgagaaaacgccgtggtagtgaatctgaggatggggagagggataggtatcgacacggtggtgggagtagtaagaagagttccggtcacttcagtcacagggcgaacggtgatgacagtgattcgggagaagaaagaaatggtgctaagagggatgggaagagtaagagtagggagagaaaggaggagcctgagagctctgaggaggagggtcagattgtgagcaaagagagggttagggaggagaatgaggaagatgggagattgcagtggtgccatgagggccgtggaggagagac

SEQ ID NO: 18727 - DNA, 298 bp, Glycine max
  Clone ID: PAT_MRT3847_116914C.1
ttcccaaccacgagcacctatgtgggctcatatgtgtatacatttgcatgctatggtacacgatacaccagagcccacaatacccggtgagttggtcaatggagcaaagcagacaacaagaacaaacatgcgcgcacatgggctcaatcatggtattccatgtcttgcgcctttgcgcaccatacctcacggcattatacaggaaaccgtgtggaatcagagagcaccagagagaacacccatgcactttgacactagcacacagagctttagatagttctctattgagcgtctcggt

SEQ ID NO: 18728 - DNA, 344 bp, Glycine max
  Clone ID: PAT_MRT3847_116915C.1
ctcgagccgatctagcacgattgatttgaccttttgccggttgttgtgtggaattgatgcaaatggcgatcttcaaaaccgcttctgcactctctagacttcgctctcgcgagggccagcagtctaatcttgcggaattcaattagatggggcctaacttcgagctccggtaacactgatctttattctgagttgaaggaactagatgcagactatcaagaacgcgtccacacgctgatgaaagatcatgggagcgttgcattgcgaaaaaatactgctgatataggactcggcggaaagagaggaacgacaggcttagcatggctagcgctcacctgtagacc

SEQ ID NO: 18729 - DNA, 287 bp, Glycine max
  Clone ID: PAT_MRT3847_116916C.1
cccagatcaaattgataaacctgattgggactatgatggaacccgcaagggcgatcccaatggtagtctacagcatactgatgaggtcaaaactccagatcaaattgagagaatgagggaaacttgtccgattgcaagggaagagttggatgcacctgctcggattattcatcctggcgtgacgactgatgagattgacagagctgctcatgacgcaactattgctgcatgaggatatccatcacctctcaattacctttacttccctaaatctagctgcacgtcag

SEQ ID NO: 18730 - DNA, 581 bp, Glycine max
  unsure (1)..(581): unsure at all n locations
  Clone ID: PAT_MRT3847_116917C.1
gctggtaccgcctggcaggtaccggtnnnccggaattcccggngtcgacccacgcgtccgcggacgcgtgggttttagaacatatattttttctatttaatctcatgtcacatattantcttcccaataattctttttatcctagaatatttaattattttaattattttcaccattttagctcatgagtaagtaaaacatttagtttaaataaaataaaattctaatagttttaatttatacttcaaacatcacactcaaattaaaaatatcatacaaaaaagtaaaaaaaataattaaaaatagcaaaaatactgtgaaaacctttgcagttcaagttgggaaaaaatacaaaaaaaaaaaaaaactgtcgaagtttaatacagaaatgtatattgaaataaattttaaaaaaagaaattaaacttttattcaaccaaaagtaattagtttagctgaaaattaaaaaggaaaagatactgtgaccgtacaaaagcctaagaaagttagtgcgcggcccggagttcctctgaaaacgccggtatacttttccggatgcatggcggatactggaaaaaggg

SEQ ID NO: 18731 - DNA, 1049 bp, Glycine max
  Clone ID: PAT_MRT3847_116918C.1
tacggctgcgagaagacgacagaaggggacatgggtaagtatgcatatggttcaactgatttctgataccatctattttttgcagggatcgcacccacaaagacacccagtggacctgaagaagtccagcagggccctggggtttccagctctggttacgggcctctgtcggccctacagggcgcccgtttcccctagcaagttcatgtcatcgtggcataggtaagtgtgcatatcgctcgactgatttctgatttcatctattgtttgcaaggatcgcgcctgcaagacacccagtggacccgaagaggtccaacagggtcttggagttgtcaagctctaattacaattctctgtcagttctacggagtgtctgtcacctccagcaagggcatcaggccccccctactaatcgagctttcatcaagaagtactgcgtccccaggcaggtggcaggcgcagggtgaaacaccacagcagcattgggatggccggtagcgggcaatagacacaccgccaccacctctagagttaacctcagctcatccgcaaaaaaaagtttgagtgttgcctacgacacatggccgaccagcaggctaccaagtccaaagccaaaggtaagcaaagtactaggtcagtgactgacaagtcataacgcgtccagctaaagacgttaaagaagcgctactaggaggcaacctagtaccttttgaatctatgcttgttatttgatcacttttcatagtaggacacacctagttgctcatgatcctaggaatttaaataaaacaagcgcaagctcggaaggtagtcataccttacaaaacatatatatgtatgtttaggtagtgaaaataccttagatatgcatgtatgtaaacaaaaaaacacttcacaaaatatatatatgtatgtttaggtagaaaaataccttagatatgcatgtatgtagaaaacaaaaaaatacttcacaaaatatatatatgtatgtttaggtagagagataccttagatgtgcgtgtatgtagcaaaaaaatacctcacaaaaa

SEQ ID NO: 18732 - DNA, 808 bp, Glycine max
  unsure (1)..(808): unsure at all n locations
  Clone ID: PAT_MRT3847_116919C.1
accgtgttgaacctcaggtccggagtagagtgaaacaagatctatttcaagcaaagaaggaagctcctcttgttgtagctaaattcttactcggattcgttctcacaatccagtttgtaccatcaaaatccgattttcaagtgcttatctataccaagataacatcgaaatggagtgtgcaataaaacaagatgttactgaactaattggaaacactccaatggtgtatctgaacaaagttgtggaaggttgtgtggcccgcattgctgccaagttggaatcaatggaaccctgctcaagtgtcaaagacaggttagcattaagtatgatcaaggatgctgaggacaagggactgattacaccaggaaagactgtgcttgttgagactactagtggaaacactggcattggattggcattcattgcagcacttaaaggttataggctaatcctagcaatgccggcttcaatgagtctcgagcggagagttgtgctccgtgctttgggagctgagctgcatctcactgatcctgctaagggcttcaaaggtagtcttcaaaaggctgaggagctgctgagggagacacctgatgctttcatgcctcatcaatttgaaaatcctgcaaacccaaagattcactatgaaaccactggccctgagatatggacagattctggaggtaaagttgatgcccttgtagcaggtataggaactggtggtacaataacaggtgcagggaaattcctcaaggagagagacccaaaatcaaggtttatggagtggaacagnntgaagtgcagtcttgag

SEQ ID NO: 18733 - DNA, 492 bp, Glycine max
  Clone ID: PAT_MRT3847_11691C.1
aaaacaaaacccaggggtagaaattatttcccgggaataaaaaaaaaatcggggttcatcccagtttgaaaacaacgaaaaaccccccggcatttttgtttaaaagtaaccggcccaaaagaaagggaccccccaaaaaaagggtttaaaaaaaaaaaccagggccctaaatgtaattgggcaaaaaaccctttttatttttcccttccataaacaaatttatccttaggcctttaaaaaaagctttcagggggttccttaatccacccaggcggggggttttaaagggtctccaaaaaaattagccatttcttattttgggaccttggttaaggcaaaaacaaaagtttttctttaaaaaaaaaaaaaaaaatgggtgtttaaaaaaaacctttgggaaaaaacaaatttggggggggtttccccctaacctcatggtttccaaaaaaatccttttggtttcctgaaactccggtttttttaacagtttcc

SEQ ID NO: 18734 - DNA, 1835 bp, Glycine max
  unsure (1)..(1835): unsure at all n locations
  Clone ID: PAT_MRT3847_116920C.1
tgaacttacattatttaatagtcgtcatccactttaaatattatcctcctccttgtgcatccaattcatccagatttcaaccacaacaactactatgggtatggcagatgcaaagcaaagatatgctgttgtcacaggtgcaaacaaagggataggattggagacagtgaaaggtttagcctctaatggaatcaaggtggtgctcacggccagggatgtgaagaggggttaccaagctgttgaggaattgaagagagaatttggtttctctgaccttgttgtgtttcaccagcttgatgtcactgacccttctagtgttgcttctttagttgagtttgtgaagatccactttgggagacttgatatcttggtgaacaatgcaggaataagtggattcaatacagatggcatggtgccatccaaaattaattggaaggagttacctcaaacttatgagatggctgaaaaatgcttaacaacaaattactatggtgctaaggaaacaactgaggcatttattccccttcttcagttatccaatttacccatgattgttaatgtttcctctgaagcaggattattaaagtacatatcaaatgaatgggctatgagtgtgttagatgacactgaaaatctcactgaagagctaatagatgaggtgttaaaggagtatatgaaagacttagatgatggtttactagagaaaaaagggtggccaacctatttgtctgcatatatggtctcaaaagcagccataaattcatacacaaggcttctggcttataggcaccaaaaattgtgcatcaattgtgtatgtcctggttctgttaaaacagacattaacagaaacactggcatcttatctgttgaaaatggtgctgctagtgttgtgagattagcactcttgcctaatggttccccttctggccacttctttactcggcaagaagtgtccagcttttgaacgatttttaggctctggttggatgaagtttttcataagtacttataagataagaaaataagaaaggaaaaaaaattaaattagcttcttttataagctaaagttaacttacataagttaatctgtaaaaaatttcttgtatcaacttctctaaatgttgattttaacttgtgtataactcaattttggcttataaaagaaacgtatttcatttttctttctcatttttttcttgtatgagttttataaagaagtttatccaaccagaattaaacctgtgtcttacaatcttgcaaatcacatgaggaaaaatgataggaggtgtggtgtgtcttggatgaaattgttacccttctagtcttttttgtcacattatggcatgtggggaaatgcatctaagttacttggctattttaacttctcacattgttggcgcttcaaatggtcaaattccaaattgcaatggttttttggaccatcatatataccacggcatgaacctttcggctgtgaagaaattgtcaacattaggtcattacaatgttgggccttgtcaatttgtcatcttattcatgaagagttctatttgacttcaaactttaaacacacgtgcaatggtaaagcactgttgatagtgaaacagcaatgatgggtgtcaagaattcctgatacgacaaaagaaaacacaacaattgtagcaggacataccattatttatgtaggctttaccaaatttactatttgtgtcactctcttgtaacataattaatattattgttatgataatataacttattaatgtgaaaggatccttacattgcaataaaagcaacccttttctttncaagtgcaaccccacaacataaatgtc

SEQ ID NO: 18735 - DNA, 667 bp, Glycine max
  unsure (1)..(667): unsure at all n locations
  Clone ID: PAT_MRT3847_116921C.1
cacgcgtccgcttgtgcagcgagaacgtgatcctcctgaaggccctattccccatcttgtggcccgtctatgtgtacttttatgcattgtccccttggcaattgcaaatgttctaagggatgactctgaacataattcgtcatctgttcaggtgtctatggaatcagaatacaggcatgaaatgaaaagtggtagttctatgaaacttggactgatttcatctgttcaggtccttggacacttttctggcctcctatgccctcctacattagttattgatgcagccaaccaggcagctagaaaagcagcaagcttcatttataatactatgaatggaaagggtgaatctggcactggaattcatgctaataccaatacaaaagcaggcgggaacttgaggcatctcatagtggaagcttgcatagctaggaatttaatggatacatcagtgtacttctggcctggttatgtctctacatctgttttgtctttgtcagattcgtcaccactagaaaaatctccatggtcaatatttatggaaggaacgccattaaacaatacccttataaattctcttacagtgacccctgcctcagcctggtggaatagaaagaantatactatattgcattaaatggatcaaaatgtggaaggccagcagctgcaa

SEQ ID NO: 18736 - DNA, 794 bp, Glycine max
  Clone ID: PAT_MRT3847_116922C.1
cggaattccccctccgtcccatgcgcccgataaccctctcctctctccactacccataaaacccgtgtcgctttcctcctcaccattacttctcatgtggccaccgtggcttaactcacccagccggttccgcaacagctccaccgccgtcaccatccccgtcgcattctcgaactcgctccttcagcttctcctgttcctccttcaaagacatccagagcctcctccaagaaaaacccgaaccggccgctccgaaatctccgtctctcttccgccgcgtccggatctccaccgccgtgctccgcgcctggggcgcctcacgcgccgccgcccccgccgcactcccgcccggcctcgaccagggtgtcgtcgtctacttcacctccctccgcgtcgtccgccgcaccttcgacgactgccgcgccgtccgatccatcctccgcggcctccgcgttgccgtcgacgagcgcgacgtctccatcgacgaccgcttccgcgacgagctccacgccgtcctcggctgccgcggcaacctcgccctgccgcgtgtcttcgtcggcggcgtctacgtcggcggcgccgacgacgtccgccagctccacgagagcggcgagctccaccgcctcatcgaacgcctcccgcgctccaacctgaacgcctgcgactcctgcggaggcttccgattcgttgtgtgcgatgagtgcaatggaagccacaaagtgttcgctgagaaaaacggattcctatgctgttcttcttgcaatgccaacggcttgattcggtgccccgcatgc

SEQ ID NO: 18737 - DNA, 347 bp, Glycine max
  Clone ID: PAT_MRT3847_116923C.1
aaaagagagagaagaagaggaagaagaaaggggggaaagaggatgagggcagtgaccctttaaagagaaaatgcaaaagaaaaggccctccaggtggagttctctttgatcctggttatccattggcaatgaaagagagtaagaaaatccaacaagtgaaaaacccagaggaagaagaagaatggagaggccagaaaaaccaaaactttagtggaatggaagcagaacagagggagggttggtttccacatgcgctgcacgtgcctctgcccgtgacgacctttccaccgctgcggatagtggaagggtcacatggctgtgacggtggggagaatgacggccaatga

SEQ ID NO: 18738 - DNA, 356 bp, Glycine max
  unsure (1)..(356): unsure at all n locations
  Clone ID: PAT_MRT3847_116924C.1
tcgagcttcttattnnaaaatgataggaatgttgtaataagaaagctcgagcacgaattgcggagcggtacgtatcgcgtagcagtgcgacagtcattagcttcttctataagtgtcacactaaaattctaattctactgtgccgtacgttttacataacacatacatttattttatttaatggaaaataattttcttatgagataacttactagagaattatgatttcctcgcgtttctttttttttaatcattgattaacccttctttcttctttctggttaagctagtcacctaaacaataacacacattaatacctaattcatggataatttttaattttataacatatgtt

SEQ ID NO: 18739 - DNA, 256 bp, Glycine max
  unsure (1)..(256): unsure at all n locations
  Clone ID: PAT_MRT3847_116925C.1
ggcgagcttggcacagcgagcggcaccaacccatgagaggttccatcattcggcaaattttcagggtcgtcgcggaggctcactccgcggctactaagagcaacaaggagtggcaagagaagctccccatagttgtcctcagagccgaggaaatcatctactccaaagccaattccgaggcagagtacctcanccccgaaacgctcttggaccgactcaatgatgccatcaacaccatcatacgcagngacgaaac

SEQ ID NO: 18740 - DNA, 463 bp, Glycine max
  Clone ID: PAT_MRT3847_116926C.1
ggctcgaggctaacttgattatttatgaaaatatttcaatatgttttttaggttaataaattctatgatcttgctactagcttttatgagtatggctgggggcaatctttccattttgcacctagatggaaaggggaatctgttcgagaaggcattaaaagacacgagcacttcattgctttacaactttgcctaaagcctggacaaaaggtttttatgctcgacggagcaaattgatatttgtcatgctatatgttacttataattcatgagttttacctatttgtttttaggttttggatgttggatgtggaatcgggggaccacttagagaaaatcccgattcaggtgaatggaccaataatattcggttttgtggtatctttttccttaaccctacctacttttatgtactaggtcataagatagttcataagtcatgttatttctgagatgttctttt

SEQ ID NO: 18741 - DNA, 139 bp, Glycine max
  Clone ID: PAT_MRT3847_116927C.1
ctagagccgaatgctctccagattctgtgtggcgattatgctagatctgatggtttgattaccacccatgttatgagcattatggccaagaggacaaacagtctgtgtggtgccgatgaagaattgatgcttgaaaaga

SEQ ID NO: 18742 - DNA, 288 bp, Glycine max
  Clone ID: PAT_MRT3847_116928C.1
ctcgagcccgcagatgcctaatgttccgttggtggctcctgaggacaaggcgagtccattgtcacaccttcattatgccccgtgtaataataccgaaagtgcaagaagcttatcttgtgaatctcccagatgtgatacgagcattgcctctgcacagtacagacgaagctcgacatttgagaaagactgctatgtatcgtatcgtacgtatgctaaaagctcccgtgactaccataacacagattgataatccccacacgacgcattcgacgattaatgcgcttgatt

SEQ ID NO: 18743 - DNA, 1522 bp, Glycine max
  Clone ID: PAT_MRT3847_116929C.1
gtcttttatcacattgaattcatccttctgtgttctgtttctttccttttcttcttgggcgaaaccctaatctccccccttcacccttcgtacaccgcgtcgcatctacttccatcttctctcagatccaatctccgattcttgcttcactatcacaagcaaacatgtctgcggctttggatatgaccctcgaagatataattaagaacaacaagaaatcttccctcgccaacaccaggggccgaggccgagcctcgggacccggacccgctcgccgcctccccaaccgtgccgccaatcgcgccgcaccgtatgccgctgccaaggcgccggagacagcttggaaacacgatatgtacgcgaaccagccagtggccgcggcgtatccaggtggtcgagcgtcttccatcgaaacagggactaagctctacatttccaatttggattatggcgtttccaatgatgatattaaggagttgtttcttgaagttggcgacgtgaaacggcatactgttcattatgacaggagtgggagatccaagggtacggcagaagtagtcttctcgcgccgagctgatgctgtagctgcagtgaagaggtacaacaatgttcagctggatgggaaaccctgttttgaattctgtttgcttttcacctattctttgatgcgcaattctcggaattgtcgtcggttgaagttaaagtgctagtctttcttagcatccacattttcactgagtggtaattagggaagaggacgttgagttgaagtgcttattttgatgctaatctgactagggggacgtggagacagaggtcgtgatgaaaaggtatctgctgaagatcttgatgctgatttggagaagtatcatgctgaggctatgcaattaaactgaaggaaacaacgatgttctgttttattgctattacatttgcggttgttagggccatgttgatggaacaccgccgaattatgtatctttatcacagtcgtgcttttcggaaaggaaaaggataacttagagtgaaaacttttacagttgatatatgtagtttgggattctgttatgaaatatttgttttcgttgggtatgactatgaaatgtggttgaagatccctggattgtgaagctggtaacccgctctggccgaagatagaagttagaacttagaattcgtggagtagtggttatatcatagaattaaagattagatttacaaagctttactgttagcttctcttgtagcattttggttgcttttttgcaatctttgtcaaattcgcaaagcgttttgtttaggatttgctgaaactattaaagtggaatcttcaaataggtgtcctattcaaccaaagaagtctacagatgaagagcctccaaaataaataaaatcatttgagctagtatttatgttatgctcactctggttgcattcagattaagttgcccctgttttgaattctgtttgcttttcacctattctttgatctgcaattctcggaattgtcgtcggttgaagt

SEQ ID NO: 18744 - DNA, 744 bp, Glycine max
  Clone ID: PAT_MRT3847_11692C.1
cgtgttccttggttaactgtttacgttatgctcctcaacaaggttcagctttagcctttaacgatgccttgaacaatgcattccctaaatatgattccaaaacacatttctggcaatcattcactgtcaaacttttatctggtggtttggctggagctattgcaaacactatctgttatccatttgattttgcccgtacacgtttggcatccgatttaaagggaggtcaaggacgtttcaaggggattggagattgtattatgacaactgttaaacaacaaggtatcactggtttatacactggttggtccgtcacagttgctggtgccttcatctatcgtgctggtcaacttggttgcttcaaacaaatccaagatttgaacccctaccaaaacgataaaggaccaattggtgctgttgcatccttcgttgctgctacagctgctcgtactgttattatgcccttcaactatccatttgatacagtacgtcgtcgtatgatgttggaatctgaaaaaccattagctgaacgtcaatatcgtggttcattcgattgcgcacgtaaagtattatcaaaggaaggtcttaagggtatgtacaaaggtatgattcctgaactcttccgtggaggtggggggttccttgtcattgtcccttatgaccgtgtaaacattaatctccaacctctaaacttgccgttactcttcccccccctcctccctttccttcttatctctttctctt

SEQ ID NO: 18745 - DNA, 429 bp, Glycine max
  Clone ID: PAT_MRT3847_116930C.1
gcaaagagcatgaggattatatagattgatattatactgcacaacaagacttattctgttcatgactgaggaaatccattacatcactgaggttgctcaatcgcctaacgcgggattggaatccacacattgagagaacaacctttgcacgtgtgaccacaagagggccacctattcataactggttgacaagagagccaccctctatacttgcttctgtcttccatccaggagaaagaagcggttaggtatggttcacagagggtgcggtgaataagcaagccccacgcctgggaccctgttgtaggctgcccttgtgacctaaaaaaatagatatcctgcatttattgtgtttctcccaaccttacacaaaagctccacggtttgcatctccatataacaaggtgctgatttccccgaatagggggt

SEQ ID NO: 18746 - DNA, 369 bp, Glycine max
  Clone ID: PAT_MRT3847_116931C.1
ggtaaccactgatctgattgttggcaacataggcaaatgccttcctataatggggatttcttgctaaatgaaaaggcagccctgaagagtaaaacatcttagcaatttcatgatcaagtgtctctctagcttgcaaattaaagacattttctacagatgatgtctttctcttttttggatcaacaccaagagtgtttgtatccatttggtgttgagtagaaaccagaggtaatgacacaaattttgtttttgacctctccaccctcaatgtagcctcattgtctatcttcttcaaatctataagtttggcaactattaccttttgacaaactctaactccctttcctgtcatcttcaacaagtgtgccc

SEQ ID NO: 18747 - DNA, 282 bp, Glycine max
  Clone ID: PAT_MRT3847_116932C.1
gacacaactaactaacaaagtcttcgataggccgccgaaaatgaagagcaggatcttctttgcgctctttctgttttgtgccttcaccacctcatacgtaccttcggccatccctgatgttgtgctcgataatgaaggtaacgctcttgaaaatggtggcacatatgacatcttgtcagacataacagcagttggtggaataagatcagccccggcgggaactgacatatgccctcttaatgtcgtggaatctcgcaatgatctcggacaaatggattggaa

SEQ ID NO: 18748 - DNA, 263 bp, Glycine max
  Clone ID: PAT_MRT3847_116933C.1
tcgcgatctagaactagccaggactagtccagcatagtttgggggggtctatgaacaagacatggattttcttattttttgggcgcccagcgcttatctggacgaagaaaattatttctccaccacaagaaattggggcacaacaaaattttttctgattggggactgcaaataagaaacccgtttctctaacaaggggtttaaaaagcccattgagcccttaatttactggcagactgttttgcaaaatttaaggccttaca

SEQ ID NO: 18749 - DNA, 333 bp, Glycine max
  Clone ID: PAT_MRT3847_116934C.1
gttaaacccaaaaatgtcaagctttaattccctgcccacgagatgacggggcccactagttgtaataaaaaagggcaattgtaatctccgcccaacaggatggggggcttctgcgttttctaaatggaaaaagattactccccattaacttggccgaaaaacgagccgcataatgcggggcctatttttggtctaggggagatggtgccccccaggacttttctgggacaagggcggattgggaattctctttcccgtagtgatgctttaggggaccactctcaaacaaaaatcacctctatccttagagagggcccttttaagcaccctttt

SEQ ID NO: 18750 - DNA, 508 bp, Glycine max
  Clone ID: PAT_MRT3847_116935C.1
cgtgggcggacgcgtgggagactctacaatactttgttgtcaaaacctacctcaagtttttgaacaacctctatttcaccaaatgacataaaaatcactagaccaagagttaaaatatacgccttaattatcctcattgatggtttcttcatggaacaattattcaagtcaacaacgaattcctttcacacacaaaagaatgttgaattctcatcttcaaggttttagtaaagcctaagaaaagcttttatattgctattgtgaagagaattcgaagaactcataaaatttgtttaacatgtccaacaacaataaggtgaagggcctccttataggcctaagattcatttctcagatattcggtacgtggcattcacttattggtataatttctaacgagttatgttatctatttctattctcaaatataaaagttgagaaagaatatggttgattaattaaccccttaaaaaaccgttgattgattaaaggaattaataccactcat

SEQ ID NO: 18751 - DNA, 357 bp, Glycine max
  Clone ID: PAT_MRT3847_116936C.1
attttgatgcttatgtagaaggtgaagattccatgtcagaatatgataccctacccgaagtgtggggtggccgtggtacattcggtcaccatgacgcccgtttactgagggaagccttaccccaagaatagggatgattattggaatgatatgaataaccaactgtggtgacacgtgaagcttggggtcagaacggcataaacccggaaaaggacgattttgtgtcgtgatgtcaactttaacatgcataaagatctttgcggagataagcttttacggatcgttactccgctgtatatcaggtgaatacgtttcatgcatattcatactggtcctgttatgcaagcacagtgtgca

SEQ ID NO: 18752 - DNA, 284 bp, Glycine max
  Clone ID: PAT_MRT3847_116937C.1
cccacacgtccgttctcttcctctttcttttacatacaatccaacagcctattcgggctgggctgatactacagaagcttctgcccaaaacatagtactacttctttatgtaatggatcttaacttagctacacatactaattccacatggggtcgcggaattttgactgaagcatataatctacctactttgcagtatttaaatgttcaagtaactatcaacactctttattttttctaccaactaaatctgttttattgcacgattacctagatctgcacta

SEQ ID NO: 18753 - DNA, 352 bp, Glycine max
  Clone ID: PAT_MRT3847_116938C.1
actgaaccaacattaaggagaccacatgcttatgctgaataaacattactgacctagttagaacgctcataatcgaatggccgggaccgaacatggaccaaaatctggcctgaacctggacccaactaaaacagggatactgcggggggattaaccaattcttctgcaggaggttttccaacacgaattaggacaagggcctggggaattttgggacaaccggcccttcaaggttttaaaaattggttcaaaataaagaccagcgcccttataaaatgggctgcgtaaattaaaaaggcgggaccaagataacccataataccagggttacccccccccaaattatttatat

SEQ ID NO: 18754 - DNA, 412 bp, Glycine max
  Clone ID: PAT_MRT3847_116939C.1
attcccggctcgacccacgcgtccggggacgcgtgggaaagcctaaatgcaggtgccttcttcattttattctttctattttgtttaattcagatattttattatttattttcaaatctcttagtaattatatcatttaattattaatatacgatagtgtgatgaaaaacttatataaaaagatatttctctttctcttagaaaaaaatacaagcttggaaaacaaaataagcatgaataatcaaaagatctgttggaagaaaaaaataaaatggaagataactggagtgacaagaaaataaatgactatatgacctatggggggggcaccactaaagggtaacttagttaggacctgcttgttactactaaacattttttttttcgagtaactgaatgcagcttactgggc

SEQ ID NO: 18755 - DNA, 385 bp, Glycine max
  Clone ID: PAT_MRT3847_11693C.1
attgtccttccaaacgtatttccaaacacaaagtaagcagcctgttacattgtttctcctatgtacagattcaccctctactgaaattagtaatatttagccctaaactcactccaatatgctccttccctacaatcaccttagcataacggataaaattctgaacatgaccacgaatgtatgatagccggcttctccttcttccaagagagtagagtactactgggtattttccaaatatacgatatttcatggcataaaaagtatatattctgattacatcattttcaaacttctccggaagagggatttttccaccaagcaagttgataaccagaagatgaaactttcatctgctgcttttcaagctagctctgatcttgca

SEQ ID NO: 18756 - DNA, 775 bp, Glycine max
  Clone ID: PAT_MRT3847_116940C.1
gaattcgagctttttacccggggatcctctagagtcgacctgcagtataaagattatatgtgcatacataatttgtcttttgtatataaatgtttttttgtttgtttgtttgcactttgcaggcatataaatgtcattaatacattatatattgttataaaatatatttatgaaagaaaaaataagattcgtgtaatttaatttaataaaatataaaatactatagatttggcagcagacctaatctacaaaatctgacctgttagattgaagcgggtcggtttggtcgggtcaaacccgttaaattattttaataaaaaattaagaaaaacataaggtttggttgagcatgagaaaattcacaatcttgtctctttagaacccttcccgtgttcctgtctctggttcgaggcgtctcgtttacggtcccttgtctctgtctccgttcattctggttagacactttactttttttctcattcattaacgctttatgtatttttgtatgtattctgttctttctatctatctcctgtgatttcagtttcaaaaattctcataccattttgctctgttttgttgcttaattatttagttcccaaaccgcactgccaagtgctctttattgggtttgtgtttgtcatcttgctactctctctgtatcttagtgtgtttctcatttcatcttgtctatgcactccacctgtttgattgtatatccactagggttagcttactggtggagggtttgggtagtttgcatgagatcataggt

SEQ ID NO: 18757 - DNA, 275 bp, Glycine max
  Clone ID: PAT_MRT3847_116941C.1
gaatgactcctggcagtggcgctaggcaagcgccccttagccaggctgtcgggcttgcgtccaagcgcactaacacctagtactgcacggggctcaatcagagctggtcttctaggccagaacgtgacctctccgcaaggtacctggcccctgactcctatatccaggactcgagaccgtctgacacctggcaatgcatgactgaccgatgagtagactcagcatacgcatgcgtgcggctgctgtcctatcagacttcgcttgtgtcagatggg

SEQ ID NO: 18758 - DNA, 432 bp, Glycine max
  unsure (1)..(432): unsure at all n locations
  Clone ID: PAT_MRT3847_116942C.1
gcaggattcttgcatgccatgtatactgcaatcttcacttcccttccagggtataaatattgctcgtgaatgatatttttgccgcctaatttcccctttttcatttatagaaaacactagaaattgaaaataaaactgatgattaagtagaacaaaataaaaaccataagttacatccaataattcagaaaataaaatcattaaattgattcagatttaaaaaattatttttattaaaaactcacaaattaaaacaccatgtttaattttacccaaaattgaaaattttcaaatgttcgtcctctttaaaaccttcacttcatatctaaattatcatccacatttttcacttagataccctnttaaacttactctnttaataacntagttaaaagtttgttaaatgtcaagtgtatgaaaattaaactcatt

SEQ ID NO: 18759 - DNA, 326 bp, Glycine max
  Clone ID: PAT_MRT3847_116943C.1
ggttcgagattaactggactacacactatggagaactgagtcactggtttttctaccaccctgaaaaaatataatgtttgagcccccaaatatacaccatgaaaggcgcctgaactggaaatacattgactgtttgatgataaaaaggcctcatgccttgactcactttagatcaagcgtgacaaactagggttttttcttattatgaggacataaaaagttgcctttctttttgctatataataactaggaaaaaaaaaaaaatagaaggcattcctatttgcaactatatctctttctctggtgagaggtgagggctataacac

SEQ ID NO: 18760 - DNA, 269 bp, Glycine max
  Clone ID: PAT_MRT3847_116944C.1
aaatttgttatgtatagtgtgttttaatctcaacatgacagcattgcacctagatgaatttgctgaaaatatgtatatggcagtccgtaatactaaggacatttgaatttttcatgccctttgtggcgtatctctcactgatgtcaattggtgcctgatggagccgtggactctcatcatccatttgagttgcattcgggtgtttctgtggaacacatcattcacagtgtgctcggaacaactttgaagtagttggttctagatcgcga

SEQ ID NO: 18761 - DNA, 382 bp, Glycine max
  Clone ID: PAT_MRT3847_116945C.1
gctatgggacatatgctgatcacaggctatattcatgaagttacttttgaccaacctgaaaactgataggattttgtttgtcatttggtaatttctactgcattcttaccatccttctctcacaaattttgatagcttgaagatctttttaattataattttgttgtatttgtttcctaggagcaagtgttcctgctgccagttctttcctctttaggcgtggttgagaaaaagcagaaactttacataaagctgtatttcttaatcatctttaatttgaaacttaagaaaatgaatttattctgctatatttatgtaacttatttcctggaagttatatctactagttttgtttgataataataaaattagctataccttg

SEQ ID NO: 18762 - DNA, 247 bp, Glycine max
  Clone ID: PAT_MRT3847_116946C.1
ctctctcattctctctctgattcgagcgacatgcatcgttgaattcatcccatcgcggagcgtgcaaatttgtaggggagcaactattgtgctatcgctatatgctgatatcattctcttttgtgcttttattccgaaaggacagttaccaggtacttccaccgtgcccgcatacctttggacatcacacaatgaacaggcctctgataatggatatgaaggaatctgtaaattaccaagtcatttc

SEQ ID NO: 18763 - DNA, 383 bp, Glycine max
  Clone ID: PAT_MRT3847_116947C.1
cacacgcgttcacacctctgctcacgctgcttgtgttgcagctcagcttctagcacatctagggctaaaggtaaaggagaagggtcacgtaaaggttcacatcattgtccatgtcaacgtccatgtatactctaccacatgcaatatcactgaccagctgatatacatgctcgaacgcattgacaagcgtgttattgagaggtctgataaggtagccgctaagactaacaagaatgccttcaagcatgcctgactgctggacaaacttaaagctggactcgccataggtatcaccattgataatgctgtaacgacgtatgattcttccacatattattgcgcacctatacatacgccttgacataaggatatcattactaata

SEQ ID NO: 18764 - DNA, 143 bp, Glycine max
  Clone ID: PAT_MRT3847_116948C.1
ggctcaaaatgcacttagacgggacttgacgaagcgttgaaggatagggcccgaggtcctctaaccctcctatggtgacccctcttctatttcgtctctcaggagccgcgctgctgtctcaccataccttacttaactggtgg

SEQ ID NO: 18765 - DNA, 396 bp, Glycine max
  Clone ID: PAT_MRT3847_116949C.1
caaattccacattttttaaaaaaccctaggtgggcccttaattggccctggtaaaaaattaaacccgtttttcaaaggggggaaaacatttgaagttttaatcctttgggtttcaaaaattgcatgcgtgaaagttaaaaaaggggagaccttacaggggggtaccagggtttacttttgggttccccccagcaattcaagggggaaaaacaaatgggtattgggagcccctcaatttccttttttaggggtattttgtttgggcattaggggaaaaaaaattttgaaccgggccccttttttgtttttttaccggggttcccttaaaaaggggaaactggtcataaaaagggaaaacatttcttgtcccaataaaaaatgtctcttcagccaaaa

SEQ ID NO: 18766 - DNA, 376 bp, Glycine max
  Clone ID: PAT_MRT3847_11694C.1
ccacgcgtccggcaagcttttcgtttcttcttaccattcccattttctctctcacacatgttgttttcctgagaaagcagagaaaaagaaagaaagaaaagaaaatgtttcgtttacctcctcctccgtcactccccgacggcggtgttcctgctattcccgcttttgttatcattgctattttcgttttcatttttctcttcgtaaaaattacagatagttctacaaactattgcatttactcttaggcgagatcttcatccttttaggttttttagtagcttcttcttgacgcgtttaacatcattcttgcaaggtttagtccaagacttggtgcttcaaaaactctaactagggtattgcagagattctaacg

SEQ ID NO: 18767 - DNA, 333 bp, Glycine max
  Clone ID: PAT_MRT3847_116950C.1
gaaaaacgtccgacaacggagaaaagaaattactcgctgtggcgcggctcatagacaaaacgctgggccacaacatcaccatgtctgacgacatattccatatactatcgcactttgatggaagattcttgagagagaatctttctgagaacggcgcagatgtggatcccagaggctgcgccgaactggatcattacgttgaatccctagaccgccggatctgttcctacgtgtgctacgaccggacaatatgggtcgacgacgacgatgatgatgacttcctcgacgccgaggacgagctggccggcgatgttgccgagtggaaccaactct

SEQ ID NO: 18768 - DNA, 300 bp, Glycine max
  Clone ID: PAT_MRT3847_116951C.1
gcctgccgtcctttttttattattgtattcttctatatgccaagctacaaagagagtatgtggtcgctacaatacttatgtatagaatctctgaatatcttaattctcgtcatcctagcttagccaatctccaccaacagagactatacccgatggtgattcaaagaatatctgggtatgcctcatcacgactacttacagcacacaaattgtggaattggaaggacttagtctcaacgccctttgatagatctccccgtaccaacgtgcaacggcgtggttatggaataaataggaacc

SEQ ID NO: 18769 - DNA, 372 bp, Glycine max
  Clone ID: PAT_MRT3847_116952C.1
caaatatgaggaaaagtcctgataccatggttttgttgcatacaaatagatgaactctgcatccgtaagaatgccgcaaggccaaaataaagtgaaacattggttcaaaaaagaatgaactgaataaaaaaaaacaaatagaacaaacagtgcgcaaccgcaagaggacataagaaagcaaaaccaagctcgcttatacccgccacaacaagtctaactgtgagaacaaatcctaagatgttgaggcataagtagtctccttgtctaatgaagcgactacttatctgataaatatgacacatacatatagaaattgcatcctcctcaatgaagcatagtacgaaatggtggcttacgaaactttgcgcaacc

SEQ ID NO: 18770 - DNA, 239 bp, Glycine max
  unsure (1)..(239): unsure at all n locations
  Clone ID: PAT_MRT3847_116953C.1
cacactgcataccttaggtcttccgaattcgaagttaatttgcaagatggctaagggaaagggtcagattcacaatgtggtgggttgtcctgtgggaccctgaggaggcaacaacatttaacgagctgaggaagcctgtgtggagacagagctccaaggcatgcatatgaggcatgacgtacggctcggagggcancagacaatatgtaacacatatctggaacctatgtatcagtgtc

SEQ ID NO: 18771 - DNA, 917 bp, Glycine max
  Clone ID: PAT_MRT3847_116954C.1
ggaaaacaaaccccccggctaatatatttatgatcagcatatcaaactctaaaaaatttacaactaaataacgggggccttttttttttttttgttttttttttttttataaaactggtaaacttttgtcattgtaaacaagacaagcatcatttgtactttagcaagaagcagttgcaactggcttcttatttacttattgggacttgggggcccttatttgagtatcctcactcaccatgaaagtatttaacactggagaagtcaggcatgaccaaagagaaatgttatgctaccaaatatgctttaaaaaaaagcctacaagtccccagtattatttacttcccttccacctctcataaaggaatttaagaggtgataatgaacaaaaagtagtgtttttgtttttttacacattttagctgttttcattggccttatattcaaattgaagctgagaacattcactttctggacttttgcttacacagctaagtattgtatcttccatcagttctgcaaggatcgcttctcccatttcaaaaccaattgtttcagcatcaagattatggtccaaccatgccccatttttatccatgtcttttttaataattttgtccaaggtacgtggtgggggcaagggaaggaaatgccagcacactcctttccagaccatgagaacaaccttcttcatatttggactaagccttatgctaggatttttgaatgacacgcaaggtgagaccccgaagtaattccgacaaacctccatgagaacgtcattgatgcagtcattgatgagcttcagatcatggcaaagctggtttggtaagaactctattacctgatcaaacaaggaaggatctagtatcttgtctgaggaaagacatttcatcaacaattgatctgcagtcaat

SEQ ID NO: 18772 - DNA, 1879 bp, Glycine max
  Clone ID: PAT_MRT3847_116955C.1
ctctacgtctctctctcctcctttttgttcacctgccacatttacaacaaccccctcttcttctttatcaacttttcctcagaactctcttagatttagctgctcccaatcgtttggaccaaaagccattaaccccttttgcagaaaagcacgattttgctctctacaagggtcaacgagtgtgaaaagcagaaaaagcttggtgctttgtgccatcaacatgactatagcaacggatagtttgttgcaggtggtggaggaggaagagggtcctcctgattttgctttgcttgatcccgaggacaattctaggcctcgtagaattgctctcttcgttgagccttctccttttgcatacgtctcaggatacaaaaatcgttttcagaactttataaaataccttcgtgaaatgggagatgaggtaatggttgtcaccacacatgaaggagtacccaaggaattttatggagccaaattaattggatcccgaagcttcccttgtccctggtatcaaaaggtgcctctctctttggcacttagtccaagaataatttctgcggttgctgagtttaagcctgacataatacatgcatcatcaccaggcataatgtttttttggtgcccttatcattgcaaagcttctgagtgttcctattgtcatgtcctatcacacccacgtaccagtatacattccaagatacacctttagctggctggtgcaacccatgtggtgggtcataaaatttctgcatagagcagctgatcttacattggtgccatcagctgccattgcaaaagatcttgaagaagctcgagtaacagcagcgaacaagatttgtctttggaacaagggtgtcgattctgaaagtttccatccacgattcaagtcccatgaaatgcgattaaggctgagcaatggtgaacctgagaagcccttgatagttcatgttggacggcttggagttgagaagagtttagattttctcaaaagtctcatggataggcttcctgaagcacgaattgcctttatcggagatggaccctacagagaggaactagagaaaatgtttgaaggcatgccagcagtgttcacaggaatgttaggaggggaagaactatctgaagcatatgcaagtggagatgtctctgtgatgccttcagagtcagagacacttggccttgttgttttggaggccatgtcatcagggattcctgtggtatgagcacgtgctggtggcgttccagacataattccagaagaccaagatggcaaaattggctacctctatacaccaggtgatcttgaagactgcttgagcaaactaaagcctcttttggatgacaaagagttgagagaaaccatgggagaagctgcacgtttggagatggagaagtatgattggagagcagccactcgaaagattcgcaatgaaaactacaaagctgccatttggttttggcgcaagaagagggctcaactgttgagaccctttcaatggttggctcaacctattttcccatctccagatccagaagccaactcataagggtggtgattgatgcaaagcaaattcttcttttaagctagctttggatggttctttaaatggttgattgctttggctttaaggaagccttgtatgggacagaagtgtggttggttgtgtaatgtattcatttgatagatgtatatataatgggataaaaattatggaatgtgccatggtagagtggattaactagatttcaatgtcaattcatattgaggtattggatagtgtaaaatacattgtgcaaccagtaaggggagaatccattcatgttttactagtggaaaactagtgattaaatgcataaaaattggcccttgagaggatcg

SEQ ID NO: 18773 - DNA, 2065 bp, Glycine max
  Clone ID: PAT_MRT3847_116956C.1
ggctcgaggtctctctctataaatccctctctcactcctccttttcgtttacctgccacacaaacaacaaccctatcttcttctttttccactttccctcagaactctcttagatttagctgtttccaatcgtttcgaccaaaacccattaaccccttttgcagaaaagcaagattgtgctctctgcaagggtcaacgagtgtgaaaagcagaaaaagtttggtgctttgtgctaccaacatgactatagcagaggatagtttgttgcaggtggtggaggaggaagagggtcctcctgattttgctttgcttgatcctgaggacaattctaggcctcgtagaattgctctcttcgttgagccttctccttttgcatatgtctcaggatacaaaaaccgtttccagaattttataaaataccttcgtgaaatgggagatgaggtgatggtcgtgacaacacatgaaggagtacccaaggaattttatggagccaaattaattggatcccgaagcttcccttgtccctggtatcaaaaggtacccctctctttggcacttagtccaagaataatttctgctgttgctgagtttaagcctgacataatacatgcatcatcaccaggcataatggtttttggtgcccttatcattgcaaagcttctgagtgttcctattgtcatgtcctatcacacccacgtaccagtatacattccaagatacacctttagctggctggtgcaacccatgtggtgggtcataaaatttctgcatagagcagctgatcttacactggtgccatcagctgccattgcaaaagatcttgaagaagctagagtaacagcagcgaacaagatttgtctttggaacaagggtgttgattctgaaagtttccatccgcgattcaagtcccatgaaatgcgattaagactgagcaatggtgaacctgagaagcccttgatagttcatgttggacggcttggagttgagaagagtttagattttctcaaaagtctcatggataggcttcctgaagcacgaattgcctttatcggagatggaccttacagagaggaactagagaaaatgtttgaaggcatgccagcagtgttcacaggaatgttaggaggggaagaactatctcaagcctatgcaagtggagatgtctttgtgatgccgtcagagtcagagacacttggccttgttgttctggaggccatgtcatcaggaatccctgtggtgggagcgcgtgccggtggcgttccagacataattccagaagaccaagatggcaaaattggttacctctatacaccaggtgatcttgaagattgcctgagcaaactaaagccgcttttggatgacaaagagttgagagaaaccatgggagaagctgcacgtttggagatggagaagtatgattggagagcagccactcagaagattcgcaatgaaaactacaatgctgccatttggttctggcgcaagaaaagggctcaactcttgagaccctttcaatggttggctcaacgtattttccattctccagatccagaagccaacacatagcgtggtgattgatgcaaagcaaatgcttcttttgagctttggatggttctttgaattgttcattgctttggctttaaggaagcctattatgggacataagtgtggttggttgtgtaatgcattcatttgattgatgtatataataatgggacaaaaattatggattgtgccattgtagagtggattaattagagttgaatgtcaattcatgatgatgtattggatagtgtaagataaattgtccaatcagtaaggggagaatccattcatattttacaacccagatatgcaatagcatagtagaaaactagtcattaaaagtaaaaaaaaattggcccttaagaggatccgagatagagatcaaaacattgtaaatctgtgtccaagtataattttcattactttgagctctttttcggttttgttttgtcttgtaagaagcaatttggcccatctaatcacaacctttatttggtcttcaaaaaaaaaaaaaaaaaac

SEQ ID NO: 18774 - DNA, 359 bp, Glycine max
  Clone ID: PAT_MRT3847_116957C.1
gaaaaaccaattaagaaaaaatttttttttcaacgaataaggcccttttttttggtcatcccaaaaccatttttcgggggttttttgggccacctaaattacgcgccggttaccggcttaatttaaatccagaaacggttttttttcacaccggcgcgcgccaaaaacccaagtttttccgttttcaacaaggggcccgttagcccccgggtcaccggcccaatggggtttcttttggtcaccccggtccgggggggggattcaattgccgccgccgcacgaaaaaggggaaaccttccccttttttttcctggcggggattcttgtaaaacaaaggatgggaatttttgggggccgga

SEQ ID NO: 18775 - DNA, 173 bp, Glycine max
  unsure (1)..(173): unsure at all n locations
  Clone ID: PAT_MRT3847_116958C.1
caaccatatgagatgcttctatcagttctagattgtcgctgaatccgatggctcagattgtanttttggtttcccntcaatggttttatcttccttcaatattctggcagttgtcttatacttgtttngtntacttgaattgttaatgtggcagagattctttttggaagatg

SEQ ID NO: 18776 - DNA, 817 bp, Glycine max
  Clone ID: PAT_MRT3847_116959C.1
tacggctgcgagaagacgacagaaaggggagaaagagaagcaagaacttgaggaggagttggaagagtataggcagaaggtaatggaatatgaagcaaaagagaaactaagggtgctgagaagaatgaaagatggaagtgtgagaagtagagactcctcctcttcttgcagcaatatgaactacactgatgagctatccattgatcttaaccgcgaggcacaggacgaagataatgtcttattcaaccatgaggagagcagccacattaatgcaactgatgacacagtttctaatatggaggagatggcactagactgtgtaaagcatgtaagtgctcttgatgatacattggctgaatttgaggaagagagggcttccattctagaacagctcaaagcattagaggaaaagattactacacttgcagataatgaggaatttcttgatgacatcaaattgattgagcattcatcaatgtatggtgacaaagacttgaatgaaaactgcaactttagcagtgttgaagaggagaatggatattctaatgggttttcagatgataaacactctccaataggttccttggcaaagaagctacttccatatttagatgcagctgagaatgagactgaggaaacatacacacttgagggacaattggaatctgaatcatctgacatgcaaaactcagttcctatacttgaaatggatagcatgaagacatgcattgaataggaggttgatcgtgtttacgagaggttacaagctcttgaaacagataagggatttctacaacactgcatgggttccaaacag

SEQ ID NO: 18777 - DNA, 147 bp, Glycine max
  unsure (1)..(147): unsure at all n locations
  Clone ID: PAT_MRT3847_11695C.1
ggnaganaccctagccactctcccggngtcacgatggcagatcttacgtgaaaancctaacgggtaaaacgatcangttggaggtggantcttcggacaccatcganaacgtgaaggccaagatccaggacaaggaaggnatccctc

SEQ ID NO: 18778 - DNA, 971 bp, Glycine max
  Clone ID: PAT_MRT3847_116960C.1
ctcgagccgttagtgaggatccacttactgtaaaagtcgatcatctcaaggataaaacttacaacaaagacgatgatattataaaggccacatctttcgaggttatatcaaccctaagagatgttcttaaaacaagttccctttggagagatcatgttcagacttacactaagcatataggtgattttacttatccaaggcttgcagattttggtgctgcaatatctggggcaaataaattgcaatgccaacaagttcttgaagagctagatgtgtataagcgattaaaacttacactggagttggtaaagaaagagatggaaatcagcaagattcaggaatcaattgcaaaagcaattgaagaaaagataagtggtgagcagcgccgttacttgttaaatgagcagcttaaggccataaagaaggaactgggactggagactgatgacaaaacagctcttactggtaaattcagggaaaggattgagccaaagagagaaaaatgcccgcctcatattttacaagttatagatgaagaacttgcaaagctacagctgttggaggctagttctagtgaattcagtgttacccgtaactacttggactggttgactgcactgccttggggtgaatacagggttccgtacttggatgtccctccgttctgttagtgcctgggtgatgtccagtttggtttgactgctgtgctggcctcccttctccaccccttacctgttgggtgggtccgaggggcttcacaagggaaaattatctgtctttctggtccacctggagtgggcaaaacaagtattggtcgttcaattgcacgtgccttgaaccgtaagttcttccgattctctgtaggaggattagctgatgtggctggaatcaaggggtatcgtcgaacttatattggggctatgcccaggaagatagtacaatgccttaagaaagggggcaaatccaacccc

SEQ ID NO: 18779 - DNA, 244 bp, Glycine max
  Clone ID: PAT_MRT3847_116961C.1
accagacgtacttcttcgctgtcggaagatgggagcgggcaatcagtggtggaggtctgctaccgtgccgaagccagtggccggccaaagcgtaaccggctactgccctggcttctgtatgatcggaggcccttgttagatatgctggagcacatgagatcctggccacaacccatgctctttcgaaactggccatgggtctgatatcaaatgacgtcatgtaatgttgctacggcatgcaaat

SEQ ID NO: 18780 - DNA, 377 bp, Glycine max
  Clone ID: PAT_MRT3847_116962C.1
ggcagcccaaataacaacgacaacatctcccccacctctcttcccctgtagcaccaaacttaactctcacaacccgcctatacaatatgtccgacgtcgctaagccagaccccgccgcggatcagacggccgcacctggagccactcttgtcaaggacgagaccgcgaaggtcaccaccgacaaactgtccgacaagcctgagaatgcgggggcaacttcgaccgatgacaagcccatcacagagaaggccaccgaggctgccacttctgctgcagcggcagtgaaggacaacgtcttttctatgtttggtggcggccctgcaaaggctaagaaggaggagacagacgatgttgatgagccgtcaggtgccaccaag

SEQ ID NO: 18781 - DNA, 337 bp, Glycine max
  unsure (1)..(337): unsure at all n locations
  Clone ID: PAT_MRT3847_116963C.1
aatcaaattagttcattctctttgcgcagttcctacctctcctttcaagatgcagatcttcgtcaagaccctcaccggaaagaccatcaaccttgaaggtggaaagctctgnaaccatcgacaacgtcaaggccaagatccaggacaaggaaggaattcccccggatcagcaacgtctcatcttcgccggaaagcagtcgaggaggcgtaccctcgcgataaacatccagaggatcaacctttactgtcttcgttcgggggagagacttcgcaagattcatggaaacaaactagagtgaagtctgcacatgaaagtaagcagtcagcagaggatccc

SEQ ID NO: 18782 - DNA, 480 bp, Glycine max
  Clone ID: PAT_MRT3847_116964C.1
acgaggaaataaatagtattagcagatgatcaaacaagttcacacagaaggatcattgtttagttttaaatttttgtacagaagtagttaaatcatgctgttcatcgagttaacaggttcatagtgtcatcccataaaaatttagttaacaaaaccatttccaaattgcaagcaatcaaaattccaagcaagttcagaatcttcataactcctgacagtccgtttcggcatggttgtcgctcagctgcagagaacaaaccacaggagacatcagaaccacattcccaatttccatagattaatatacacgttaaacaaaaaaaaactacacatgcaaatataacatatttcagatggatataaaataagtagatactttaataaccataaattaacattcccagcggcagttgtaacggggcaatggtcaacagtctattataacatcacctctgtgcattaacagatgtgtataacttc

SEQ ID NO: 18783 - DNA, 556 bp, Glycine max
  Clone ID: PAT_MRT3847_116965C.1
ggttggttagtctttttttttataaaaacttacatttgaggccaaatttattgcaatatttgtggaagaactttctcgacattcaggaaaagtacttactacataatcaaattgttcattacatttatctttaccacaagtagcatcacttgctgctctttgcttaattttaaccgcacaaggcagcttgcaaagatgggatccatgcttacacgaataatgaaaacagagaagttgaacagagttctgcaaaatactgaaaacaaaagttttcataccttttcttcattttggcacaatagcattccgttgatctgagtcattaaccagtaagtttaatttgttcaagtggcaaagtaatcccatcccaatatagatagcggaagttataaaataactgctgaataggtttcaaacaaataagataagatcgttgtgtagtccccagattgaaatccagtattgtgatcaatgaagtaaggaacctttttagatccagaagcatccaagagtaacttcattcgaggagacccttctcctacattttgaagaatgt

SEQ ID NO: 18784 - DNA, 381 bp, Glycine max
  Clone ID: PAT_MRT3847_116967C.1
aaattacacactcttggggccttttttctacttttaaaagatgttttttatttttaatttttctgaaaaaaaaaaccaccccggccacgcctttttcccttttttgaatggggcgggcaaactttcaaaagaaaacaccttttcccaaaaaggggggcgccccgctctttttttattgtctggcccccccccccgcccaaaaaaaaccccccttcccggtcccacccgggattcccgtttttaaaaatacaggcgtaccaccttttcatataaaaaaccccccccccggttgcccccctaattttcctagccggtccctgtgggaaaccccttttcccttacaatggcacacaacaaaccagcccgaaacataaagtgtaa

SEQ ID NO: 18785 - DNA, 301 bp, Glycine max
  Clone ID: PAT_MRT3847_116968C.1
gcgggagacgacataagggggctcactggcgacataccagaaccctacgacccttccggctccgatcgcacgcgccctgatcgccccgtatgacgaccggctgtgaccttggtggcgccgagcatgatgccgatcccgggtagagcgggcagcttgcagcgcatgacagccattgttcacaccctcactcacactgaaagctggtccattgacttgtcttgggaatactataccacgtttcgggacgcaagagtcaatgcccacacacttccctagacattttgtcaacgccgcacacgat

SEQ ID NO: 18786 - DNA, 1457 bp, Glycine max
  unsure (1)..(1457): unsure at all n locations
  Clone ID: PAT_MRT3847_116969C.1
ngacggctcgagaagtaagttactttctcgttcgttccctctcaaccaaaaccaaccacttcatgttatcattgctatgacccttcaagcttttcatggctctgcatgttgtttccgttcccaccttcttcacttttcttcttccaccgcttcatctccaccattccttgcttcgaggaggttccaatcatgcccttcaacaagaaaatctctcaagttgaattgcagttcaagtggcaataatggtgaccaagattaccttctggatgctccagtttctgttggagatggattctctttcagtggagggaagtattcagatggccctagtccaagtgatgaatggtttaagcaagggaaaaaggttaaagcctattcaatacctggcactggtgaaaaggcaaaagatccgatttttggacttgctatgggttccggttctcaagctactggcgatcgtttcagatggttttgtgttgaaagcggaagtgctgataatccttcagtgatattaatccatggtttcccttcacaggcatattcttaccgcaaagttcttccagtactctccaaggactatcacgtcatagcctttgactggctaggatttgggttttctgacaagcctcaacccagatatgggtttgactacacactggatgagtatgtctcatcattggagtcacttattgatgaactggctgctactaaagtctcacttgttgtccagggatatttttcgcctgttgtagccaagtatgccagcattcaccaggaaaaagtcagaaacttaatactccttaatccgcctctaacagcccaacatgccaagcttccaccaacattgtccatattcagcaactttctactaggtgaaatattttcacaggatccattaagggccagtgacaaagctctaacaagctgtggcccctataaaatgaaagaagaagatgcaatggtctatcgaagaccctatcttacatctggttcctctggctttgctctaaatgcaattagcaggaacatgaacaaagacctcaagagatatgtggaggatatgcaaacaatactgaaggacaaaaattggaaagttcaaaccacaatatgttggggccaaagagaccgctggttgagctatgatggagtggaggatttctgcaaggattccaatcataaactcattgatgttcctacggctggtcatcatgtgcaggaagattgtggcgaagaagttggacaacttattcgtgggataataagcaaaaggaccaagatataggatattttctcattgcttcttgagatgctgaacaaatttttttgttacatggattcctatcttttccttggtctctatccttccaatagatcttgattcaattccaatattgctctgcataaactcgcgttttaaaggtaaaaggaattatatcaaattatcgatagtgtatctc

SEQ ID NO: 18787 - DNA, 2801 bp, Glycine max
  Clone ID: PAT_MRT3847_11696C.1
aattatttagatgaatcaaaagaatttcaacctaatcaaggaacaacattaaaatgaaaattgaatgagaattcaaccactttatggcataaacacttagaccatatctctaaacaaagaattcagagacttgtgtcagatgagattcttgatcccttggatttattagactttgaagtttaagttgaatgcataaagagaaaacgaacaaacataaggaaattaggtgctgaaagagctaaggacgtgttagaactaatacatatggatattcgtggttctttccttacggcttcttggaatggacaacaatatttcattacgttcatatatgactactctagagatggctacctatatttgatacatgagaagtcttaatccttagacgtttttaagaccttcaaagttgaagttgaactttaacttggaaagaaaattaaggttgtcaaatctgaccgtggtggtgagtgctatggcatatatgacgaatcaggagaacaacgtttagggccttttgtgtttttcctaaaagggtgtggaattattctgcaatacactatgtcaggcaaacctagcatgaatggtgtagtagaataaagaaatcagactcttaacgatatggttaggagtatgattaatcattcttctttaccagagtcactttggggagaagccttaaacatctcagtttacatccttaatagggtgttatgtaaaatagttaacaaaaacccttttgaacattggactagaaaaaagccaagcattaaacacttgcataattggggttgtccagttgaggtagggccttataggccacatgaaagaaaactgaactcaagaataattagttgttatttcgttggctatgttgaacgctctcggggtaataatttttgcaatcctacttcaagatcttttttcgagatgggaaatgcaagatttcttaaggaaattgagtttgaaaaggaagaaaacatgaggaatgttgtctttgaggaagaacctattatttacagtgatcaagtcctcatacctattcctactcaagacataaatctagtaatagaaaataatgttcaaactattattgatgacattcttctagaacaagataacaatgaggttattccttaaatacctatagagcaacctcaataagtgtcattaagaagattcactaaagagaggagaactataatcccaaatgattatattatctttctccaagaacatgaggatgatgttggtttaatagtagaagatccaataaacttttatcaagctatgcacaattcttactctcaaaattggattaatgccatgaaggatgagatgaagtctatgaaagataacaacgtttgggatctcgttgaattgtctgaaggtgtgaaacctattagttgtaaatgaatatttaaaatgaagatggattcaaagggtaatattgagagatataaagcttgtctagtcgctaaaggctttactcaaaaggaaggcattgactataaaaaaaatcttatcttcggtatctttaaaagattcttttagaacaatgatggcgctaatagctcattttgatttcgagtttcatcaaatgaatttcaagactgcatttttaaatggtaacattgaagaaacgatttatatggtgcaaccagaaaactttgtgtcaagtgactcaaagtctgcgatgtgtaatctgaagaaatccatctatgggctcaaacaagcttctcatcaatggtattataatttccatcaagtcattacctcatatggttttgaggcaaatgtagttgatgattgtgtgtatcataagttcagtgggagtaaatacatattattgctagcaatgatataggcttcttggaagaggccaaaagatttctaacgaaaattttgaaatgaaagattttggggaagccttttttgtgatttcaagatactaagagatcactctcaaggtatcctaaggttgttacaagtgaactatatcgataaggccctagatagattcagcataaaagatagtaaataaggagattccccaatagctaaaggagataaatgcagtctcaaacaatgcctcaataatgacctttaaagaattgagatgcaagagattccatatttgtcaacagtaggaggtctaatgtacactcaagtttgtactcatcccgacatagcttttttcgttggagttttgggcagatacttgagtgattctagaatgcaacattggaaggcagcaaaacgtgtgatgcgttacttgaagagaacaaaagggtacatactcacttatcagaagtctgagaatttagagatcattaggtactgaaactctaattttactagatgtcaagacaacaaacacttcacatctggatacatatatatgttggctagacgagctatctcttggaagtttactaaacaggttcttgtaacttcttcgaccatggttgcagagtttgttgcttgttttgaggcatccaaccatcggatatgattgaaactttgtcactagtttgcgtgtggtcgacgtcattgaaataccattgagaatttattgtgataataagtcagtagttcaatactccaacatcaatagtagtacaaccaagttgaaattcattgacatcaagtttctagttgttaaggaaagagtttagaatatacaaatttctatagaatgtatagagattgattccatgatgactgattcacttactaaaggtttggtacctaaagtttttcatgagcacactgctcatatgagtgtggttcctaatagt

SEQ ID NO: 18788 - DNA, 733 bp, Glycine max
  unsure (1)..(733): unsure at all n locations
  Clone ID: PAT_MRT3847_116970C.1
caagtccttgctttgactttcctatttcaacctctcttgtaactcacactgcttttgctaaaacaacttcaaacttttagcttttgtcagtactttcaaatcaaaggaaactccttatactcaaaaagagtttgcaatggggttaactaggatgtgttattttggtagttgtcaagttcattccgtttgtaagagttagataccattttagaagctaattctcaagccatccgtaaaggaagttcttgcagttcacagtctatatttattgtatgatgtaacaatccatctgttgattttgcatgttatcagtcctccttcaattgaacctgttatgtttaggcatatatcagttgcgttttgatatgttcaattatggattcgttatgctgttcctcaacctactgtaactgtcctatgctacttagttaatctagtccctacttgggtcacctcatctttgatttttaagtacttggggtggataggataaccttaactcaggtgtttgtcggcttaactttccttactcattttaccttagttacatacacggcccacaaaactgaggttagataaagtgagttcctatctccttattcagtatgaaaagattgtcattcattttttgctgcagcatatggataaatggaactcaaacctggggctgttgntgcctgtttctgaattgcttgtctggttatctatttgaaccaaaaagacaattggatcg

SEQ ID NO: 18789 - DNA, 563 bp, Glycine max
  Clone ID: PAT_MRT3847_116971C.1
gcccattaaaaacaatagatcctttaaaaaaggcattagatttttttctggagatattattgaattctacccaaaaaggagtagcttcccctgggggaatggaactatcaaattggatatggatcataaccgggaaaaaaatttgataaaaatgggggggaccttcactttttccatgggacactttctacgggaccttttttggttttccacgggatcaatctcacttttttttttaactggttccggtatgaactcctaatgcaaaattttgttatgttacaccttacaaaatattatcaaggaatctttttccccctttgtaaagcattcaggggcaacaaaagctaatcttaagcataggttctggcacctcatgctcagcaaacaatggatcattttggaaaaaatgggtgggggagaggccaacaactataaccatctccaaaattttgacattccctggggaatttgcagcgagcaaggggggacaataactggccggcccaacaaactgggggacacaacctggccagaatcgtccactttgttgccaaaaagag

SEQ ID NO: 18790 - DNA, 468 bp, Glycine max
  Clone ID: PAT_MRT3847_116972C.1
ggagtgtagtatcaggaacctcgacttcactcttggcggcattaacaccattttcctagtcctgccaaatgggagctttgccttgccactaaacaagctctgcaattgctttaggacaactaactcaagtttcttgccaaacatgtttctttcttttttttttttgttatctcttcacttgttaaaggggaataggaaattaattaatgtgattgaatccttatcctgtaggtttttatcaatgtcccgtggtgttgaatttgaagaatgaagaatttgatgctaaaaagaaaacactcaaaacaaaataatgattgtgggcaggaatagaatccctcaaaggatcatatttatgcctttttttaacaatgtagactatcttggtcactttattttttcaaaggttaagtataaagttgatgcatgtgtgtgtgtgtgtggcagataatgacatatagtaagaaggat

SEQ ID NO: 18791 - DNA, 438 bp, Glycine max
  Clone ID: PAT_MRT3847_116973C.1
tttctgacgcgtgggtgaagagtgaagagtgaagagtgattgagttgaagtaacaaagatcaaaaagatgcggtgcggaaagtgtgtgggaacgaataaggcaacagagacaaattatgaggctcatcttaagcattgtggcagacttgagtgagcattttttgagtgaaaaatttgacattctgcggttcgttattgagctttgggagaggatcttctagatggacattctagttcggatggacccatagtgtcagacctaaggtgaagcaccatggaactatagcttggattcttgtacttggtgatagtggttcaggctggacccaactattggtaacttttctttttctatatattaaatggtgttgcccatctgctcctacacgggctgtagccttattaggcggatttgcttgcactgctgggtttgatgct

SEQ ID NO: 18792 - DNA, 347 bp, Glycine max
  Clone ID: PAT_MRT3847_116974C.1
acgagaggatggtcagctatgtcttgcagtagtaacgtgaacacaataccacttcaacatactatatgcgagtacatgctggcatccttagccagtgctttgctcaaaccaacagatcatccaggaacatgtatcgtgcattaggctactactggttaacaattgccatctatacatgcaatgtgtataagtttagccattaattttccatgatcagcgtacaatttatcgctcaactcatgatataagttcatttcgtatgtttgcatcctcaatcatgatattcatgaccattgacggcatcacttcgattgtagttgagatcaaagtgttcgatcgttgaacac

SEQ ID NO: 18793 - DNA, 383 bp, Glycine max
  Clone ID: PAT_MRT3847_116975C.1
caaagatgccaacccaaacattattctataatatcaggaagagaaacacaaaatcaatccattcttttgtttataatctttttatttttttttttttttttatggctttttttttgcttttttttgggacacacgaaaaaattttttttgtgaagaaataaagaaaactcaggctggggtgtttaaaggagccgcgcatcaaactaatgaacccaggggcgcatcccatatattatttaaactggggggctaaactctgtttttataaccacccctcgttttttttttttagaatgtaaaatgaggcgtgggggggttgctaaataaagggggccgggtatgtatcccgttggcgctaccatttagatggtgcctgcgggggg

SEQ ID NO: 18794 - DNA, 399 bp, Glycine max
  Clone ID: PAT_MRT3847_116976C.1
tcgcccacgcgtccgatctgtcctcataaataatcatttccttgcacgattgaatgagctatcattgaagacgcgcatttcttcctctccagttctcgattcgcctctggcggcggagctgtggagtgaagtgaagtgaaccaacacgtcatatgataaattcgccgtcaaaaccactctcttccatgaacgacggtgataaatttctgcattctttgtattaatggcattgaaacattgaattattaagggttttgtttggggagaactgacattggaagctagaatctgttgttatggcttcaagagtgattatgcgaaagagaaggggcctcttcttcaaccctctgatgaggcaacctacttgcattatttgtggattcttcagtgttgggcacg

SEQ ID NO: 18795 - DNA, 224 bp, Glycine max
  Clone ID: PAT_MRT3847_116977C.1
attatatgacactactgcataaaacacgtcactaaaataagattgcattcacacatatatgcaaagcgaatgggggatataactggcatgacaacacaatcctttcccaaaacttcaaggaattccccaaaagtttctgcagtgcacgtatacacaaataatagtcatcaaaaatgtgtatgcaaaaaaaatcacagacgatctacaaatacacacgctcatct

SEQ ID NO: 18796 - DNA, 373 bp, Glycine max
  Clone ID: PAT_MRT3847_116978C.1
cgctatgccaacagacacaaaacccttgaacttatttggaaatgtaactataggatcttttggtcattcatgggcccccactctgggcgaatggggggctttaagaatattcatgaaactttcctacatatgctttatcccattatacttctaacgcaaaacatgttactaaaactttctcgaccccctcatattcttgtaaaatatcggatcatgtcaacgtcttcaaagaaccagttttaaaatatttatctcctctttaaacttattggatctgttcatccatcggtcatcgtaacttatgtcgacttgacccacggacaccatctgatttttaaccatcatatgctacgtgcacatacacttattccta

SEQ ID NO: 18797 - DNA, 386 bp, Glycine max
  Clone ID: PAT_MRT3847_116979C.1
gccaagtttggcaagccgctgtactccacgcgcatcatcctcggcgaggtcaacccggtcttcgaggagacgacggtcttaatggtgtcgatggacgaggtcaagtctaaggaggaccttgcggcgatgctttgggacagtgacaagatgagcgccgatgaccttgttggacgggtgcagatcccggtcacggagctcatgagcaagccgaaccagatgcaccgtcgtgaggacagcctcatgggctttgaggacgccaatgacatgcccggtaaactcgtctggtccatcggatacttcgagaaggtgccgctcaggaaagagctcgaacgagcgccaacagccgaagaggtcaaggtcacccctgagccatcaaagaccgtgcc

SEQ ID NO: 18798 - DNA, 333 bp, Glycine max
  Clone ID: PAT_MRT3847_11697C.1
acctaattaacgaagatctggcctataagaatactgttgagtctataacagggattatatctaaaaccatctcaactaaggttgtattttcatactcgactagcattaaatttttgtctgctggactcccccatcccttccccaaaaccctggatagtgtgctggtacagggaattctgtgagttgtgactagccttttgcacttattggtttggatagggcatgctagctgtatacaatgctttatctgaagatgagaaaagggaatctgagaaggcttatagtgcttcttattatccttgcatggaaatttctgcctgagtgctatgagga

SEQ ID NO: 18799 - DNA, 624 bp, Glycine max
  Clone ID: PAT_MRT3847_116980C.1
gacaccttaaaaactagttttatatattcaggagggttccgagggcagaactgagccacactgcaatcagcctggctgcacctttgcttgcctcccttcatctctcaaagcaacattgtacaaaactgtatttgcaggaaaacaatgaaaattaagaatgtgtacaaaagtagacaagagccagaaattacacaatgcaggggtggctttgggaataaggaaaactgtgttccacaccgaagctcagggccacacactatgttcaaggagcagacttcagtgtcaactgtagggaaccagtcattcaaaggggagagttgagggtgcaaagctactggctttaacaatgcagtcttaaataccacatcacttctgctgtgtggcaaaagccagacactggcaatgggaacaaaagaggggctctctggcaaggccccagataaagacgggttcagaaggcatagcgggtcctaatgtcctcaagcttcttggacacttcaggtggggttcggtccagctcctcagagacgttcttctgcttgttgggttccatggagttgaactgctcacaaaggtctccatcaatcacattcttaacaggggaaatagtaagaacgaaagctc

SEQ ID NO: 18800 - DNA, 480 bp, Glycine max
  Clone ID: PAT_MRT3847_116981C.1
acaagccgataatggaataaaaaaaccataaaaattaaaggggactatttaagcaagcaaatttttttttgggttttgaacaaaacccaatttttttcccccccaaaaatgttttttgattggctaaacaaaactgggtcacttggtttacacaaaaacattggacaaaagtttggaacttaattttcaatgataacggaagaaaaaaaaaacctaaaacaaactgaatgctttatgaaatcaagccccaacaatttcagggggttcctttgccactatttcatcagcaggtttggttaccttggcaccaacatcctttgagtaatctccatgaacccccattagtttcccaaaaacaaacttaggggcttttaggatcttgactttacaaacaaacacattttggaaaggggaaaaactaaatggcgccttctcaatctcttttccaataatctcaggaataaacttggggaccaactc

SEQ ID NO: 18801 - DNA, 211 bp, Glycine max
  Clone ID: PAT_MRT3847_116982C.1
acgacctttttttttttttttttttttttttttttttgcacatcaatggaatatacatgagccattgctgtgtatcacccgacaaaaaagaaagtgaaaaaatgtgcaaaagcaaactgtggactaattaatataactgtgcgatcttactagtttacaactttgcacaacctatgatactttcacttgtgacaaaatggggggatttaca

SEQ ID NO: 18802 - DNA, 453 bp, Glycine max
  Clone ID: PAT_MRT3847_116983C.1
cccacgcgtccgcatatataaacatgtattaatttgaagatcatactcggcaacaagatggacaccacaaggaagtcttcagtcgcactgacattcttattggctttcttcatcattgcatcagatatgtgtatggaatcagaagcaaggggacccattgtgcatgttcattgttctagggacgatgactgcaaatatcgtccttgtagagctaaatgtggttgcgtatgtagtaatagctactgtacatgtgtattttcttttatggataatgttcttactcatgcacccacaaattgagtaacgaggtcttgtcatgcaatcaccaagtgagaatgagaacaataaaggattgcatcttaattgtgtatgaaaaatcttaattttactatatcttcaataaaatttatgcttatatatagcattctcgttaaaaaaggaaaataatttttt

SEQ ID NO: 18803 - DNA, 1681 bp, Glycine max
  unsure (1)..(1681): unsure at all n locations
  Clone ID: PAT_MRT3847_116984C.1
gacccacgcgngcgctggtttctgtaatttgtcatatatccttagctatctggctagtctttataatctaccggctcgtctccaaagtatctcacttgggtccggaatcagaagtacttaataaattcttctcagctatgaagaagctgtgtcccaatcttgatcgtgaggatgggctcgaaaccgtgcttgaggtccctatcccggaggagattctcacccacaagagtggaaccaccaaagcttggcacaacatgaagaattggatgaaaccacacgctgaatcgagatcaaattcagcttccatggcagcagttttcggagggaaaaacactgagattcagcttttgttaggcgttgttggagcgccgttaattccttcacctatcgcccctgacaaccaacccatcactcgcagcattaaagaccaacacattgaggtttcaatggctaaatacatagtgaagcagtacgtggcagcggtgggaggagagcgtgctttgaatagtgtggacagcatgtatgctatggggcaggtgaagatggcagcatcagagttttcagcaggggaagggagtgtgaatagtaagaagatggtgaaggtgaagaacttgcagatgaagggggaggtggggggttttgtggtgtggcagaagaggccagagttgtggtgtttagagcttgtggtttctggctacaagatcactgccgggagtgatggtaaagtggcatggaggcaaaccccttggcatcattctcatgcctctcgaggcccaccaagacctctcagacgtttcttacagggtcttgatccaaggtccactgctaatctgttcagcaactccatatgcattggagagaagacagtgaacaacgaggactgcttcatactgaaactcgaagcggagtcgtccacactgcgagcaaggagcaacagcaacgtagagatagttcgccacacggtgtggggctacttcagccaaagaacgggcttattagtgcaactagaagactcacacttgctcaaacttaagtctcacgaaagcgagagcatatactgggaaaccaacatggagtccctaatccaagactacagaagcgtggatgggatccaagtagcacacgctgggaagacacgggtgtccttgttcaggtttggtgggggacccgagacacattccaggacgagaatggaagaggtttggcaagttgaggaagtggactttaacgttaaagggttgtccatagactgttttttgcctcctagtgatttgaagagagaggaagaagagaatgaagaatcatgtggtggtggggtggttgcaagcaataataataataatgccaagttgccctacaagattcgttcggcttcttttaggattagtgcttccaaagtagctgctgtgaacttggatgattcttgtaccagcagcgagagtgatgaagatttgtaaattaatctttctttacgttcattacatcgttttgtaaataggttagtacatggtcgagtttgtagtggagctatcatattagcttaattacttctcttctcactacaaactagtataggacgagaaacaattttcaatactcaatagaaacctctaattttgccctaaaaaaaaaaaaaaaaaaaaaaaaaaaaaaaaaaaaaaaaaaaaaaaaaaaaaaaaaa

SEQ ID NO: 18804 - DNA, 859 bp, Glycine max
  Clone ID: PAT_MRT3847_116985C.1
cggaccctctcttctctcgagccgcggatcttgcccctctcttctctgtgccctctgtgtttctgtctctctgttcctttctttcttttcttattttccatacacatattatatataatatatcctctctgcttatactcctagtattatataaggcctagagacaacattcattgcaattggcagcacataattcaaagggcaatggcctcttggaagaagaccatcacaactccattcaaaaaggcttgcactgtatttaaacagcagcaaccaccaagggatcaaaagaagtctcaaacagagcaagagaggcaagtaatggatctgcagggtgaagtgatggcatgtgggtatgaagatgttcaagtgatgtggtctattctggataagtccaaatccacaaactgcaatataacctcttcaacctgacccaaccaatcaaaaacaagaaagtggcacttcagcaattagcgaatgtttttgtatgctaatgtttaaggtcataattgcatcatactagcatatcattatctggtatgaatgtaattctcattctcatcgtagaaaatgaaaaaaaaaaaaaagaaaaagaaaaaagaatgatgtgtagtgtaggtgtttaagtttaatactagtaggatttaacgagtgtcactggttttcatggtgaagagaagacggtggcggtgtctgtgttgtaattgtaagtcaaaatgtgatggtgtactgtagggaatccccatgattgatgagagaaaatcatggcgagattatgatatgataaatagtagattagattcttttcacttctctctgtcactagtcaatggtcaatgttaaaatctccagacttaga

SEQ ID NO: 18805 - DNA, 477 bp, Glycine max
  Clone ID: PAT_MRT3847_116986C.1
cggatcttgcccctctctcttttcttatagagaccacatttattcattgcattcaaagggcaatggcctcttggaagaagaccatcacaactccattcaaaaaggcttgcactttctttaaccagcaaccaacatctgcaagggatcaaaagaagtctcaaacagagcaagagaggcaagtaatggatctgcacggggaagtgatggcatgtgggtatgaagatgttcaagtgatgtggtctattctggataagtcgaaatccacaaactgcaatataacctcttcaacctgacccaataaaaaaacaagaaagtggcacttcagcaattagcggatgtttttgtatgctaatgtttaaggtcataattgcatcatactaacatatctatttggtatgaatgtaattctcattctcatagtagaaaatgaaaaatgatgtgtagtgtgtaggtgtttgatatgggaggatttaacca

SEQ ID NO: 18806 - DNA, 590 bp, Glycine max
  Clone ID: PAT_MRT3847_116987C.1
aaaaagtgagtactgatgagattataggagacaagaaatatcttctaaaatacaaaatctataaaaatatcataatattacagcccacaataaatttatgccccaattaaaaggtttgcagacagtaaacatgaaaaaaaaaaaaaaaaaagactagtgtacaggggccatatttttcctttgggcgaccaaaatctcgtcagaaactaaaaaaatgttgaattagtacattataaagcagaaacacaattggtcattgggattcatgtgctattatccaaaggagagaaagttagtaatcaaagcaaaactgaatattcattctgtgctgcatatcttagtcccactgagaatgtagcccccaaatgagctcatttgcatgcatgggtgagttctagatggaagtacctggtattcacccagccaaggctctgttatttgcaatccaatagccattttctcaagctgtaaattgtgcatgcaagttgcaagaggctgaagatattggggataaatagcaaatggagcagagtctgctaaaaggggcaagatatctctaaccaatgtccaagtatccaactttggctcgt

SEQ ID NO: 18807 - DNA, 273 bp, Glycine max
  unsure (1)..(273): unsure at all n locations
  Clone ID: PAT_MRT3847_116988C.1
tctagctatctcgatcgaactgtccaaggtcctgtcaccatacacaacaaacaacaaaataattgtaataaataaatagtaagcctaaatatcgaggtcgccgtgtggttgtctcagggcgcttatgtgtggctggtggtgcgtggtcgtcttcatctccatctcccactctgccctaccaaagcatagccagatttgttgctttaccaacacacggttatgccatcncacagtacttcctctagtggacttatcattaacgatagtactgat

SEQ ID NO: 18808 - DNA, 332 bp, Glycine max
  Clone ID: PAT_MRT3847_116989C.1
aattcggctcgagaacagtttaatatactacagtgaagtgtggagactcgaggcttagtgcgaggttgggaaactgttgatgcaacaacgtacagtttgcctccgatgttagaacgacaacatggaatgtattacacaccgtcagcatttacccaagaaccatcacagacatagtgatgattgattaataatgggtttacattttttccgcatgttttaacattttcatgtactttgtattatttttttccatgttttaacattgtcatgtactttgtatggttttttcttcatgttaattttatattattgccactttaacatttcaaaaa

SEQ ID NO: 18809 - DNA, 905 bp, Glycine max
  unsure (1)..(905): unsure at all n locations
  Clone ID: PAT_MRT3847_11698C.1
cggccgggccgggatttcacaggggcgatctgaaacacacataagggtaataacaagatgggtcagttacataatattatggtgattcttatagtaattgcagttgctgcaacaatgctaaagagcaccaaagccgcagaatacactgtaggggacaacactggttggacaagtgctcctcctggtggcgcttcattctattccgactgggcttccaatataacattcagagaaggcgacatactagtcttcacattcaccgcaagccacaccgtggccgaacttaccgacagggcaagctttgatggttgcagcgctgaatcnaaaacnncagggagtcanttaccatcanctaccatcaaccccccacaccccatcgtaccggggacttctattttgcatgcaccatccaaggccattgcaacagtggccaaaagctgagcattgccaccatcacaagcacttcttcacctccaactcaaggtccttctcctccttctggaaccactcctaccccaccttcttccggcgacgaaacaccgcctccccaatttcccccgaccgagcctggttcaactacacctcctccatcgcgaggcgaggctacctcccttgttgcaactttctctattcttctcatcacccttttaatcaactcattgttgttttaaagtttggtcctagaagagttttttgctttatttgcgtaacaaggaatgccagcgaacctctttccgacattttctttctagctaacactttttatatgattgttgaaattgatttaaaatctcctatattggtgagttacacttctaaataagagaactcattagattcaatgattattaataaattttaatcacttataaagaaagtataaaaggaatgttagaatatgatgt

SEQ ID NO: 18810 - DNA, 3804 bp, Glycine max
  Clone ID: PAT_MRT3847_116990C.1
gaggaagcaacaccgcttctaagaaagagtgaggtggcaccattagaggatgatgatgcattttgtgtagagcttaaaagggtaggctccatggcagctccaatggtggctgcgaatatgtgtcagtaccttctacaagttgtgtcactgatgatggtgggacatcttggtgtacttgtctccttctctggggttgcaattgccacttcttttgctgaagttacaggcttttgtgttcttatgggaatggctggtgcattggaaactttatgtggccaaacctatggtgcagaagaattttcagagattggaaactacactttttgtgcaattgtgactttgcttttggtttgtctccccatatctatgctgtggatattcgtggataaaatactattgttgtttggtcaagaccctgaaatttctcatgtagctcatgagtactgcatatactccatccctgcattgtatggctttgctgttcttcaatgtcagattcgctacttccagactcagagtatgatctttcccatggttttcagctcaattgcggttctgtgtttgcatgttcctatttgttgggctttggtattcaaattagccctaggacatgttggagcagcatatgctattggaatttcatattggttaaatgtcattgggcttggaatttatatgaatttttctccagcatactttttcagccttaacacaaccacattgcactacatcattccatatgctgttggagcttctgcaagtactcgcatttcgaatgaattaggagcagggaatccaaaggcagctcaaggtattgttcgtgttattgtgattattggaattgttgatggggttattgtcagcattttcttcgtttgttgtaggcatatattaggatatgcttatagcaacgacaaggaagttgtagattatgtttcagatattgttcccattctttgtgggtcttttactgcagatagtctaataggagctctttctgggattgcaagaggtggaggatttcagcaaataggagcttatgtgaaccttggagcctattatcttgtgggagttcctttagcattcttattgggttttgtcctacatttcaatgccaagggactatggatgggaagtcttacaggatctgttctacaagtgattattctgactgttgtaacagtgttaacagattggcagaaagagcttggcaccttccagattcatctcgaaatggtagaaaacaccagaaaccagtctcttctttgtgaagcagaagaacgtttgagctcgaagctggatgagaggttcttgcagcttgcgggttcgttatggcaaacgctatgtgaagacatggatgaacttctacaacaacaggcaatggggcattctccttcttccagcgcgggaattgcggcacccggatttggtgaagtctatgaggatcctatgggtgagctgatgaggtctcaaacaggatgtgcaaatgatggtgaggatgttccagccatattcaattcggaaggctttttctttagccaaaatgttgatgataattcagattcagaagggaaagatgttgtgagtgaggagttggttgtctcttcagctagtgaaccactattatcagtaaatgctctaactggaactactagtttcagaacaattcgagtcactggatgtagaactgaggtgattccctctttaaatgtagttgtggctgatggaaataaggtacagatttcgaatgtggttaagagttttacatggtggttggtaactttgggtgacattacttggaactttgataagctgactatggagtttgttacgcaaggaaggagacatgtgctgagaggggcttctaatgctaagctgaaaatagaacctaccaatctacctcctgttaggcctgagtatctacactcaggcataatacaaaacaatagtagtccctattctagcccagttgtattggtgggggaaaaagatggcagctggaggctttgtgtggattatagggagttgaataaggctacaatgaagaatagattcccaatccctcttgtggatgatcttctagatgcgttgcatggttccaagtggttctctaagatctggctacaatcaggtgagggtgttgccactgatccagcaaaagttgaagcagttaaagatgtggcaaagccccttaatgacatgcttaagaaggataacttctgctggactcaagaagctaagttagccttccagaaattgaaggatctattagtctcaacacatgtccttgctctacctaattttgataaggaatttgtagtagaagcagatgcctcaagtacaggtattggagctgtcttgatgcaggacaatcatcccatagccttcatcagtaggagcttgaatgtgcagcaatggtccttatccacttatgagaaggggttgctagctgttggtcaagaaaatttggtggttgatgcattgtcgcgaggaagtttagttgagtgtaatgttgtttttgtggttcaacttgaatcagatatgctcactagaattaaagcttcttggaaatctgatctagatgttcaaaagctaatttctgagttgcaaagtgattccaactcccataaacacttctcctggtggttacattcttcagcttgtggaggccactctagtagagatgcaaccttgaaaagggtcaaggcagttgtcttttggaaaggaatatccatggatgttaagttgttcattcatcagtgcattacttgtcaaaggtgcaaatatgactctgctgcatatcctggactgctgcaacctttacctatacctgagcatgtatggcaacacattacaatggatttcattgaggtacttcctgacttaaggggtaaacaagttatttttgtggtggtggatagacttagtaaggttgtacacttcatggctctccatcatccttattctgttgctgatgtagttcaatgtttcatggacaatgtctttaaactgcatgggtttcctgactctattacaagtgaccgggatcctatctttgttagtcggttttggcaagagtttatggcttaccaaggcatgcaagtccagctgtctactgcctatcacccacaaacagataggcagtctgaagtggttaataggtgcttggaaacttacttgagatgtatgtgttatgacaatcctaaacaatggtctaagtggcttcccttagctgagtggtggtacaacacagcctaccacagttcaattaaagccaacccctatgaaatagtgtatggacaagctccacctgcctaccttccctatctgcctggtgaatctaaggttgaattggttgatagaagtttggctcaagataggatgaaacaactagcatataagcatagatctgaccggaagttgcagattggagatttggtttatgtaaagctacatccctatagacaggtctctatagctttcagaagcaatgctaaattgacccctaaatactatggtccttatcctgttttggatcagattggtgtagtggcttacaaagttcaactttcgcctaattctttgatccacaatgtgttccatatctcccaactcaagaagtttataggggagacatcaacatttgttaattgtccaaatactgatgaagaaatcagtcacaaggagcctgaggttatactcgataggatgacagtaaaaagaggcaccaaggcggtgacaaaaggtactcatcaagtggaaacatcagcttccagaggatgccacatggaaattttactatga

SEQ ID NO: 18811 - DNA, 345 bp, Glycine max
  Clone ID: PAT_MRT3847_116991C.1
ccggggcgcctccaatccacttcctcactgtgactagaacttatcacatttattcagcaagacaaacaccagcacccggggctactacacaaggggagcggggaacattaaattcacagcatgtactatcaacaaaaatgcatgctgaatcaatgcaagagtacactgaagcgaaacaacataagcccatcaaaccatccactaaaggcgaaaccacagatcgtgtagccacttccttgaccagaacgtgtgggataggaactgatcttgcatgggtacagcgcacccgcatttggtgtcaactcagaacaaatcaacacccgccttcaggggtctcagcaagag

SEQ ID NO: 18812 - DNA, 1531 bp, Glycine max
  Clone ID: PAT_MRT3847_116992C.1
ttttttttttttttttttgagcaaaagaagatcttcttgatcattaataagagaacttttatttaaagctaattaacttagctcgtaaatggtacatgcagacttcaagaatgcagataaattaaagttctatacctgcctcttctaaaacaattattgaagtttcatttggactcgtggcccttatttcacaccaaattatgcttctgctaaaaattaattgaaattaatcgagtatttgggctgcttagttataggagaaaagagcccccaaaatttttcaaactctggctgcttctgattttcatcaaacatggcaaacacataagtttcaaggggtgcaccaggccttttaggggttccttgcttcacattccgaaccaagtttgtgttgtaagttcttgcattatcaagtgaagttgcagttccaccagaagaaggccatccactctcagacacaactatgttcaatgaccctcctcctgctttctccaatgcagcataaacagcatcaaccgaagcatcaaagaggttacggtaaccaagtgaaccatcttgcactaccaccgaaggagacctaaaaagtgcatagtcaagactaatgtccttagggtttgcagtgtaagcgaagtaagagtacacattaaccattaatggggcattattgttcactagaaatctgatgacaccatcaagatatgctcctctataatcagatttgaaggaaccctttgatggtgggaatgattctgccaaggcaccagtatcaatggcagtggaaacttttacttggtttccaaggccagcattagaaatggccctctgaatgttttccaatgcaggcactagaaattgtgcaaatgagtgttcgggtttcacttcatttcccactgaaacgtatctgaatctgacattgttggcatagtttttgatgttgtcttgcacccatttgtttgcattgtcttggctagatgctaggtttctgaggttgtcatttggaatgtctagcaaaagctcaatgttggaacctcttagtgcttcgaggacttctgggcttggaccgtagattcgcatcctgcgaatgttggcttgattgtagagggccacaacttcttgaggggttggtaagttgttgccaagtcttccataacataccccggattgtgcatctgcatcatcatcagatggaacaaaattacacttgtttgtgaattgattgtactactaatttgctagctacttgattcacaatatagatgacttggtctagcgatgagtacataacttgcttcattttctaacaattgaaatacaatgaatattatactatcataatcaatgattttattttatttcatggttttggttttggaatataattttatagtctttgataacatcagcttttatatataaactgattcttatttaactttattttttcgttttagttcttaaaaattataaaattcgtgtacttttaaatgtaaagattaaaaacttatgaaatttatacagaaaactaaaaatt

SEQ ID NO: 18813 - DNA, 227 bp, Glycine max
  Clone ID: PAT_MRT3847_116993C.1
gcacagtggattacggaaacaggaaatgcagagggcaagatctgaaggatcacaaaaaaagggcgcaccagcttccattttgcccccaagcatcttttaataagtgggcagtatgggaatggcgggtgcacaaaaggatctcaaaatagaggaaacctcaacccttgaatatggcacatcattgaaaagacttggatcatcacccatgtgtgccgtgagaagacact

SEQ ID NO: 18814 - DNA, 385 bp, Glycine max
  Clone ID: PAT_MRT3847_116994C.1
cagctctgcatctttccaactctgcatattttcgctgcaaacccaagattctgtgttgcttgtgctctctctttgaatgcaaaagccaaaaggtaaaccaaaaagctaaaactagaacatagaaaccattttctactgtttgaaaaggttgctctgctctgctctgtttgtcatcgaagagagcgaggaataagaagacatagagaaaaaaaatgaagtacgtgctggtgactggtggagttgttagtggccttggcaaaggtgttactgccagcagtattggtttgcttctcaaagcttgtggacttagagtcactgccattaaaattgatccttacttaaacacagatgcgggaacaatgtccccctttgagcatggagaagt

SEQ ID NO: 18815 - DNA, 406 bp, Glycine max
  Clone ID: PAT_MRT3847_116995C.1
cctttagcagttaggggctggggtgcggtttccattttcgcaccacaccctggggaccggttgtctgataagaaccagctgcaccctgtcaaggggcggaatgcacgccgctttgtctctgaatagagctgcagcggcagcgtaagctccggcgaccgcttccgggtactcttcgctgccggcaagttcagagcctgccactccaaccactggccgccttgcacttttcgcgccatgttcatgtctccgtctcgtatacgccgagtgcgatttgcattaggaaaaaggaggcagaggaaacgcctacgaaagcctttagatcgcgaagctcggtatacatcaggagattgtctccactctgggcattaaaggcatcaccaagctcttccccattcaaatggctgtg

SEQ ID NO: 18816 - DNA, 827 bp, Glycine max
  Clone ID: PAT_MRT3847_116996C.1
aatattaagtccattacccattagttgatgtttcgaaattttaccagcacatgacattcttgattttatctaaacaaaatatttttaaaattatgtaacattaattgtgccagaacttaaaaaatctgtccaaattgaacaggctaaaaatgttttttttttttttttaccacagcagtgaaatttgatgttgatacacattataacattaattaatagtttatgatgtgtccatatccacatttacactttatgacctacaaacaaacatcctgaaaatgaacagggcttgtgttgtggcatgccccgagggagagaagaatttaaggtaatgcataattctgcattctgctcgaggcagtggaggacgacatttagactttggaagcaacgtgcgtacccaaaaaaaaaacaaaaaaaaaccaaaagacaaaaaagcaaatgctatttgtcctccattctaagggaatttagccttctgatcctctgatcaagctccttcatcacttcaggttcttgcttctttctttgctttgatatggtatttgttgtcatggaacctatcttgtcaaatgccactgtcaatagatcgtctggatcaaataggtgatgggtggtcatctgcagaatattgattacttcgccaacatgatgggttgctcctacttcattttccttcatcttaacttccgttaagttgatgttgtatataacctcatggacctcatcttatcaaatatcccatacaatagatcatctcgctcaagcaggctatgagtagtaatccgaaggatattgattacttcgccagggagacatcaaattcc

SEQ ID NO: 18817 - DNA, 178 bp, Glycine max
  Clone ID: PAT_MRT3847_116997C.1
cggagaattattccccaccatgcctgatgaatgggtcaacaatggcaatgcaccggcactggccgagactattaagaattacagcaagctgctgtctcagggcttcaacattatatacttgccacgaagaacactggacatacaacgccggagcagaaacaaactaaaagatggcggg

SEQ ID NO: 18818 - DNA, 642 bp, Glycine max
  Clone ID: PAT_MRT3847_116998C.1
gaattacacctcgttacccggggatcctctagagtcgacctgcagctgaaaaataatgagcagccttctcttcctgcaatccacatagtgggcacatcgagtcatttaccatcacttgccgtcttctaaggttcatccttgttggtagtctattcatgattagcctccatgcaaacatagccactttacttgagatttttagcttccataggtccgtgaaatcagagtcatggtctgcccccgttagctctctccttattaggtcatacccactttttgttgagtagctcccgctttgatcatgcttccatatccaggtatcttccctatgaggctgaacttgctgctttgaaatatccccaataaaaatgtccgccatttctacttcggagtcaaatagatccctcctccaagtgagcttccattcccatccactcttgttgatgcaccccatttgcataatgcgcgtgttttgttggcttgatatgaggtacaaccttggaaatttctccattagtggcataccattatcagtccaaggatcctcccagaatctaaacttttcacctccacccaccttccaagcggtttcccgtttgattactaggttctgctgctgctgatgaagtgaaaccagatcct

SEQ ID NO: 18819 - DNA, 377 bp, Glycine max
  Clone ID: PAT_MRT3847_116999C.1
ccggacgaacagaggcagagaaggggacatttttaggagacatacctccgcgcttaacacccgagaagagaaaagggacacaggtactagccagagacacgaagggaacggagacagaagaggaacttgacaagtctaaaaggaaaaaacatccccaggcagagagcggactgcagcccaaccacgaagaaagcacgaaagggaaatctcaccagggagaccggaaaagacgacagagactggacagaggcagaaaaaaggaacgggagaaagggagagacaggacaaagaagagagagacgggaaggaacaagccaagggaccgaacccgggagagggaaccaaaaccacatgcaacaaggacagaaacccagaga

SEQ ID NO: 18820 - DNA, 548 bp, Glycine max
  Clone ID: PAT_MRT3847_11699C.1
tggttgccattgtgccttgtgacttcaatctcatcactggtttgtataatttcccctctccaatcacacaattgaaatatgcacttgagttgacagcactcatttttagaccttatgcacaataagtataaacatactcatgctttagactcatggataaataaaaataattcatttcacattaattaaaaaaaatagttcatattatttaattttactaatctcaagtgataaataaaattatttctaaaatatcgttaattgaaacttgttattatggataaaaaaaaagtcattgaaaatagaactaattaaataaagaatgttttaagaataataacattaaatataataaaattaattaaatttgtttatatttaacttcaacgtataagataacctttttaattatatatgagcccataggaaaaaggtttattgaataagtaattaaaatagaaatattatgtataagttattttaaatgaatgtaggttgacccatgtgattaaaaattgagaatgaactccaccctttcttaaatatgg

SEQ ID NO: 18821 - DNA, 119 bp, Glycine max
  Clone ID: PAT_MRT3847_1169C.1
acacaagataacaaccgcacacatcatacgaaccggctgcggggcctgatgagccggcggtctctcatgagtgacctagctctcactaaccgctttgcactgagtgaacactttccatt

SEQ ID NO: 18822 - DNA, 1163 bp, Glycine max
  Clone ID: PAT_MRT3847_116C.1
gcgacccacgcgtccggggaacctgaaaatatagagatcctaggatgatcttctgtgtagatactggagaattttttatgattgaagttctttttgattctgaaggccctaaagttaatctgtctgagtgtctctataaaggtctaccctgtaaagcacttttgtgggttgaaagtggatatctagctgcccttgtggaaatgggggatggtatggtcctgaaattggaagatggaaggctgtgctatataaaccctattcaaaacattgcaccaatcttggatatggaagttgtagattatcatgatgagaagcaagatcaaatgtttgcttgctgtggtgtggcaccagaggggtcattaaggattattcgaaatggtattaatgtggaaaatctacataggactgcttctatatatcaaggggtaactggtacttggacggtccgaatgagagttacggattcacaccattcttttctggttctatcatttgttgaggaaaccagaatattgtcagttggcttaagttttactgatgtgactgattcagttggtttccaacctaatgtctgtactttggcatgcggccttgtgactgatggtttgcttgtccagatccacaaatctactgttaagctttgtttgcccactaaggctgctcattctgaaggtatccctttgtcctctcctatttgcacatcttggtctccagacaatgtgagtattagtttgggggcagttgggcataatttcatagttgtgtcaacctctaacccatgctttctgtttatccttggggttagattgctatcagcttatcaatatgaaatttatgaaatgcaacatttggtactgcagaatgagttatcatgcatttccatccctggacaagaaattgagcaaaaacaatcaaattcatccatttcagctaataatagtagcatctcttcttttcaaattcaaagtggagtggacatcaataaaacctttgttattggcacacataggccttctgtggaaattcggtattttgcaccaggtggaggaattacagtagttgcttgtgggacaatttcattaacgaatacagcagggactgccatatgcggttgtgtaccccaagacgtgcggcttgtatttgctggtcagctttattcctct

SEQ ID NO: 18823 - DNA, 185 bp, Glycine max
  Clone ID: PAT_MRT3847_117000C.1
acggctgcgagaagacgacagaaggggccacttggtattaaaactttttggatttagttcggcataggaagttagtccaggcttgagatttggagagtgattttccaaccttttaccaagcaaagtgaatgccacaatttttttcaccttaacacatggttgattcggctcaaatatagagaaat

SEQ ID NO: 18824 - DNA, 359 bp, Glycine max
  Clone ID: PAT_MRT3847_117001C.1
cccacgcgttcgctttctacttcaaccgcacttctgctccgcaattatcaggggcaagggcaagatcgggatcaacggattttgaagaattggccgtttggtaaccaaagtggctctgcagagagacgatattggacttgttgccgttaaccaccttttcatcagcatcgtttacatgacatacatgtttaaatacgacagtgttcatggtcactggaagcattacgatgtcaccggtaaggacgagaagacccttctttatcgtgacaagccaattactatcattggtcacagaaaccctgaagagatcccattggggtgaactggagctgacattattgttcagtccaccagagttt

SEQ ID NO: 18825 - DNA, 662 bp, Glycine max
  Clone ID: PAT_MRT3847_117002C.1
cggctggcgtgctcggaacgcggtgacatggtgcagagataggacaggtgtgttcattgatcggcattggccgatggtgtgcaggggttgctccagattggggagcttgctgaggctgtcagtgattttctggaaggactctgctctgaggggttttcagtccttcattaggtttggtccagtgatgcttctgcttataatgtggagctgctttcttagtctgacttcgatgtattgtttggtttacgtgcttgttagcatgggtgttgctggagtagctgtccaatacttgggttatactcctgggcttttttttgtgggactttttgccatccttattttgtggatgtatgcaaacttctggataaccggaacattactcatagttggaggttatttattctccctaaatcatgcacgcttggtggtattagtcggaactatatatgctatatactgtgttcaagtacgagtgggatggcttggtgtttttcttgctataaaccttgcattcctctctaatgacattttgaattttctgctccaatggtttgataacgtgagtgaaagtttgcattctgaagatcagaagcaatcagaaacagctatggaagatgacttctctgaagagtgtgaatatcctatccctactaatgaatctg

SEQ ID NO: 18826 - DNA, 250 bp, Glycine max
  Clone ID: PAT_MRT3847_117003C.1
acaaaatcaaccatttccttttacacaaggtttttgttgtcccgctcatatcaggttttgttttgtccaaaattttacataatactaacaggtttttgcccaaatttttttatttgacccacgggggtaacaggttgccggcttaccaaaattttgattgaagccgggcaaacatgggggggtttgttgggtccaaaacccttaaaaggcaagcaggcctttggaaattaaggaaaaaaaaacagggttt

SEQ ID NO: 18827 - DNA, 450 bp, Glycine max
  unsure (1)..(450): unsure at all n locations
  Clone ID: PAT_MRT3847_117004C.1
ggttctctgtttgggcaaaccaaacttcatggcattggagtttgcgtattgacaatccaaagcagtctacagcgttcgatattaacgggggaatatgacacgaataacgagattgctggtgacagtctcatgccaggttactgtgttgcacaggctactgacagagcttctgaaaatgcgggatcctatgcacgacctggaatttgtgttctctaaggctgggtcgggcgctgaagacaataaaggaaatcaggcacgaccctgcagaggagtacgcgaggtctatatgaaaatctccacacctcttaaaatcgtcggaatgacgtgtgaagtgtgcgtccttgctgatgacaccaattcggcagcaaaaacggngggaaacggtgtcgctctgtgcttggagacagaggacatggatggggcagtagctacgcagcgagcgctggtgca

SEQ ID NO: 18828 - DNA, 389 bp, Glycine max
  Clone ID: PAT_MRT3847_117005C.1
ggcaatgtgaaaaagtccttagatggttattgaatggagctgcattttgggtcctgtaagccatcaaaagaaacaggatctttgtgtaacctgacaaaaaccttgaatgcaacccagtataacctgattgtgaggaaggcttactgtaatagggaagtttgaattctgatgatggtcattgtaacacctaaacatctgtattactaagatctatccacttagtgactacacctgatactgtactggcaaagatattgattaatgataaacaattatctgcattcacctttaagaatattctcaaataataactgaaatttctttcataatacatcaaacatacttaaatcttatcttgtatctaattatattaatataattttaaataa

SEQ ID NO: 18829 - DNA, 490 bp, Glycine max
  Clone ID: PAT_MRT3847_117006C.1
aattcggctcgagctcccacaatgggatagtcatcttggtcgtaggatctatggaactatcataagattgcctacaccagattatcatttgaaaaaatgttctttcctgttatgtagatccagttcagccccctccccgaacacacatttctctctcctttccatctatttttttctcctcaaatcgtcaagcttctttggtgccatcttcctctaccaacaactacaccaaaacccactcacacaaaccaaatccaaagtcgacccactctcacccacgatgcctccctctcccatgttgtcataaacgccagctagtctagaatgcctattgatcatgggtaactacaactttgacctcatctacaaggctcacctttccatcggtgcccctcgttggtgtcaagaagctctccatggaccccccccatagcttcccgaagttcacagaggagatggaaatatcccaagcaagctccaccacaccaag

SEQ ID NO: 18830 - DNA, 253 bp, Glycine max
  Clone ID: PAT_MRT3847_117007C.1
ttttctttttttttttttttttttttttttttttttttttttttttttttttgtttttttggggagaagttaaatggttctaggtgttttccatgttattctttacagggccccaccaaggaacaaaaggtccccttgatttcgaaaggttcaaattgactagacttgcctcatcgtaaaaaacttttcaaacatgccatatttctatcgacgggcctctaaattagcaagctcctagacccacccaggttcc

SEQ ID NO: 18831 - DNA, 242 bp, Glycine max
  Clone ID: PAT_MRT3847_117008C.1
aattctattcacgcatccaccccgcaaggccgttgccatgatatctgccacctgagtgtcttcgctcacaaacactcgctgtcttctacagcgtgccgcttccgtacggcctttacctattctctcgacgtcacggcgatcacatagcaccttctctcaagcccaagcttcgcagagacttcacggcacccaacgacaaacagacgcgcaattttctaacagccagctgaagcatcatggct

SEQ ID NO: 18832 - DNA, 1139 bp, Glycine max
  unsure (1)..(1139): unsure at all n locations
  Clone ID: PAT_MRT3847_117009C.1
tacggctgcgagaagacgacagaagggtacggctgcgagaagacgacagaaggcggcccgggaggggcgaaggaggcacaccttgcaggagcagtcatggtctctcagaaaggagcagcagggagaactaggtttttagggtttacaccgagcagccacacctcccgcagcagccatggttctcaaaactgaactatgccgattcagtggtgccaagatctacccaggaaagggcatcagatttgttcgtggtgattctcaggttttcctgtttgcaaactcaaaatgtaagaggtatttccacaatcgcctgaagccttcaaagctcacctggactgcaatgtacagaaagcaacacaaaaaggacattgctcaagaagctgtgaggaagaggagacgtgctgccaaaaagccttactctaggtccattgttggtgcgactttggaagtaatccagaaaaagagagctgagaagccagaagttcgagatgcagctagggaagctgctcttcgtgaaattaaggagaggatcaagaaaacaaaggatgagaagaaggctaagaaagcagaagttgcttccaagtcgcaaaaagcaggagggaaaggcaatgtttctaagggtgctatgcccaaaggtcccaaacttggcggtggaggcgggaaacgctgagcttttagttttgttcctaattttggctacaatttaaatagttgttttgacactgctgtactgatatttcatttggaagattaatcttttattttactgttttactaaacctgtgtttggatattcagaaggtacttggttattgaatggatttcgcaatctgtgctagttttatattctttacgccaatcatcctttacgttgtctattagtattggttcatgtttgattgtgattttgactaacagaagagatgatgatgctcaatcctgccttggttcatattttgcatttgttttgttgttcatttgaagcattagctcaactgattttgtttccaaatatgattagtaatttgatagagcaaaattcttccttttagaatctgttcttcaaaaaaaannaaaaaaaaaaaaaaaaaaaaaagcggccgtctagaggatccaatttacatacgcgtggaagggtt

SEQ ID NO: 18833 - DNA, 1403 bp, Glycine max
  Clone ID: PAT_MRT3847_11700C.1
tacggctgcgagaagacgacagaaggggaacacaacctggggtgttaaatagaaaagaggagtttgagaatggcaacgatcagcgcggttcaggtggagttcctggagtttccagcggtggttacttcaccagcctccggcaagacctatttcctcggcggcgcaggttcttattcatggctgcaagctttgggtttgactttgcaacttctacatttttgaccacccaacttcttcccctatattattttctctctccactttatgcctctgcttcatcatctcaatggtcatgggtgtaaagacaaacaagttggtaagattgaacgcaaaggaagagagcaaaaacccaagttggtatctctcagtggtggaggaagttttccacgggtgaaggtagccaaaggaagccaccgatacggcgcagcagacacccaccatcgagaaatacgccggaaacatcttgctttgcaggttcccaaactgatgccgcggcagatttttaaacatgatgatgccgccgatgaatgttacccacagagcggcgccgaaggcggtggagaagcaaaggaggtgagcgagtttgaggtaagtggaaagcgtggttaattttgaccccagtgtcgccggtgagaatacacactccggatggatatagtaaatccacggccagtggtaaacaggctaagccaatgaaggggagatgcttaaagttcacaggcataggagtatacttggaggataaggcggtgccatcactcgccgctaagtggaagggtaaaacttcagaggagttagttcacaccctccacttctacagggatatcatttcagggccgtttgaaaagctaattagagggtcgaagattctgccattggctggcgctgaatactcaaagaaggtgatggaaaactgcgtggcacacatgaagtctgttgggacttacggtgatgctgaagccgcagccattgaaaagtttgctgaagccttcaagaatgtgaattttgcacctggtgcctctgttttctacagacaatcacctgatggaatcttggggcttagtttctctgaagatgcaacaataccagaaaaggaggctgcagtgatagagacaatgctagagaacaaggctgtatcagcggcggtcttggagaccatgattggtgaacatgctgtttcccctgacttaaaacgcagtttggcttctcgattgcctgcggtattgagccacggcattatagtctgagaaatgagaaggatcaactttacctttttcaaatattcttgtttttctcctttctttcttgtcgcttgtcatgtatttctactgttttattaaataataaaattgagttctgttagagttgggaaaaaaaaaaaatcgagactagttctctctctc

SEQ ID NO: 18834 - DNA, 331 bp, Glycine max
  Clone ID: PAT_MRT3847_117010C.1
tcggttcttcccacgcctcctgtatttctcacgaagcccatcacgctatgcaggcccaagagaaacatttgtgggagggaaatttatcctgcgacatcaaacctcgctgtagattggaacaagatacctctacttatgcacaatttgctagtgcaaaaacctcctaatctgatctaatggttgctggtgcacattcttaacaagattctcctgagaaagaacatcatgaataacccctacaagattgatgccagatggacactatagatggatcctctatacaatcgcgttcaggctcagatgccaacaaaattagtcaaaactgcctctt

SEQ ID NO: 18835 - DNA, 261 bp, Glycine max
  Clone ID: PAT_MRT3847_117011C.1
ctcttcttctcttgcggtctggtttagcgagttcttatagatttaaggaagatgggtactgataaggttcacatcagtattgtggtcattgtgtatatcgactctggtatatcgactattaatggacacatgatttacaagcttgtaagaattgacaagcgtgatattgacatgttagatatggaagttgctgtgatgaataggaggtatttaaagtatgcatgagtgctggataaactttaggttgaacgttaaagaggt

SEQ ID NO: 18836 - DNA, 368 bp, Glycine max
  Clone ID: PAT_MRT3847_117012C.1
tccaaggaaggtttcccgtcatcactgtatgacgtcctccttctttgggggggggggggggacaacgagaatgaaagtagagacaagcgggtggggtgcggtcacgtaacaaagctataagcggtaatacgtgggttataacgagcaaaaacaaattaccagtaacccgaaggaatgtatgaactagcatattaaaaagtgaaagtaggcgggggcaagggacaatgacaatgaaagaactgaatagtagtaggataatgtaaataatgccaggaatcaaataaaaggtataatatacgtatgaaggaaaaagacacggcaggcagcagcagtacaaaccgccgtgaccccgccacgtttaaagtata

SEQ ID NO: 18837 - DNA, 339 bp, Glycine max
  Clone ID: PAT_MRT3847_117013C.1
gaccgaggcgtccgcacaactttcctattcatataagtacttgttgtctggcatgttcattattaaagaatttcgtttttttaagctacatttcatcccccattaaactattcacgattttcactcacatataatcacttcgctctatcttctgctctaatgagttttagacctttcaatatatcatcatactattcaagtaaactttcccctaattctttatgacaggattgggaatgactctacttatttaagcttcatttttacacaccacacattaatacatatttttattacctcacatctttcttttctgataccaagtaatgcacaactttt

SEQ ID NO: 18838 - DNA, 266 bp, Glycine max
  Clone ID: PAT_MRT3847_117014C.1
ctttcttttttttttttttttttttttttttttttttttttcatcaacttgttatggaatcacattgatagcctgtaatagaacactaactgggtaagaggcagatgcacctcaagtgcaagtctcttgccttccggcttagacaaaatagccactgctatggcaagaaccagctgggctcgtgggggaacaaagcaactgccctcgtctgattggcgtactccaacggagagctgcgcaccgctaatacgagcaaaaccccccag

SEQ ID NO: 18839 - DNA, 154 bp, Glycine max
  unsure (1)..(154): unsure at all n locations
  Clone ID: PAT_MRT3847_117015C.1
gctcattgagttgttaatcagctttcctttcgaagctatggtaaagtatgctgaaatgatgcccatgctagtatnagtattcatcttgaacattatnataatttatgtatnttttagggcagcagcaattacagtatagtttgtatgcccttgt

SEQ ID NO: 18840 - DNA, 496 bp, Glycine max
  Clone ID: PAT_MRT3847_117016C.1
ggctcgagctctctcctctttcggaggataggaacaggcacaggaccagtgcaccaaatatagggagagagtgaaggaggcagcaggttggtggggttttggtttatttgggtggttctgaattctgatccaatttcacatataaaaatggctggttctcttcaaaaccaacgacaacaacttcttggaattatcaaagaagaagaacaagagaaattgcagaaacagaaagaagagactgaggggaacaacaacaataataacaataacaagagtgacatggctcctacggcagggaattcgatccacaggtcgggttcgaggccgcaacttgatgtgagcaaagctgagattcaagggaatgtggaggagaagtatcccaccattttgttgcctaatcaatctgatgatttgtctcatcttgctcttgacattggaggatctctgataagttggtgtacttttcagacatgaagatcaatcatggatgataaag

SEQ ID NO: 18841 - DNA, 751 bp, Glycine max
  Clone ID: PAT_MRT3847_117017C.1
cggctcgagcggctcgagcggctcgagttctaatagctactgcttcgttagaagtgcaaaaattaaatgtccaacatcttcttgttgatgtttgagattcatgtatccgattctcagtgaaatcttcttttccgggtgtatgatcaattccactgttaggcgcaggacccatttagttcaatccttctcagttgctttcctctattggttgtactacgtttcatgatttctaaaccttccttagtctaataatcatctactactagctattattattattattattattatcatcatcatcatatataataaaatctatctgcaatattatttttctgagtttgtgtctagttagtgtctgggtcctggtcctgccaattgtgtcaattaattgtattgaatcataaaagatggcttcctcaagtggaacatcttcagggtcatctctgcttcagaactctggttctgaggaggatttgcaggcggtgatggatcagagaaagaggaagagaatgatatcaaaccgcgaatctgcacggcgatctcgcatgaggaagcagaagcacttggacgatcttgtttcccaagtggctcagctcagaaaagagaaccaacaaatactcacaagcgtcaacatcaccacgcaacagtacctgagcgttgaggctgagaactcggtgcttagggctcaggtgggtgagcttagtcacaggttagagtctctgaatgaaatcgttgacgtgttgaatgc

SEQ ID NO: 18842 - DNA, 1665 bp, Glycine max
  unsure (1)..(1665): unsure at all n locations
  Clone ID: PAT_MRT3847_117018C.1
ggctcaagcattggctcaaggctcgagctcgagcctccctctttcctatcacactttctagatagctagccaaccagagtaagatctaaagatatttcttatatatcctatggtccgagagtgcccttgttctgcgccaaccctttcttccacatcttgcgtttcaacctcttcctctcttgagtccccttatcatcaaatacccttcttcttcaacctccaccaaattcaacccccacataacaaatctcctcccatcccatttttcagcaccaaagtttgaaacttttctcaattgggttgtagagagtttgactcatcaatttttatttttttatttttattttctctaaccaagtagaagtgcaataattaaatgtccaacatcttcttgttgttgatgtttgagattcatgtatccgattctcagtgaaatcttcttttccgggtgtatgatcaattccactgttaggcgcaggacccatttagttcaatccttctcagttgccttcctctattggttgtactacgtttcatgatttctaacccttccttagcttaataatcatctatctaaaatatcataatatcttctactagctagttttatttttattatcacaataaaatctatctgcaatatattgttatttttattttctgagaaatttgtgtctagttataagtgtctgggtcctggtcctgcctattgtgtcaattaaattgagaagggttgtattgtattgaatcatatatcgtatcatataaacatggcttgttcaagtggaacatcttcagggtcattatctctgcttcagaactctggttctgaggaagatttgcaggcgatgatggaagatcagagaaagaggaagagaatgatatcaaaccgcgaatctgcacgccgatctcgcatgaggaagcagaagcacttggacgatcttgtttcccaagtggctcagctcagaaaagagaaccaacaaatactcacaagcgtcaacatcaccacgcaacagtacttaagcgttgaggctgagaactcggtgcttagggctcaggtgggtgagttgagtcacaggttggagtctctgaacgagatcgttgacgtgttgaatgccaccaccactgtggcgggttttggagcagcagcatcgagcaccttcgttgagccaatgaataataataataatagcttcttcaacttcaacccgttgaatatggggtatctgaaccagcctattatggcttctgcagacatattgcagtattgattgagatgcttcatctctgagatttgatgaggatttcttcttcttcttcttctgggtttgagtctgtcgagaaattgtaatcactaccatatgatggtgataaggaataatattaataatgaatgtgtatcataaaaacgggtgggattgttaatgttaggtgctggttccgtaaatggggcatggggcatgggccattactgtaatttgtcaccctcctttcctatataataataataataataataataatactgacctctctatgttattattctcccaatcaaaaaaaaaaaaaaaaaaaaaaaaaattttgttatttttaatcgaatgatttgttttaaaaacaaaacagaaaaaaaagtncggacaagggctgctgattctacttcag

SEQ ID NO: 18843 - DNA, 409 bp, Glycine max
  Clone ID: PAT_MRT3847_117019C.1
agcaccctctttccctcattgagatttgtgagtaattaagatatgtatatgtctccaggccaagacatgtcatccatgtctaatgacagaaacaacatgtctatgatgatgcacaacagtttctactggggcaaagatgccatagtgcttttccctaggtggcctgagaacaatgttggcatgtacatcttagccctaatttttgtgttcttacttgccatggctgttgaagtgttatctaaccaaccactcctcaagccagggactagtccccttgtgggaggacttattcaagctggtgtacacttatttcgtatcaccttcgtttacatggctatgcttgccgtcatgtgctttaacgccggaatcttcattgctgctggggtggtcacaccttgggattcttcgt

SEQ ID NO: 18844 - DNA, 106 bp, Glycine max
  Clone ID: PAT_MRT3847_11701C.1
gttgggagacggtcaaatgtgttattgctttccgacaaaggaagaataatatcgggccgcaaacacgaccaatgcttaactaaagtaagccctcaattgaaacaat

SEQ ID NO: 18845 - DNA, 527 bp, Glycine max
  unsure (1)..(527): unsure at all n locations
  Clone ID: PAT_MRT3847_117020C.1
taaggcatcgggaatctccctaaaggaaggaagtgttcnctggcaaaggagccagactggcagatgtaggtatatatatatatatatgggtatatatacatatatatatatatcacatcccattagttaaaacgtaattttctctgaagaaaaatcagcatgctacacggacaggcagatatcctcatagctaggttcgctgaccctaactatggtgttaaaacggcaaattttataataaactccccttacctatcgtgagctactccgcggattcctcgtcgcgtcacttgaagattcctttttcgccttgctcgtcgattccatgaaagcctctactatgccaaaacgaaggagactcattatggatttcagaaaacaaagctcgtgacagtgctatgggtcaaacacccacatcactacatgaaagaactgagagcattttgggttttttaaaagaacatcatttggaaaatccgaccacaccatgtgacccgggttcagtggaagttacaaaaatacatgcc

SEQ ID NO: 18846 - DNA, 271 bp, Glycine max
  Clone ID: PAT_MRT3847_117021C.1
ttaagaggacaaccataaacaatatgagcgcgtaagggctcaatcctgggatgtcaggggctcgacatatgggcaccattcctcagtctatgtcacagttcactgtttggaatcaaatgggcgcagagagcacaacattgaatcttgattccagcaagcggagctttcgtgaaatgtctatggaccttctaggggggggaatattagcggcacaggactggcgaatggatcacactcatacagaattgttcaagtactaacttggcgagag

SEQ ID NO: 18847 - DNA, 412 bp, Glycine max
  Clone ID: PAT_MRT3847_117022C.1
atcatagctatctcgatcgaactgtccaaggtcctgtcaccggaaagacaaaacaccacgggcgacaagcctaatcagtactctccggtacgccacggttgccacgggttatccgccggatggtattacttgttcctaacattgagggttgtcctcctcgtacccacacaccaggcatcaggcaccccaacggtagaaacggtatacctagaccacgagatggccaccagaacctcccttagtatgcttctgaacccaaccgaaaatggtacacacggacggtatatttgttatggtgatccagagagtagcgtggcaaacggagaaccgcgaaggacttgccgtcaacagggatgtacaacacaccatataagatgtaatacacgtcgcccaaaatccaccgcctatatag

SEQ ID NO: 18848 - DNA, 552 bp, Glycine max
  Clone ID: PAT_MRT3847_117023C.1
attttgaatggggtaacatggactcttgtttccctcctcattggagcattcctgtggttcgtgaagacattgttgttaaaaatcttggcatcgaatttccacgttaagtctttttttgatcgaattcaagaatctctcttccatcagtacattctgcagaatctctctggacctccacttgtagaagaggctgagaaggttggggcatcatacagtgttggtcgctttagtttcaggagtacagatggtaaaggcggcacaaagaaagagactattgatatcgcaaagcttcaccggatgaaacaagagaaagtttctgcgtggactatgaaggttttagtagatgcaatgacaacttcagggctgtccacaatctctagtgcactagatgaaagtttcgatgaaggagaaaatgaacaaactgataaagagattactaatgagatggaagcaactgctgctgcctattacattttcaggaatgttgctgcccctggttgcacgtacattgatgaggatgaacttcggaggttcatgattaaggaagaagtg

SEQ ID NO: 18849 - DNA, 339 bp, Glycine max
  Clone ID: PAT_MRT3847_117024C.1
aatccttttctaaaaagtttctttttttttttcttcatatttttatcattattttttttatgtattagctttttttttttattttttttgggacccgggggggaaccctggggtacacccggaaattcggaacggggacctgaagggaaaccaactttccttatagagagacgaataaaaactgggggtataaaaggaaaaaacggtacccggagaaaaaaaggaatccgctacaaaattccacacaaaatacaaccgggaaccaaaaagggaaaagccgggggggccaaaagagggaactaactaaaaaatattgggggggcactcaccggcccgttt

SEQ ID NO: 18850 - DNA, 543 bp, Glycine max
  Clone ID: PAT_MRT3847_117025C.1
ggggggggaaacccagaagggggtttgaatccgggggaacaaaaaaaaatgggccccctattttaaagggtttttttttttttttttttggaagggtagaaacccccttaaagggggggaaaaaacattttttggaacaaggaaggaaatttttggaaaaaaaaaaataaaaatttaaaaactaaaaacggaactttttttaggggtgggaagaggggcaaaacacctccccaaaaatcaataccgggaaagttttttttaaaaaaaacaagggcccaaaaaattccctttctaaagggaaacaaatccctggagatcggggcggaccattttaggggatcccaatcccccaaaagggggggtactgcaatttgaacccttaggaaaagggtaaacccgatttttaaacaaaacaaaatttccttttcctgggcttcattttatggcccattgggggaaaagaaacatttggggaacttggtggtgagccattgaaatccaggtgggcttaaaaaaggggttctgacaaaggctttctttttt

SEQ ID NO: 18851 - DNA, 2524 bp, Glycine max
  Clone ID: PAT_MRT3847_117026C.1
ccacgcgtccgggatcctcatcccacagcctcaacccaacacgcaccaaaccaaatcaaagcaagccaattggtctctctcttacaccatgagtgcatcaaccaaagcttggattgtggcatcaagcataggggcagtggaggccttgaaagaccaattaggtgtatgcagatggaactatgctttaaggtcactacaacaacatgcaaagaacaacatcagatcttatagtcaagctaggaaattgtcctctgcatcctctgctgcggtttccaacaaggtcaagagaaccaaagaagagcatatggggaaagtcatcgaattcaattgctggggtcctagtactgcaaagttttaattagttaatatttatcttaggtgttgctacgatgagacggtgaatagagactgcttttttccatattcaatcccaatatcccccattaagcatcattatgtatctcaattccaatgtctagtgcccctttgcaagatatatacttattcgtagtcctttcatctcctcatgttatgtatcttatttcatcccattattatagcaaatatatctcgatcgatttgaagaaaaaaagaggtgtatagtgtattttcccgtccgccttcctcatacaacggtgcgtttaaacttttaaagggtgaacagtgaccgacattgcttcttccctgcgtcgtcgtttttttcttctctcctctttgttagggtttgctcggttccatttttcccaaaccattcggcacaacatcgaaatttccccattgtccgcttccgcaacgaaataactctaccgtgccctacgataaggggtttttccagagcaggagcaatgtcttccccttatctacctgccacaactgagcactttgctctcgcaactgaggccaaagacccatctgaggccatctccattctttatcgggtacttgatgatccttcttcttcaccagatgctttgcgttatgaaagagcaagcaatcacaaacctcactaagcttctcactgatgaaaataggggagaggatctgcgcagccttcttactcagttgaggccattcttctccttgatacctaaggcaaaaactgcaaagattgttaggggaataattgactcagttgctaaaataccagggacatctgatctacaaattgcactctgcaaagaaatggtgctatggactcgtgctgaaaagcgaaacctttctgagacagcgagttgaggcaaggcttgcagcacttctgatggaaagtaaggagtattcagaagctttgactcttctttctggcttggtcaaagaagttaggagattagatgacaagcttcttcttgtagatatagatttgcttgaaagcaagctgcttttctcattaagaaaccttccaaaggcaaaagctgcactcacggctgcaagaacagctgcaaatgctatttatgtgcccccagctcaacaaggtgccatagatctgcagagtggaatacttcatgctgaagagaaggattataaaactgcttatagttatttctttgaagcttttgaatcattcaatgctcttgatgaccccaaggctgtttttagcctgaaatatatgttgctgtgtaagatcatggtgaatcaagctgatgacgtaggaggaattatttcttctaaagcaggcctgcaatatcttggccctgacttggatgctatgaaagctgttgctgatgcacattctaagcggtcccttaagttgtttgaaattgctttgagggactacaaggcacagttggaggaagacccaattgtacacaggcacctttcatccttgtacgatacccttatggagcagaatctttgcagattgatcgagcctttctcaagggttgagattgcacatattgctgaacttattgaacttcccaccgatcatgtggagcggaagttgtctcagatgattttggacaagaagtttgctggaacattggatcaaggtgctggatgccttgtcatattcgacgatcccaagactgatgctatatatcctgctactctagagaccatttccaatgttgggaaagtcgtggacagtctttatgttaggtctgccaagataatggcatgagcactctggttattttactccgatgtcacgttgcttgttgttgctgttgttttcttcttaattgtgactagcttatcatctgtttttatctatttttatttttgttgaactcaattgtggtaaatctcttccggtggcttttaacatttaaatgttttggtggttaatgccacttgtctaaccttggtatcataaaaatacatgtgtgctgcaagattatctggtcttttcattgatccctggtccacttcaggggcctttattatttgtaattacaggcgtgttgatggtttgatctttgaaaaatagtaggaccatgcgtccttattataaggttcaattaattaacttatcaaaattaaggaaattgactaatttagtggagaatattaaataaaaaaaaaaaaa

SEQ ID NO: 18852 - DNA, 1740 bp, Glycine max
  unsure (1)..(1740): unsure at all n locations
  Clone ID: PAT_MRT3847_117027C.1
ccacgcgtccgattttcttctctctcttcattctccaacctctacgttattctcctccatcccgatctctttattgtcttctttctctcttcctggttttcgttggagaatcctgaaaaccgcttgattttaatcaaagggtcatcaggattcgggcacccatatctcgtatcactccttctctcctctgttgtcttagaaagaagaccaagaaaagcatcaatttttgcaagcaatcttcttcttttgccctttctcttgtcttaaacacacacacacaacaacccagctgctgaagctgaagcatcacaactcacacatgattcgagtggccacaaattaagcgtgttggtgttatgagtgagagaatggaatcgagtagcattgagagcagcactgtatcatcgatgactatgatggaagaggatgagcatccccatcagttttcttcaatctcgaagcttcatagcaatggccccaccactaccagtgtccatgaccttcttgaatgccccgtttgcaccaactctatgtaccctcccatccatcagtgccacaacgggcacacactttgttcaacttgcaagacaagggtacacaaccgatgcccaacttgcaggcaggaacttggcgatataaggtgtttggcattagagaagatagcagaatcacttgaactgccttgcagatacatctctcttgggtgtccagagatatttccctattacagcaaactcaaacatgaggctatttgtaacttcagaccatacaactgcccttatgccgggtcagactgctcggtggttggggatattccatgccttgtcgctcatttaagggatgaccacagggttgatatgcattctggatgcacttttaaccatcgctatgtcaagtccaatcccatggaagtagaaaatgctacatggatgctaacggtggttttccacttttttggtcagtatttttgcctccattttgctgccttcgagctgggcatggctccagtttacatggcattcctccgattcatgggtgatgaaagagaggcgcggaactacagctacagcttggaggtgggaggaaatggacgtaaactaacttttgaggggagtccaagaagcattagagatagccataagaaggtaagagacagccatgatggtctcatcatttaccgcaacatggcgcttttcttctcgggtggagacaggaaagagatgaggctacaaataaggcgcggaatttcagctacagcttggagctgggaggaaatggacgtaacctaacttttgaggggagtccaaggagcattagagatagccataagaaggtcagagacagtcatgatggtctcatcatttaccgcaacatggcacttttcttctcaggtggagacaggaaagagttgaagctacgagtaacaggaaggatatggaaagaacagcaaaaccctgaaggtggagtgtgcatacccaacctgtgtagctaggttgattgcatattctcttgaattctatttcttgctgtagataatttgagaagtgttaatctttgaatggtgaatggttatggggatttaacttccaaaaaagaaaaaaaaaactgagttctaaccaagatactttatcagatatttggtctcctacttgtatcatattctaaatcacttgagattctcaaaaatatttaaaggggttgttacttttcagcaaaaaaaggggaactnaattcgttttt

SEQ ID NO: 18853 - DNA, 1540 bp, Glycine max
  Clone ID: PAT_MRT3847_117028C.1
ctttctcttattctccaacatctacgttatctcctccaattccatcccgatctctttattgtcttcttcttctctcttcctggtttttgttggagaatcctgaaagccgtttgattttaatcaaagggtcatcaggattcggacaccaatatctcgaatcactcctctgttgtcttggaagaagaccaagcaaaggaaacgaagaaaaacatcaatttttgcaagcaacaatcttctttcttcttcttctgccccttttcttctcttctcttgtcttaaaacacacacacacacaacatagccacccatctgctgaggctgaagctgaagcgtcacaagtcacatacatatgattcgagtggccacaaattaagagtgagagagaatggaatcgagtagcattgagagcagcactgtgtcatcgatgactatgatggaagaggatgagcatccccatcatcagttttcttcaatctccaagcttcataacagtggccccaccactaccagtgtccatgaccttcttgaatgccccgtttgcaccaactctatgtaccctcctatccatcagtgccacaacggtcacacactttgctcaacttgcaagacaagggtacacaatcgatgcccaacttgccggcaggaactcggtgatataaggtgtttggcattagagaagatagcagaatcacttgaactgccttgcagatacatttctcttgggtgtccagagatatttccctattacagcaaacttaaacatgaggctatttgtaacttcagaccatacaactgcccttatgccgggtcagactgctcggtggttggggatattccatgccttgtcgctcatttaagggatgaccacagggttgatatgcattctggatgcacttttaaccatcgctatgtcaagtccaatcccatggaagtagaaaatgctacatggatgctaacggttttccactgttttggtcagtatttttgcctccattttgaggccttccagcttggcatggctccggtttacatggcgttcctccgattcatgggggatgaaagagaggcgcggaactacagctacagcttggaggtgggaggaaatggacgtaaactaacttttgaggggagtccaagaagcattagagatagccataagaaggtaagagacagccatgatggtctcatcatttaccgcaacatggcgcttttcttctcgggtggagacaggaaagagttgaagctacgagtaacaggaaggatatggaaagaacagcaaaaccctgaaggtggagtgtgcatacccaacctgtgtagctaggttgattgcatattctcttgattgctatttcttgctgtagataatttgagaagtgttaatctttgactggtgaatggttatggggatatttcaacttccaaacaaaataaaaaaactgagttctaaccaaaaaactgtcagatatttggtctcctacgtgtatcatatgctaaatcacttgagattctcaaaaatatttaagggggttgttacttttca

SEQ ID NO: 18854 - DNA, 1295 bp, Glycine max
  Clone ID: PAT_MRT3847_117029C.1
ggctcgaggtgtgggcataaagtcgttgacagtgaaaaacaaactcctctcactcttccttccatctcttcttcaacattccaatccaatccaaaacgctgcgttttattttgtattcaattctatcaatcccaaaattcctcgccggagatagagaatcttaacaattccaccactttccggcgagacatggccgtcgccgtctccgtccccgcccgccagaagccgagctccgacgcgagcctctttacactctgccccttctggagttcgcgcaacgccaatcaaagctcctccaaaacggtgtcttccgtcgccaggtcgctgctccctccccgccgcagactccgcctcgatccttccaattacctctattttccatatgaaccggggaagcaggtaaggagcgcggttcggttgaaaaacactagcaagtctcacgtggctttcaagtttcaaacgacggcaccaaagagttgttacatgcggccaccgggaggtattcttgctccgggggaaagtttgattgcaacggtgtttaagtttgtggagcaacctgaaaacaatgagaagttgtcggatcagaagcacacggtgaagttcaaaatcatgagtctcaaagtgagggaaggagtggactatgtgcctgagctgtttgatgaagctgttgaactagtgacaggggcaaggaatattgagggtaatcttgatagttgtcgctatagatccagaacggcaaagttctgttttggaaaaactgaaaagacaattggctgaagctgatgccgcagttgaagctcggaagaagcctcccgtggaggcaggtcctcgggttgctgccgaagggcttgtaattgatgaatggaaagagagaagggagaacaacaagttcaagcagtagattcagtgtaaaacacaatttgttcttccagctaattcttttcttcagggaaatacaatcattgctatgctactgttgccgtcaaccttgaatgcgcttcaaaagaattgttgggggaattggttggtacccaattggtagtttgagaacgcaatctgatggaaagattcgttgtataatttgtcaaaattcttgttctttggaggaacagtccgatttgtacatagtagagtttgcttgtttgtaaaataaatgcaattcctcactgccttctgtctgtgaaataatcttgaaataacaggttattaatgataaaatcatttttttttgtgcaaatcatatttttttgtgcacccgtgtcattaaaaaaaaaaaaaaaaaactcgagactagt

SEQ ID NO: 18855 - DNA, 438 bp, Glycine max
  unsure (1)..(438): unsure at all n locations
  Clone ID: PAT_MRT3847_11702C.1
aaaaaaaaaaaacaaagaaaaaaaaaaaaaaaaaaagggggggggggggatgaggggggggaggggacacactgagagggcaaaaacaaaaaaaaacaagagaaagggggaaaaaaaaaaaaaaaaaaaaaaaaaaaaaaaaaaaaaaaaaaaaaaaaaaaaaaaaaaaaaaaaaaaaaaaggggtttatcccacaaaacccacannaaatanatatctatataaanccaacctatataatattaacgatataccgggagacaaaaaaaaaacaaaaaaaaaaaaaaaaagcttaatctaagacaagctagataatcttctaccgaacaaaaattcatttaagaaacaaataatattacaaantacatcactctatacttttctattaacaatcaactattcttataatacccttcatctcaaaacccacaacattta

SEQ ID NO: 18856 - DNA, 1315 bp, Glycine max
  Clone ID: PAT_MRT3847_117030C.1
ggctcgagggagcgtgggcataaagtcgttgacagtcgaaaacaaactctcacttcttccttccttgcttccttctcttctgcgttttcttcttcaacattccaatctaatccaaaacgctgcgttttatttcgtattcaatttaattcaatccctaaattcctcgccggagagagcgaatcttaataaccccaccactttccggcgaaacatggccgtcgccgtcgccggccgccagaagccgagctccgacgcgagcctcttcacgctctgccccttctggagctcgcgcaacgctactcaaaggtccaccaaaacggtgtcgtccgtcgccaggtcgctgctccgtccgcgccggaaactccgcctcgatccttccagttacctctattttccatatgaaccgggaaagcaggtgaggagcgcggttcggttgaaaaacacaattcggctcgaggttgctttcaagttccaaacgacggcgccaaagagttgttacatgcggcctccgggtggtactcttgctccgggagaaagtttgattgcaacggtgtttaagtttgtggagcaacctgaaaacaatgagaagttgtcggatcagaagcacaaggtgaagttcaaaatcatgagtctcaaagtgaaggaaggagtggactatgtacctgagctgtttgatgaacaaaaggatctagtgacaatggaacgaatattgagggttgtctttatagatccagaacggcaaaagtctgtaagtcaaacttctaaattgtcctggttcaggtctacggggttagtgtgtgataatgacagagtccggtgattttaggttttggaaaaactggaaaagacaattggctgaagctgatgccgcagttgaagctcggaagaagcctcccgtggaggcaggtcctcgggttgctgccgaagggcttgtaattgatgaatggaaagagagaagggagaagtacttggcccggcaacaagttcaagcagtagattcagtgtaaaacgcaatttgttcttccagctaattcttttcttcagggaaacacaatcaagatatcattgctatgccactgttgccatcaaccttgggtgcgcttcaaaataactgttaggggaattggttggtacccaattggtagtttgagaacgcaatctaatggaaagattcgttgtataatttgtcagaattcttgttctttggaggaacagtccgatttgtgcatagtagagtttgcttgtttgaaaataaatgcaattcctcactgctgctgcttgtgaaataatcttgaaataacaggttattcatgat

SEQ ID NO: 18857 - DNA, 391 bp, Glycine max
  Clone ID: PAT_MRT3847_117031C.1
ctcttttaatcgggcttctccggcggcgcggggagtgctttggcgcgtgattcctagtcccgctacctatgcttgtcgacccgattgagagtacgccggagagacggggaattaccggacgatcgtgattccatcttcatggcttcgctaccgaacgaacctattggcacgcatagaacggtggagctggatcatgggaaagacctttcttaccctaccctaccctaatttaccctaattacgaatggaagaaacccaatcgggtcgagatgcttcttataacgagacgaacgacgccgactactcccagatgtgaccttaacgcgttcggcacagaagagctcacgactcagaatgctcgctcggagctcgaacaatcagagctaagaac

SEQ ID NO: 18858 - DNA, 286 bp, Glycine max
  Clone ID: PAT_MRT3847_117032C.1
gcttcgaacctttgggctgatttatgtgcttgcatggtcgtgagaagatgatagaaggggcacgctaacagaattagtactatctcatcttacatgaagaaaaaaaaaaaaaaaaaaaaaagtaaatttctcatatcacttaactcaattcaattccttaccttacgttacactccactcacagcacaattcaaaccaaacctaaccgatcgtttcccataatataatgatcggatcaattacatttccattcaatccaacccaaccgtaccatactttacccctc

SEQ ID NO: 18859 - DNA, 418 bp, Glycine max
  Clone ID: PAT_MRT3847_117033C.1
ccacgcgtccgaaaagatgtggcaggttttttttaggtttcatgttattttttatcaattaaattatataattattttatttttatacattatgtttaaaacgttgaattttaatatttggtgtttcaaaaagtttcattttgttttttttacattttccattaagaacattgaacttccttggtgttttaaatttaaaaataattaatttaaaataattgacaattaaaaatcaccaatatttttattttaaaaaaacaaatcaccataatacctaacatttcttattactttttccttccctaaacactaaccaccactatctccatcaccctcaaaaatcaaagccaccatcatcttcattaaacaccaccaaagagcaaatttcttgtgtgttgctaatgtttggaattaggac

SEQ ID NO: 18860 - DNA, 468 bp, Glycine max
  Clone ID: PAT_MRT3847_117034C.1
tgcgactagacgaagacgacaggcgggcataccgatgcttatagaccatttatggcgctctaaaaaatgggtatggagagcaactatgatctaatacgcgatttctccgttgctctagttgaagaacgcggtagtacgaagtttggatcctgtctgctgactatatgtgatatacgtagatctttgttcgatgattactgacacattgcatctagcacacatgaataggttgttctttccctctatcaagatggtttaacatagaccgatccagctgtacaatactctttaatacataaacactgttgattcacttgagagctatacactgtatatcacacaccgaccttggtttcaagacctttatgtcaagaaccactaacaattaatttctcccaaataaactttgtagtggatgcgtatctggcattaagttacgtggataaatatgaagcatgactagctgtt

SEQ ID NO: 18861 - DNA, 253 bp, Glycine max
  Clone ID: PAT_MRT3847_117035C.1
atttcctgtcgacccactcttcggcaagggattcaactatacccaattaactttcattttatatctccttgttgacttcgggctcggtatccctaggttggttctacattcacctattatttaccaattaagataacacattatcctttcaccattccacctactcttccataatcagttactctaacttttctctacacttttttcaccgtttttttaccctcacttcaaaaacatactgtcacatcttttc

SEQ ID NO: 18862 - DNA, 335 bp, Glycine max
  Clone ID: PAT_MRT3847_117036C.1
ggctcgagcgcaaccccaggtactctttgtttatccaggcttcgcaacctaacagaacgagcgggaccttcgtcaatacggcttgaacaataaaacaatagcgaaatacgatgctctaggtgaagcctgggcctgtagaatcgcgccggttctgctgaccaagttggcatgaattccccctatggcgagagggtcgacccctaactagttcaaggcaacaaagctcgatcaattgaaaagtgtcgtggcgcacttctcaaaatcaggtgaatgttcaaatagacatgctaaacagcgtcggtttgtctctctcatgagaaacattacaagacggt

SEQ ID NO: 18863 - DNA, 331 bp, Glycine max
  Clone ID: PAT_MRT3847_117037C.1
cctcacatcaatggaattcatacggagagagcattatccatactactcccagatagtggaccaacatccatacttttatgccagatacctcatgctccatgatatggacacattcgtgttcataataaatggctcctcactctctaatgtggcatactagaaataacatggatatggggtggagaaattggactttaccttgtatgatgagtggattaaaatggcaagtgcctgctctgcgctagactcgttagaatactacattcaggcgtctattggcttaaagatatatgcatggtcatgtagacctatgtaccatcacgccgtatca

SEQ ID NO: 18864 - DNA, 284 bp, Glycine max
  Clone ID: PAT_MRT3847_117038C.1
caacagctttcatgggatgatgattagcagggttttcgatgattacacaggcatgttgcggctggtccacttttggcttggggatgctgcaacatacgcggcaggaggtcatggtatgggtttgggcaactccacctgcgagccagttccatggtcgttcggtcatatcatgggtgacctttttacccacggatattgccaatgaaagcatcgctctcgcgaatttaatccatgcatccgtgtccttggcaccatgacagtgtccataatcataattatggtgt

SEQ ID NO: 18865 - DNA, 391 bp, Glycine max
  Clone ID: PAT_MRT3847_117039C.1
ctatgacgtctcatgcagcctactataagctgggcgtcctgctcgagttgagagaaagatgggcagacaggaacctgaaactatgaacatttgcatcttgaaattcttgattgacggtcacatgatgcctaccgaggccatggaccccaaaatacccacaacggtactgaaggtgactgttattactacagtactttaacatgacagtgatctacagcgccattggagcatatacatctaacggacacgaccttcacgttcaagccctagggaatacttttacttaggctgggacacatgatggctgtgattattccgacactgcacattttctgaaattgttgaatatccaagagcctggctactgtataactccacattcttgtgaacc

SEQ ID NO: 18866 - DNA, 482 bp, Glycine max
  Clone ID: PAT_MRT3847_11703C.1
tttggccatacacccctttactacaacgaaatcccattctctctctcttagatttttcttctcacaaacgatttctcatttttgttcgggttcagatgctctgctggaaactgattttggtcccatcttcatattcaagggtttggcaaggctgtcaatagtcaaggtaaagtatggcagattctttgatatccagaagtaaaagtgatgtaacggcaatgaaggagacacttcttacgcagcagcaacttctggaaaagctatatgctgagttggatgaggaaagagaagcttcagcgaccgcaacgagtgaagcattggacatgatactgcgtttgcagggagagattgccgtggtgaagatggaggcaagacactacaagagggtggcagaggagaagataggccatgctgaggcctctcttgaggcttttgaggaactaatgtatcagaaggaaatgcaaattgcctctctcgagttc

SEQ ID NO: 18867 - DNA, 296 bp, Glycine max
  Clone ID: PAT_MRT3847_117040C.1
cacatcatctcactcgttagcttggtccgatgatggctgctgacatgagggctggacgctatttaaacttcaccctgacgacctgtctgacgagctggatctagctcattgcaccgcatagagtgatgagcaagaaggcttcgttgcgctacagatgtgtaagtagcagagggcagagagatagcatcagagcttgtggaaccactggggcgcctgaccaggtgatctgccaggtgaccatacaggatgtatgggagaataaagacacggtgcaacttatgaccctgtacatatgc

SEQ ID NO: 18868 - DNA, 262 bp, Glycine max
  unsure (1)..(262): unsure at all n locations
  Clone ID: PAT_MRT3847_117041C.1
cgtgcaacttctgctanccacactcttctttcttccaaggtccaactcactgctttttcttctacnnagtcatgggcaannggtcaagagtcggagatcaacggatttgtgaagaattgggccgtttggttgccagagttcgctctgcaaangagacgatgtggagctcgttgctcgttaacgacccctttcattactcaccgattacatngacatacantgtttaaatatcgacatgtgtctcacggacacttggaagcat

SEQ ID NO: 18869 - DNA, 169 bp, Glycine max
  Clone ID: PAT_MRT3847_117042C.1
aatcattaccgaagcaagggcgaaccgtaataacatgaccaaagcattagtggccctgaatatcagactaaatgtgttaacccattgaggttcacaccacaaattcaaacgctatgataatgtgggaggggagcacatggactaccataatataaaattgccgagtgtt

SEQ ID NO: 18870 - DNA, 429 bp, Glycine max
  Clone ID: PAT_MRT3847_117043C.1
ggaaaaaacccagcctttgcccttttttagtggggaaccccgttaaaaaaaccattttttcaaacggggtttttggtggaattttaacccaaaaaaatgggctttaggggccccttgccttttttttttttttaaccccccaaaaaaattggccccaaaatttggttacataaacccaaggaagaaatccttttttttgggggaaaaagccccccttttttaaaaaaaaaaccccagggtggaaaaaaaaaaaaaaccccccaaaccggggggggggggggggccttttaaaaggtaaactctcaaccccaaaaattttaaccccaagggcctccccaatttttggggaaaaaatcccccgggttggggacttaaaaccccccaagggttttccctggacaggggcccccttaaaaaataccctttttg

SEQ ID NO: 18871 - DNA, 405 bp, Glycine max
  Clone ID: PAT_MRT3847_117044C.1
aaagggggggaaaaaataaaggttttttattaaaaaaaaaaagggggaacttttttagaaaggggggtcccaggccagggaaaaacagggggaaccctttataacaaactatttattctttatgggggggaaataggggggaaattgggtaaaaaaaagggcctttggtggtaaaaaacaaagggggctcggggggttattcccataatgggggagacccttgggggaaagccgacccgattttggacccgattatccggggcgggggcgcatttggggcccccgttgattttgtgggggaagacaccggaaccaggacccccccccgggggggtggcagcactagagggggtccatcggccccgggggcggacccgtgggcggacccttgggcggaccctgggg

SEQ ID NO: 18872 - DNA, 747 bp, Glycine max
  Clone ID: PAT_MRT3847_117045C.1
aatacaggtcctctcggatgcttgcctcagaatattgccaaatttggaactgattcatcaaagcttgacgaactagggtgtgttagttcacacaaccaagctgctaaaacctttaacctacagctacatgctctctgtactaaattgcagggccaatatccagattcaaatgtcacatacgttgatatcttcactataaaatcaaacctcatttcaaacttttctagatacgggtttgaacaacctattatggcttgttgtggatacggaggtccaccactaaactatgacagtcgagtttcctgtggggaaaccaagacctttaacgggaccacaattacagcaaaagcttgtaatgataccagtgagtacataagttgggatgggattcattacactgagactgcaaatcaatatgtagcatcacaaattctcactggaaagtactcggaccctcctttctcagacaaaatgccattcctacttaagctcaagttctaaataccccattatatttattgttactattatttgattctttatggtatcgtgaaagctatagctgattgtaactttgaatgacagtcaagctcttactaatgaatatgttttaaagattggtcccattgacatggtaacatggtctgtgtgataatgttcaaggattggtaattgaacacattcagacttcatggttcatttgtatgctatatactatataaaagggccttttgggatacataaaaa

SEQ ID NO: 18873 - DNA, 691 bp, Glycine max
  Clone ID: PAT_MRT3847_117046C.1
catgggaagccaagtaacccatggaaaccttcggaggggggtagttccccatccagacacatcgagttccaaccaatatcatggtaatactggtaatcccctcaatacagaaagatttcatgtttatcttcggaagtcactgatcttctttgtccagttgacggctaagttcccattggtcattatattccttttaattgtcttatatgcaataccagcaagtgcagccattttggccctgtatgtacttgttacaattctgtttgccctcccatcatttctcattttgtacttctcatatcctagtttggattggcttgtgagggaaattatcacttaagattgtgaactagtgtaggctccaactttgcaaacattaagacaacagcttatatcttctactttgtaattatccgacttctcctttagaagctgtcatttatcttcccatatagggtcgttatcaatatatgtatacttgagtcttgattgtagctcaggtcgaacttggctagttggtggatgaaatgtcagtttttggcattagcttcgatgtcaatcagggtagtgggatagggtaatgataaatgcttgtgccctttcctggtggcaagaatttgtttgattaatgccatgttttattccaaaaaaaaaaaaaaaaaaaaaaacaaaaagcggccgctttagagga

SEQ ID NO: 18874 - DNA, 264 bp, Glycine max
  Clone ID: PAT_MRT3847_117047C.1
ttacgtttatctccttgcaacatactactaagcttgaaagacataaacatagtgggctgaattagatatgaccaacagctttagttacctatttgaatcttagttggaagacaaggttttgttcatcatggataaacactttcttggatctaagcaataatccttgcagagttcatgaataagctgtacctgtggtaaaaaagcacagctattttattggagaaagcccatattaaacgtcaaaaaatagattcttattgactt

SEQ ID NO: 18875 - DNA, 536 bp, Glycine max
  Clone ID: PAT_MRT3847_117048C.1
agaaattacaccaaaacgattttactattggaggccgaaagataaaagtttttttacaacaaaactattgttcgacacatgcactaatattgaaatccgttgccgggaaaacaattcaaaactgttttcgtagatgctatcaggccttaactactgcctcatgttacctatatcaatcgcactcttgtgaaaaatggctgaatgtaacatggatcaagcgcaaatgcctattttttggaccctccatgaactttttccatgttgtacaccgaaccttcaatgatgtagaaaatgcagtgatgctctctgacctacgcttgaagggaaagaataactattagaataaccaaactgtactgaaagtttagagctcatctggagaaacagaatgcttccgctgagccattactttcacagccattgtggttgtccgagtgactgcgaatgagagccttatacatttaagcaccctgcctacatgagaacgcctgcccaggatctttggcgggcctgacttgaaaatccgggaaaatagt

SEQ ID NO: 18876 - DNA, 643 bp, Glycine max
  Clone ID: PAT_MRT3847_117049C.1
gcgcccttttttttttttttttttttttttttttttttttttttttttttttttttttttttttttttttttttttttggggaccccacccaaaccttaaaacctttatattataaaaaaacttgggagagaggcacatcaacccccccaaaaaatcactaccaacacctttaaaggttaattccctaactacaaggattatttttaggggcaagcccgggaattttaacttaaattggggggaacattaattaagcggggggaatttcagcaaattcaacagcagctaggacaagctcaggaagaacgtttcctacaaaaaccaaaggatggggaaggcccaaggatctcaaagccaaaggggggggtttttgccctgaaaaaaaaattggtccaaaggggggacccatccttggggcaccataaattttaagaacttccatcccaggaacaattatgccagggacaacctccctaggggggttcacaaggggatcctctgccttggtcaaggaaaggggttttatccctgggacactatcaatcaacccaagggttttgagcctcttcaccccaggggggccaaaggggccattatgggcacaaaaactcaccaccaccttaacctccatcaaattggggg

SEQ ID NO: 18877 - DNA, 158 bp, Glycine max
  unsure (1)..(158): unsure at all n locations
  Clone ID: PAT_MRT3847_11704C.1
ntcgctgcacncgtngtaactcgnaattcggctcgagnaacatnnctcanaacnccaccacnntgcagtnatannnncantataacaangncganntcgccgtatncccnacatcncancnntaacnattctccacacaactacgncnttcncagnnc

SEQ ID NO: 18878 - DNA, 2065 bp, Glycine max
  Clone ID: PAT_MRT3847_117050C.1
ccacgcgtccgtaatctctctcgcgctaatcttctccctattcaatctggttcagacctactcctgctgacatttcatctacaagtgtcgttcaaaaacccattagttaattggaaaggtagctcattcccacattgttttgtgggggaaaacccacaatacaaaatgggaaggcactcttgctgttacaaacagaaacgtaggaagggtctttggtcaccagaagaagatgaaaaacttctgaggcatattacgaagtacggtcatggatgttggagctcagttcctaagcaagcaggtttgcagaggtgcggcaagagctgcaggcttaggtggatcaattacttaaggcctgatttgaagagaggtacattctcacaagaggaggaaactctcatcattgaacttcatgcagtgctagggaacagatggtctcaaattgcagctcaattgccagggaggaccgacaatgaaataaagaatctgtggaattcttgcctaaagaagaaactgaggcaaagaggaatagaccctgtgacacataagccactgtcagaggttgagaatggggaagaggacaaaacaagaagccaagagttatccaatgaattgaacctcctgaattcagagagcttcaagtcagatgaagggtcctatgagcagagagcatcatcatcaattgcccccaaagcctatgagatggaaggctcttgcagctccaagattaacaccaccaaaaatgacaccaacttgatgtccaattgttccaacaaagacatgttcttagacagctacaccactagttgccaaccctcagatttgatgggaaattaccctcttcaaatcactgacactctcccaaccaattcaaactcttgccattggttcagccaaactgcaagaccctttgatatgaactctgagtttacaatcacttccaatgttatgtccattcttccacctacaacaacctcatttctcccaagcacttctttttgctacaagccatcacttggtgtcccttcagaagatatttcaacagcatcttttgctttgaatggtcccaattactgggaagccagtgcctccaacaacagcaatggaagcaacaacacaagtgatggcagcagagagttgacaactacaagtagcaagaacagtgtactctcttcttggggattgacagaagaaacaaagtggtctgagtacctccaaaacccaatgctaatgctggcagctcctgaatcattgtgcaaccaaattaggccagccacacatttggtacctgataacactttagggtcaataatagtgcctgattccaaggaccaacaacaacaacaacaatctcaaaattctagcatcttctccaaggacacgcagaagctaacagcagcctttggacatatatagcaccaggctttgacacaatgaaatactattttagaagggctccaagggatttatttgtgttcttagtacaggtgtgtgaaacaacagattaattttgctcttgtatatagataaggtctgtaaaaaaaaaaaaaacattttggtaatacatttgtgagccaaatcatttgttttttttaccttctcgggtgtgggtggaatagaattgcagaataaggattgctctgctttgttctttctactctttcttttcatttccttgctacactgttgactgcattgcaacggtgcattcattaacttccaatacttttacaccatccacagatgtttattagcacacgggaagtatcacttttagttactttgaccacacactatttaccgaatctctttcatccgttatgatcttctattcttctctcaccgcactatcttttagagtactcaaaatggcatcaaacttgtgcagccaaaactttaccctatccaatatcctaagggttgcccatcattttcttgacacaagaatgatttattctattttatttatttcacttccataaataatagcctaagtttcaagactttcccatctaagcaagttttaattttacttgcacaaggaggtgacttggtgttgttatctctc

SEQ ID NO: 18879 - DNA, 368 bp, Glycine max
  Clone ID: PAT_MRT3847_117051C.1
ggaaaaaaaatcgatccggggggaaactaaaattaattaactcaggcctgctcaaagcccgggaagctttccctcacgttgttttatacataagctaacatgcccttccccgggcttgggttccccctagcagaaaaccgcttccccctttttttttcccaaggaaaaccaagcgggcctaaggcaaccttaatttccttttattaggaaccccaattttccccaattggtcctaatttaatagccgaaaaatgccccccccccccgggttgattttactttttacaaaacaaatgggggggacatttgggttagctcctgtttcgcaaaacccacctttgggtttccccattccttggccttttttt

SEQ ID NO: 18880 - DNA, 212 bp, Glycine max
  Clone ID: PAT_MRT3847_117052C.1
gccatacattagggtgagtcttcgtgcctttctgcaactctaaatccggtcgtgggggttttcaaaggtctcgttgctactttccagcggacctcatctgtcattcgccaaagcaccccagctttagttgagtgagccagcgcccattatcagttacaggccttctttagacaagactctggctagcaataccatgatgcgtcgcacaactt

SEQ ID NO: 18881 - DNA, 449 bp, Glycine max
  unsure (1)..(449): unsure at all n locations
  Clone ID: PAT_MRT3847_117053C.1
acgagccaacaccaacctcataaagcttgcccaaaaaattcatcagaaatatattatatagtgtgaacccatataattaaatatatatagtgtattagcttgtgagaaaaattaaaagtcccgtgagtattgttattttgctttctttttaattgcagcgatgtgtggaagacaggaagagatcgagagtgttgttattaatttgtagatgtttgtgataccattaccatgtccagctttggtatagctgataggcttgtgggttttccattttgttatttttcttcttggttaattgattttatctctgtgtgattgttttgtgactgaaggtgcgcatggagggaggagcaggctgggggtggggatagaaaagaaggagagaggtaccacatgtaaatntttcaaagaaaaaagaaaaattgtaagttggtattatgggggagatt

SEQ ID NO: 18882 - DNA, 374 bp, Glycine max
  Clone ID: PAT_MRT3847_117054C.1
gaaagatttgttagagggaaatttgtccttgggtgtgaaatctcgctctagatgggaaaaagtttcctctacaaaagcacaatttgtcaggggaaaaacccgcaaatacgatataattggtgctggttcacattcttcaggagattttcctgcaaaggaagatcaagaaaaacccaaaaagattgataccggattgagacatagaatagatcctcaatacaatgaggttctcgctgcagatggtaacaaattattttaaatggactgctgatgatggtgaaactactaaaggttctatgctggatcttaaaatttcttaatctaagattgcactaaccaaggacacagtcggcggaaccattctgcgtaatgtt

SEQ ID NO: 18883 - DNA, 1142 bp, Glycine max
  unsure (1)..(1142): unsure at all n locations
  Clone ID: PAT_MRT3847_117055C.1
ctttaaaaatgattcataaaacttaatcancaaactaaatagaatttgtttttcaatcaggaattaaatgtaattgtttatccactggtaagttttcaatatttgcgagaaaaaaaaaatcattagttgagagcacgatggtgtttggatcacataataatatctccagatgcatgcattggaataatagttccatattatttcattatcctatatccattttcttcattgttgatcatttcgtgtgcagcagcagctgaagcaacacatgcacatagacccaaatggtgatgatataggaagctatagcactgagcgtgaaagagcccaattggattggaactggttggaacgttggatgtcatcacaatcacccaacttaagaccacgtgagaccctttataggactcttgctactgctacttccaccactgatgacatgtctgaagaaaagacagttgaaatggacatgggtgcaactctggactcaactcatgctaatatgggcttcatgaatggagaatcttttgacacaagcccaatttctaataggtaccaccagcgccaccacagtgcaggtgtacctagctacatggccccaacccagtctgcaaaggccaaggttaggagtcaagggcctcaaggcccgtttaagcaacgtggttcacctgggcctcactggaactcatccaccaggagaagttctgctattgggctaggctgtgactcatctagctccggtgggcccacttcagcccatgtctccccgagaagcccaaacccaaaaattaatgagattcgtctccaatctagacggatttcaggtggcagcccagataatgttcacattgaggattgggcccttccccttggagccaccaatggctggccttgacttgattaatttatggttggcctttgacttcattaattaatttatttttctatatatcataatcataataatagcatgcgtttgtatggtctgaacttcggtcgttgacatgcaatggttcttaatataatatgtcgtggtgtcaactgtcgagtcatgaacaacaatatctgagattgtatacccctttcctccttaaacacaccgaaagaagtgagatcgtaatgtctatgaacccattttatgt

SEQ ID NO: 18884 - DNA, 2601 bp, Glycine max
  Clone ID: PAT_MRT3847_117056C.1
cgttccagattctcagattgtcttcatgattgcaattttataataagataaaataaataaataaacatattggcctctttagactataacaccatatgttcataaattcatattatctttttatttgggtttctcaattgctcctaacttacctccaatcttaattctttggaagcttcaaacttaaaagtcttgtttgttatctttttcttcccttgtctacatctatatttattagaatttattggttgtgcatatcaattccaaagtaccctattgttcattttttttttttctgatttattgctattccaccaatctgaccttcctaaggaaaccaattttttaatatattaaggagacatcaagagattgtcttgccctttggtttgctttaatcaaacgctcaaccacttggtcaaaagccttatctgagtttccttctgtgtctctaggagcatcaaccttatctgtctcaagttgcatcagcaaagtcatcttagaaggttcaacaagattttatcagtgagcacttgttttactatttctcaagactgaaattttgtatgagctgagtgaataaaaggagaactatgtcattggttatatctacagagttggctgatacatcatatgggaatgccaagctctacacactaaagggaactgatgttacaccagatttgtcctcccacaattttgcaccagataagcacagaaacatgtacatgacaaagtcatactcctgtgagagttatgaaaagtacttccacgattcaccaacagaagagctgatagaaccatcaagttccagcatatcaggaaactcagttcaccctgatggtgcttcttcttacctgctcagagctagttcaggagcttctgtgattgttaataacccatttgacacttctatctggtctacaaggcatcgcgatgcctatcagtccaattctgtatcagatttcgtggaaaatgggagcccggatggccttgacttcgatggtgaaatgagactaaaacttcaagaattggagagggctttgctttctgatgaagaagaggaggagcaaggcatatttgagactgttcaaagcatggagattgatcctgacatggtcgagtgggccaatccgcttcaagatatgctgctccatgactcaccaaaggagtcctcatcctcagattcttccaatcttagcagcatcagtagcaccaccaaagacacatcacaaaactcaccccaaacccctaagcaactgctttatgattgtgctaggatactttcagaaggaaatgaacaggaagccacatctatgataaacaagctccggcaaatggtctcaattcagggtgatccttctcagagaattgcagcttacatggtggaaggacttgcagctcgtgtcgctacatccggaaaatgcatctatcaagcattgagatgcaaggaacctccttctaacgatcgcttagcagcaatgcaaatactatttgaggtctgcccgtgttttaaatttggatacatcgcggcaaatggtgcaatagctgaggctgttagagatgaaaagaaggttcacataatagactttgacatcagccaaggaactcaatacataactctaatacaaacacttgcttcaatgccaggtaggccacctcatgtgagattaaccggggtggatgatcctgagtctgtgcagcgttccattggtggcataaacatcataggacaaagacttgactcgagccgctcgagccgattcggctcgagtgagtttcgagcagtggcgtcagggacctcaaatgtcacacaatcaatgcttgactgtcgtccgggggaagcacttgtggtgaactttgcattccagcttcaccacatgcgcgatgaaactgtatcgacagtgaacgagcgagaccaacttcttcgcatggttaagagcttgaatccaaaacttgtgacagttgtggagcaggacatgaacaccaacacctccccttttctcccaagatttgttgaagcctacaattactactctgctgtgtttaacacacttgatgcaactctccctagggagagccaggacaggatgaatgtcgaaaggcaatgcctggcaaaggacatagtcaacattgttgcttgcgagggtgaggaaagaatagaacggtatgaagtcgccggaaaatggagggcaaggttgtcaatggctggcttcactccatccccaatgagcacaaatgtgagagaagcaattaggaaactcattattaagcaatactgtgacaaattcaagataaaggaggaaatggggggtcttcattttgggtgggaagacaaaaacttaattgttgcttcagcatggaagtgaccaatacaaattcttttgttgcatgagactcattgtagtgttgatgtagtatttgtttgcttgtttagtttgtatctgttatgtttatgcttggttcagactcagatgtatactaacgtgcaacttatgctaatacatactttcatgtgtatggcaacacaaaacagctatcaatgcttaggcttgtaatgacatcattttcttgttagttagcatataattttgcgtttcc

SEQ ID NO: 18885 - DNA, 571 bp, Glycine max
  unsure (1)..(571): unsure at all n locations
  Clone ID: PAT_MRT3847_117057C.1
acgagagcaagctcatcctagagttttaaaaatggcagcagactcctccatggctctctcttccccatccttggctggcaaggccgcgaagctggtcccatcagcccccgaagtcgggagggtcagcatgaggaataccgtcaccaagcaggcctcctccggaagcccatggtacggcccagaccgtgtcaagtacttgggcccattctctggcgagcccccgtcctacctcactgacgagttcccaggtgactacggctgggacactgctgggctttcggccgacccagaaaccttcgccagaaaccgtgagctcgaagcgatccactccaggtgggccatgctcggggccttgcgctgcgtgttccccgaactattgtaccgcaacggggtcaagtttggagaagctgtgtggatcaaggccggctcccagatcttcagcgagggtgggctggactacttgggcaactcaagccttgtgcacgcncagagcatcctcgccatgtgcgccacccaagatatcctaatgagtgctgttgagggatatcagattgatgcaggcactctcggg

SEQ ID NO: 18886 - DNA, 583 bp, Glycine max
  Clone ID: PAT_MRT3847_117058C.1
gtcgacccacgcgtccgaaacactcataacacaaagcacaaagcaaagctcatccttgagttaaaaaatggcagcagcttcttccatggctctctcatccccatccttggctggcaaggccgtgaagctgggcccatcagccccagaagtgggaagggtgagcatgaggaagaccgtcaccaagcaggtctcctcaggaagcccatggtacggcccagaccgagtcaagtacttgggcccattctctggcgagcccccgtcctacctaaccggtgagttcccaggcgactacggctgggacactggtgggctttccgcacacccaaaaacctttgccaagaaccgtgaactcgaagtgatccagtccatgtgggccatgctctgagccttgggctgcgtcttcccggagttgctgtcccgcaacggggtgaagttcggagaagccgagtgggtcaagggccggttccaaatcttcagcgagggtgggctctactacttgagcaacccaagcctgattcacgctcagagcatcctctgcatctgggccacacagtgtatcctaatgggtgcctgtgatgtatac

SEQ ID NO: 18887 - DNA, 218 bp, Glycine max
  Clone ID: PAT_MRT3847_117059C.1
acggctcgagggacaacatggctggaggatcacttggagacaacattggatggttttaagatgctatttacagggtgtgtggtttggcctgcatagctaacaatcacaagccaacagataagctctactttgacgacaaggaccagatgacttcagaaacagaccaggctttgagcttcccgagatcttgggatcccgcttaatggtgagcctacaaa

SEQ ID NO: 18888 - DNA, 1399 bp, Glycine max
  Clone ID: PAT_MRT3847_11705C.1
gtgaaatcacaaaagcaaaattggcttttgaggggatgactgagagggaaacagcttcgtggaatgctttgataaatggttttgcagttaatggctgtgcgaaggaagcgttggaggtgtttgcgaggatgattgaggaagggtttggaccaaatgaggtgactatgattggcgtgttatctgcttgcaaccattgtggtctggtagaggaaggaagaagatggttcaatgcaatggagagatttggaattgcgcctcaggttgagcattatggttgcatggttgaccttcttggaagggctggatgcttggatgaggctgaaaatttgattcagaccatgccttatgatgctaatgggataatattgagttcttttctgtttgcttgtggttactttaatgatgttttgcgggcagagagagtgctgaaagaggtggtgaaaatggatgaagacgttgcaggaaactatgtgatgttgagaaatctgtatgcgaccaggcaaaggtggacagatgtggaagatgttaaacaaatgatgaagaaaagaggaacaagtaaagaagttgcttgcagtgttattgagattggtggaagttttatagagtttgcggctggggattacttgcattcacatctggaggttattcagttaaccttggggcagttaagtaagcacatgaaagttgaaataatctaataatctattgacaatggaaacacaagaaagctgaaaggagagatcaaaagtagttgaatgaaaattggataagccacaggctcacagcacatgtgtatttcagtgccctaatgccccttccaaaatttgaagtccattcagaatcaggctcctaactccagtaaacggtagggagattggaacacaactttattagaaggcaactttaaaacttaaaacatgtaactggaattggcgcccaaaattatgcgtaaattgtgggtcttctatcctagaattatggctcttccctaaggttttaaacaatgatttgcaactgcaatgtcaagatttgtggggtttctatgactgcatcgtggccacatcaatcgcatttgcttgtacttttgcgatatcaaggattgcaaccaagttgcaactacgacaatttaaaaccgtccccttcgctatgtgcaatgttgcatctgcacctcaccagcgtgaagcctttctacatatatgttaaagttctctcattctagttcccatgattactccactcagcttttttgcactgcgaaggaaattttgccgagaaatagcacgacatatcaattgtgggatgctatttaatttgtgaattgtgatcagtgaccagatatgacctttcacatggtttatttgtgagggatgaatggtttgattaattatattctgcaggg

SEQ ID NO: 18889 - DNA, 244 bp, Glycine max
  Clone ID: PAT_MRT3847_117060C.1
atgtcacatgcttttttgctctttatggactaactcgtgcatgggcgtgatttctgaaagaagaatctcgatcactatctgttagcaaaaattattgtatggcctcggaccactacatatccataatgacaacctattattatataataacatagttggaatatcaacactggttgatctatagagacacagactatataatacttccccatctgaatctatctgaatacactcatacacatgc

SEQ ID NO: 18890 - DNA, 469 bp, Glycine max
  Clone ID: PAT_MRT3847_117061C.1
cggagccttgggctgcgtcttcccgtagttgctgtcccgcaactggttgaagttctgataagccgtgtggttcaaggccggctcccagatcttcagcgagggtgggctcgactacttgggcaacccaagactgatccacgcccaaagcatcctcgccatctggggcacacaagttatcctaatgggtgccgctgaatgttaccgtattgctggtggccccctcggtgaggtcactgacccaatctacccacgtggcagcttcgacccattgggccttgctgatgacccagaggcttttgctgagcttaatgtgaaggaactcaagaacggacgattggacatgttctctatgtttggcttctttgatcacgccattgtcaccggtaaaggtccattggacaacctctccgatcaccttgctgaccctgtcaacaacaacgcctgatcctatgacaccaacttcatcccc

SEQ ID NO: 18891 - DNA, 532 bp, Glycine max
  Clone ID: PAT_MRT3847_117062C.1
ctacggctgggacactgctgggctttccgcagacccagaaaccttcgccaagaaccgtgaactctaagtgatccactccaggtgggccatgctcggagccttgggctgcgtctacccggagttgctgtcccgcaacggggtgaagttctgagaatccgtgtggttcaaggccgggtcccagatcttcagcgagggtgggctcgactacttgggcaacccaaccctgatccacgcccacagcatcctcaccatctgggccacacaagttatcctaatgggtgccgttgaaggttaccgcattgctggtggccccctcggtgatgtcactgacccaatctacccatgtggcagcttctacccattgggccttgctgatgacccagaggctgttgctgagcataatgtgaaggtactcaagatcggacgattggccatgttctctatgtgtggctgatttgatcacgctattggcaccggacagggatcattggagaaccttgccattcacctgtctgaccctgtcaacaacgac

SEQ ID NO: 18892 - DNA, 143 bp, Glycine max
  unsure (1)..(143): unsure at all n locations
  Clone ID: PAT_MRT3847_117063C.1
gtgcttgtttactaaaacaggatgttaatgcntagctagtacaatagagagcttgtgcggaattttaaaatgttaantgttacntcaagcattttnctcgtacaatgagancgaaagctccaaaaaananaaaaanggggggg

SEQ ID NO: 18893 - DNA, 607 bp, Glycine max
  Clone ID: PAT_MRT3847_117064C.1
ggcagcaacctcctccatggctctctcttccccatccttggctggcaaggccgagaagctgggcccatcagcccccaaagtccggagggtcagcatgaggaagaccgtcaccaaacacgcctccttcggaagcccatggtacggcccagaccgcgtcaagtacttgggcccattctctggcgagcccccgtcctacctcactggcgagttcccaggtgactacagctgggacactgctgggctttcggccgacccagaaaccttcgccagaaaccgtgagctcgaagtgatccactccaggtgggccatgctcggggccttgcgctgcgtcttccccgaactgttgtcccgcaacggggtcaagtttggagaagctgtgtggttcaaggccgggtcccagatcttcagcgagggtgggctggactacttgggcaacccaagccttgtacacgcccagagcatcctcatcatctgggccacccatggtatcctaatgggtgctgatgcaggttatcgtattgctagtggtcccatcgagaggtcactgacccaattctccctgctggcagctatgagcatagggctcgttgatgaccaggatgtattt

SEQ ID NO: 18894 - DNA, 520 bp, Glycine max
  Clone ID: PAT_MRT3847_117065C.1
ggcagcagcctcctccatggctctctcttccccatccttggctggcaaagccgtgaagctgggcccatcagcccccgaagtcgggagggtcatcatgaggaagaccgtcaccaagcaggcctcctccggaagcccatggtacggcccataccgcgtcaagtacttgggcccattctctggcgagcccccgtcctacctcactggcgagttcccaggtgactactgctgggacactgctgggctttcggccgacccagaaaccttcgccagaaaccgtgagctcgaagtgatccactccaggtgggccatgctcggggccttgagctgcgtcttccccgaactgttgtcccgcaacggagtcaagcttggaaaagctgtgtggttcaatagccgagtcctatatcttcagcgagggtgggctgtactacctgggcaacccaatccgtgtgtcacaccagagcaatctcgcatctgagccatcctaattattcttattgagtctaatgtaggtcttcgtatt

SEQ ID NO: 18895 - DNA, 572 bp, Glycine max
  unsure (1)..(572): unsure at all n locations
  Clone ID: PAT_MRT3847_117066C.1
cacaaggcagaaagcaagctcatcctagagttttaaaaatggcagcagcctcctccatggctctctcttccccatccttggctggcaaggccgtgaagctgggcccatcagcccccgaagtcgggagggtcagcatgaggaagaccgtcaccaagcaggcctcctccggaagcccatggtacggcccagaccgcgtcaagtacttgggcccattctctggcgagcccccgtcctacctcactggcgagttcccaggtgactacggctgggacactgctgggctttcggccgacccagaaaccttcgccagaaaccgtgagctcgaagtgatccactccaggtgggccatgctcggggccttgggctgcgtcttccccgaactattgtcccgcaacggggtcaagtttggagacggcttgtggttcaaggccgcgtcccacatcttcaacgagggtgggctggaactacttggcaaccccagcnttgtccacgcgcagatcatccctcgccatctggccacccaagttatccctatgggtgctgttgaagttcatcgtattgttgttggcccc

SEQ ID NO: 18896 - DNA, 302 bp, Glycine max
  unsure (1)..(302): unsure at all n locations
  Clone ID: PAT_MRT3847_117067C.1
gtccgaanggtggcgagaggacgacggagggggactacgtaaatggtttaaaataagcggcttttctattagatccaagccttgatccgcgtgtatgctacatcataacgcggcaaggggtgggcggtcgctcaaaaggatcgacgctctattttatcctgtctgcaccgggaaaaccctgccataacgccacttaaactcatttcagcggaggtcgctttcgccagttgggatggggacaaccatgccgttacccatgttactccccctgaattacatcgccctttctgcaactgggatac

SEQ ID NO: 18897 - DNA, 601 bp, Glycine max
  Clone ID: PAT_MRT3847_117068C.1
ggcagcagcctcctccatggctctctcttacccatccttggctggcaaggccgagaagctgggcccatgagtccccgaagtcgggagggtcaccatgaggaagaccgacaccaagcatgcctgctccggaagcccatggtacggcccacaccgcgtcaagtacttgagcccattctatggcgagcccccgtcctacctcactggcgagttcccaggagactacggctggaacactgatgggctttcggacgacccataaaccttcaccagaaaccgtgagctggaagtgatccactccacgtgggccatgctcagggccttgggctgcgtattccccgaactattgtcccgcaacggggtcaagtttggagaagctgtgtggttcagagccagttcccacatcttcagcgagggtgtgctggactactagagcaacccaagccttgagcacccacagagcatgcaatccatctgggccaaccaagtgatcctcatgggtgctgctgagaggtatcgtattgcttgtgtgcccctcggagaggtaacgtgacctatctatccctgcggctagctagacccattggaccttgctgattaccca

SEQ ID NO: 18898 - DNA, 968 bp, Glycine max
  Clone ID: PAT_MRT3847_117069C.1
tacggctgcgagaagacgacagaaggggaagccaaatacacatacacattagcttcaatctgagagagaaacaaaaacaatgaaggtttccattgccaagtttcactcccttcccctatgttttctccttctcttggccatcaacacacagccactgctagcagctgaaccagagccagtggtagataagcaagggaaccctttggtgccaggagtagggtactatgtgtggccactttgggctgataatggaggcctcacactaggccaaacaaggaacaaaacatgccctcttgatgttatccgtgacccttcattcatagggtccccagtgaggttccatgcatcaggccttaatcacattccaacactcactgatctcaccattgatttccctgtggtgacagtgtgcaaccagccaacagtgtggaggctgagcaaggaaggatcagggttctggtttgtgagcactaggggtaaccctcaggacctcattaccaagttcaagattgagaggcttgaaggggatcatgcctatgagatctacagcttcaagttctgccctagtgtgcctggtgtgctatgtgctcctgtggggacttttgtggatgctgatggaaccaaagtcatggctgtgggtgataacattgacccttactatgtgaggttccagaaagtctccacctttggtcaagacaagaaacaaccttttagcatagtgtagtttggtttggttttgtgcctagtgtagcaggtagaggggtcatgactcggaataattaataagccagaagagtaccatgcatgctctcttttttggtgtggctgtgagaaagaatcatgagaacttttgttttcttggttcacatgcatggcacagaacagagagtcattgtatctgttttaggatttgccaatctgttttcttttaaaaatgagatgaaatgaattttggttcttttgcttcc

SEQ ID NO: 18899 - DNA, 217 bp, Glycine max
  Clone ID: PAT_MRT3847_11706C.1
ccctggggatatgatcgtgttcaagaacaacgcatgtttcccccacaacgttgtgctcgacgaggacgagattactagcggcgtggatgcaacgaaaatctccatgagcgaagaagaccttctcaatgcggttggtgagacttacagcgatactgtggatgccaagagaacctactagctgtactgatcagctcaccaaggagctgatatggttgga

SEQ ID NO: 18900 - DNA, 393 bp, Glycine max
  Clone ID: PAT_MRT3847_117070C.1
agggtttggagctggtggtggagatggaataggaggaggaggatttggcggtggtggaggaggtggatttggtggaggtggtggctttggagctagtggtggttttggtggtggcggtggtgctggatttggtggcggagttggtggtggccactaggttgaatgttgatatgaatatggtatccacgagtcattatattcaaattgttttacttccatctgtttctgttaaaaagacagttaattaatggtataatattatttctgttaagttatagtggctgctaggtcttcttgttggaattaattatgcatgggaaacaaagctttgtaacctgtaatgtctctctcactattaattgttgccaataatatagtagtattgtttttttt

SEQ ID NO: 18901 - DNA, 541 bp, Glycine max
  Clone ID: PAT_MRT3847_117071C.1
ggctcgagaaacactcataacacaaagcacatagcaaagctcatcctagagttaaaaaatggcagcaggtccttccatggctctctcatccccatccttggctggcaaggccgagaagctgggcccatcagccccagaagtgggaagggtgagcatgaggaagaccgtcaccaagcaggtctcctcatgaagcccatggtacagcccataccgagtcaagtacttgggcccattctctggcgagcccccgctctacctaaccggtgagctaccaggcgactacagctgggacactgctgggcttgtcgtagacccagaaaccttcgccaagaaccgcgaactcgaagcgatccactccaggtgggccatgctcggagccttgggctgcgtctttccggagttgctgtcccgcaacggggtgaaattccgagaagccgcgtggctcatggccgggtcccagatctttaccgagggtgggctcgactacatgggcaacccaagcctgatccacgtcccaagcattcttgccatccggcccaca

SEQ ID NO: 18902 - DNA, 535 bp, Glycine max
  Clone ID: PAT_MRT3847_117072C.1
ccacgcgtccgggcgatcactctatataacggcgccacatgcacgaatccctgctgcctgaaccaatccctggactatatggtcgacacaggtgacaaagctcctctttttgactcagctatatgacgggcggggaaaccacccaacgcaactggggataatgtgtctcctcacactgtgactaccactttgccctttaaattacgcctggtgccaatgtcaatcgagccttgcaaaactccctgaatcccataccaccccaccgatcctgctcaagtctgcgtatccatatttcgcctgcacattcactgagcccttatatgacactcccttttccatagcctgagctcgaccaaatgctcactatatatggttactcgaagaacacacccatcgcctgacaccatggtactgcgagcggacatatttgtttcaagctcaaggaatactgtggcattacttatactgctgccctgcatggggatcgatacggagcctgacactgcattgctcatgcaattgtcgcattatccta

SEQ ID NO: 18903 - DNA, 117 bp, Glycine max
  Clone ID: PAT_MRT3847_117073C.1
gtaagggtccaagagtgcctcttcctccctatgcttatttagtacatgctttagctgaataagcgtagggaggaacaggcactcgtggacccttacgttgagcggttttcaacgcat

SEQ ID NO: 18904 - DNA, 181 bp, Glycine max
  Clone ID: PAT_MRT3847_117074C.1
attcactttctccgagctcgtccttctagccgcaacctcaacctgtttctccgagaggcagggggaagggcggctgtcatggagggagttaagggtgtggagacgaaggatggaggtgtcgcagtagctgctgcgtgtgctggtggggaggagggcggggaggatagagaccacagatttt

SEQ ID NO: 18905 - DNA, 482 bp, Glycine max
  Clone ID: PAT_MRT3847_117075C.1
acacaaccactattttatttaattattatcacgaaatgatacaagggcaagtttgccacatataacgtttccgcgtagggaaaacactgtgatgaccacgcccaagtttctccataacaagaggagagaaaagcacacgaacagggataaccaatcaaacaagttcaaaagccgtaccccgaactaactacctttaataaaccttattattaaactattgccaataaaccttgatgatataatcatcattatattaaggacccccaatcccatacccataatgattggggctttgcacccggacgggtattatgagctgtaggggtcccacccggccctttgttggttccaatgggatgtgagcccaccacttctttcgtgaataggcccgggggggctgcccggttccatggccaggaattgccgacgtttggtgggcccccatgggctgaccatattccccgggggagggaaaagggggg

SEQ ID NO: 18906 - DNA, 250 bp, Glycine max
  Clone ID: PAT_MRT3847_117076C.1
cagaaagaccgatctatgtccactcgattctttccaacacggaccactgttactttactctgcccacgcacaagggcatccggagccccgtactgagacactgttagatgattcacgatttcctacactcaaacctctcgaacgttttcaaggacaagctctgtggcaagatccgagagctgctcaaggtcatgaaggactatgtatgcgtgtcacattgcaagacacactcttgatgcggtaagagcac

SEQ ID NO: 18907 - DNA, 302 bp, Glycine max
  Clone ID: PAT_MRT3847_117077C.1
gagaccaacgacagaaaaaaagggaggttttttgaccacactggaaggcaccctgcgagtgtaaagaggaaagggggggcataacaatattccatagtctctactccatcctcatagtctgccaggatctccaaggaaaatataactataggtgacactactgcctttccacgtactaaagagagaaacacgaataccaccgagggagatgcgactactgcgacggaacatggaaccaagaacactcgaggactcaaaggtgcgacaacaactgcaaggagaatgtaaaaaggctggaactg

SEQ ID NO: 18908 - DNA, 339 bp, Glycine max
  Clone ID: PAT_MRT3847_117078C.1
gaattgcagggccggccacagaccaacgcttacgtttattttaccgctaactatttcattttatttaaagggttgaaaactggttacgggggccggtccttttgataacaacccctttcattatggccaatgccacgcctttttttagccctttggtggattctatcattcctggactccagtttcccatgaaactgatccgataaaattgtaaccacaactgccaaacaaatgatcgggtcgggaaaccaatttaaatttactcagccaaatttctagggtatcttaccgttgaacttttgaagcttgttgttaatgcaacctaggtccttaagatga

SEQ ID NO: 18909 - DNA, 524 bp, Glycine max
  Clone ID: PAT_MRT3847_117079C.1
agaagtttgagactcaatggggtatgggcgtccttatgcatctttctaggccactgacatgagtgcaagaggatcgatgcctgggagaatcattgggagtcgtgacgattctttcgtaaagactgactgtgcaggatggcagatgcatactagggttcccatgattggaggcacacggccatcagcaccatttgcactgctgaggccctgcttgcaaacatggatgccatgtatgctgtgaatcatggacctgaacgtctaagcaacattgcacaccgtattcatagtcttgctagagcattggctattgaaataaatagacttggaactgtggaaattcatgaccttccattatttcacactgtgaacgataagacttcatatgcactcgcagttgctgatgctgctgtctaaagtggaatacattagtgagttgttgatggatacactattactagtgcttaagactaaacaaccacattgctatgttgataatcttttcaaagattttgatgcgggaaagc

SEQ ID NO: 18910 - DNA, 731 bp, Glycine max
  Clone ID: PAT_MRT3847_11707C.1
cagatatatgatatttacccagagaaaatatctccttgttatggttgaatccaattgggccaagttaaggagtctgattctgatattttccaggccccactgattgctttttattttttataggtactttcactctgtccaatctgggaatgtttggtgttgatcgctttgatgctattctgccacctggaactggagcaataatggctgttggagcatcggagcccactgttgtggctacaaaggatggtcgcattggaatgaagaaccaaatgcaggtcaatgttaccgctgatcatcgagtaatctatggtgctgatttggcttcattcttgcaaaccctgacccagattattgaggaccccaaagatcttactttctagtctcattttcctaacagtgaaaatgcgttccttttctgggtatgattcctctcatcatggttgtgggattattaattgttgacaagaagaaatcgaggactcaattgatattcactcgggattttgcgaagaacggaagagttttgaataggaaaagctgagctatagtttcttaaaatgatatttttagtcgaatatgtcatttacatttttctttaatgctgcctgattttttttattttgttttttgggatgttcattattgtctaataatgtccattatttatgtaagcttatttttggattctaaatcttgaaaagtgaaactcaatgaacgttgattctgtt

SEQ ID NO: 18911 - DNA, 469 bp, Glycine max
  Clone ID: PAT_MRT3847_117080C.1
ctcacacatgatggcatgtcctggccagtttttggattcttcaatagtatctgattcacgtcgcaattgttgttctgaatctgctcttggttaatcatttttgggcttgcagctctctattcaggtttttcgccactgtttggtttgctttctctctcccccaattgacccataatctcctttgcttttggatctgccctctttggctcaaattgtgtactgtgagatcagcttgacctcatagtcttcctagggaagcttgtccccacgactttcctgaaaaataatcctggctcatgcagcttttagtatttgctggtccctgaaaaatgagaatcatcttagattcttagtcgtgccattttatagtctcaaagtatattatttagtagtttcttttcataaagggtttatttgtatcaagcttaaagctgtgcaagcttttgcttcagggtgacttagaatatat

SEQ ID NO: 18912 - DNA, 335 bp, Glycine max
  Clone ID: PAT_MRT3847_117081C.1
cccattcgtccgcggacgcgtgggtgcaattctacgggtgtccaccaaccatgatgggctgcatatacaagtagaaacacaatttgaacaatctgagacaatgcatcacttcagaacataaatcataataatcagaagggccaaaaactaagatcaaaataacaacaagagtcctatatcttgagcctccaaaggaaaatatcaagaaagaataaataaaaaatagtcaccaatacacggggaagaaataaaaaaagaactaattaaacaagggaaaaaacatttgaccctctaaacatagtacaaaaatgggttaaaaaactaaggaagacata

SEQ ID NO: 18913 - DNA, 361 bp, Glycine max
  Clone ID: PAT_MRT3847_117082C.1
gttccccacagatcttaacacttcaaagttcaatctccccattttcatttttccatagcataagctaacaaaataagaaaaatgaagttgaggtcttcaatcgcatttatttgcattctggcgagtgcgagtgtgacaatttcagaatcattaagccaacaagagcaattgtcagcatatgaagttcttgagaaatacgatctcccagtggggcttcttccaaaaggtgccacagggtatgagctaaacgaaaaaaacgggcacttcacagcgtatttgaatggaacatgctacttcagcatagagtcgtatgagctaaagtacaagtccacaatcaagggcgtgatctccaagggcaagt

SEQ ID NO: 18914 - DNA, 444 bp, Glycine max
  Clone ID: PAT_MRT3847_117083C.1
ctgcttgggggggggggggggggggggggggggctcgtaaactttaatggggagggccggtggaatggaggaggtatttgataagagcgaattatcggagggtcgcaggacaggccgataaatggagggctatgcggtactaagaggtgatagacgcgaataaacataggaggtatagagctggattataaatatcttaattgtagagtgtaagtagagctacaaagggctagaactggctgaaacggcacaacattaacaagggcaagtaatttaaggagagctcagaccctgtaaaaagctagtaccaagattaaaccaatgcattaacctaacgctcgcgccgtcaacgcaactatacacggggcctatggagggacgtatgctacaactaggtgagcggcataacgagttagagccaacaaacctacaagtggtagctat

SEQ ID NO: 18915 - DNA, 142 bp, Glycine max
  Clone ID: PAT_MRT3847_117084C.1
ttatttgggcatcaaggtcgtcttcattgttggtggacagtccattgaggagcaaggttttaagatcaggtatggctgtgacattgacattgccactcctggacgtctgattgattgcttggagcgtcgctatgctgtgctc

SEQ ID NO: 18916 - DNA, 182 bp, Glycine max
  Clone ID: PAT_MRT3847_117085C.1
ttgttcgcatccgcctactcgtacggaaacgcggcggcggatttgaagaaattctttccgattttgcacagtatgtgggttagatttgaaatgattgtttttatcatgcggttactatttatgaaattcttttaagttaagaattaaaagttgttgcacggtctggactcatttgaaataat

SEQ ID NO: 18917 - DNA, 457 bp, Glycine max
  unsure (1)..(457): unsure at all n locations
  Clone ID: PAT_MRT3847_117086C.1
gcgtacgnaaganaaagacgcgaggcggcgagaagacgacagaagggggtgcaaatccaacacagccttatttttttttatagcccccaataacgacgctgcatgagtacttttaaatatagggttcgctacttactctctctctgcaacaccccaattttcaaaaacacaaacaagtagtctcattctgaactatgaaactcaacctactttcttctcttctatctcgtgtttaactgttcacggcatcactaattctatcagtaacccaaaatgtttctctgcaaatgatagggtcgattctgttatcatagtttgaggacccactaaaggtactagattctcaccattgtcattaaacgaaccccagccacttttttcattagcacgacaacctcattgttcatgatccaattttctgctctaaaaaggatttctaattttgctttaaatttat

SEQ ID NO: 18918 - DNA, 459 bp, Glycine max
  Clone ID: PAT_MRT3847_117087C.1
tcgaactgtccaaggtcctgtcactgtaattggcgtcgtggtggtggtcgttgccggtgttccaagtcggtcacgttccgtgggttaatacgcgtaaaagcgttaagaatgttcttcggctatttgttcttcatattcgtccgttttcgtcggtctaaaaagtacggttcacccgggtggggtaacgatccgtttaagttgaggtaccggctagggaacatgccgcaggagaactcctaacgtagggggaggccccaggcattcaccggggtgcgtgatggtagatggccaattgtccgtaaggctgtgccattagcacaaggccgtaggacggtaaggttggagcgtagtggtagatacgccagagcatattggtcgtgcgtaataacacgtgaacgacatgccagtagtgcaggaaggagggaaggaataaacaacatgtgcaacgcgcctaggatg

SEQ ID NO: 18919 - DNA, 289 bp, Glycine max
  Clone ID: PAT_MRT3847_117088C.1
agcaacacgaaagcatattcctaaaccttttgttcgaatgtctctgatttgtcctatatggctccggctaaggcatgataagattggcggcgttataagaagccagctggcgggagaaagtcaccggcgttagtagtaatccgaaagcggagtaatatgattctcgaagtgaaggagggagcgttgtagtagaagttgcgcacgaagaatagcgtggagacctactagatctacatctgtatggtcctcaagcaggttcaccccgacattgttatttcctgcaaggcca

SEQ ID NO: 18920 - DNA, 669 bp, Glycine max
  Clone ID: PAT_MRT3847_117089C.1
aagaaaccattatcaccctcaacttctatgacatttactacccaagaatgaaatttttttatgataattgagaaatccccttcttgttcctgcattttctgctgcaaattctcagtctcttccatcttgatctcctctactacctcggcatcaatggtttttgagtctttgtcttcgacaccaagctcctccccacgatgggcgccaattctcttattggcaaaacactcaagggcttttactgaatcactgtcttgcggtgactttgttacccacacacccaactgcaaagttgatattgtctacatggattgtttgtcctctttttcaaactcaagactgattccccttttctcgatcaacaattgtagcatctgtttggcctctttaattccctcaatggttttcttgatcttgattttagagggctgctcctcctccatgctttcctcccttttaacctcaagaatgttttttgaactttttagtcgtccatgctttaactctgaaatgctgattttgtaagaatgataattgggttcctcttcctcactgtcctctctacacccattattgtcactgttctcttccgccttcttgtctctgttgaccgagttttccccaccatccgaaagcctctttcctttcttgaattcaagaagtaattcc

SEQ ID NO: 18921 - DNA, 267 bp, Glycine max
  unsure (1)..(267): unsure at all n locations
  Clone ID: PAT_MRT3847_11708C.1
gatatactttctgattggtttgtgattgtnantttacccttatgtttcaggttcacttactaaggcatatgctgcaattgcaacattgaagtaatctgaattccgtcttaagctatgtaaagttttataaacccattattcattgcattcttagttcaatgactaatgccacaatttctttaacttttactttgagtaaagtcacagatttnggcatcagntttnnctggaaaaaggtattgtgccttccgttgcattgnaacctgt

SEQ ID NO: 18922 - DNA, 1026 bp, Glycine max
  Clone ID: PAT_MRT3847_117090C.1
ttttttttttttttttttttttttttttttttttttttttttttttttggaaaaaacaaaaaacaggccagtttttcgaagccggcaaacccatcttcataacaaaatagcataaacaaataaaaataatacaaattgcagatgtacaacttaaatttcgaatgaaactaacaaggtctaagaaaacgagacaatctgtcaaaaatacatatgccacgtaactcaggatgtcagccacattgaatattcaatgcccttccttccaatctccaaaaatgtcacttctttgatttctttgatgcttgggctggctgggatgctgttgcagatggagcacttggggctgctgatggcttctctccagggccttgagccaaacgctcttctctcctagcaattttcctttccctgcttgccttgttctttgcccgtttggcctcaaactggtcagataaggtcttctctcttgccttctcagcctttgacttgtgtatgctctccatcaagactctcttgttcttgaagacattaccctttaccttcatgtacatatcatggtacatatgcttgtcaatcttctttgcttccctgtacttgcgaagcaatcgtctgaggacacgcatcctcctcatccaaaggattttggtggggagcctagcctctcttgtacccttacgcttaccatatccagagtggcgtcccttcctcttggcctccttcattcgacgagcacgagagcgagagtgaatcttagttggcttcctgataataaacccatccttaaccaacttccttatgttttgtcgagaattggccatggagatttcattgacctcattagggtcaagccaaaccttgcctctaccacacttgagaacgcttgcggcaagccgcttctgaagtttcagagacaccatctccctctctctctctctctctctctccggtggaatgggagaacggaatgaggaggcacgatgtatatcactcgcctctcggacgcgtgggtcgacccgggaattccgg

SEQ ID NO: 18923 - DNA, 1069 bp, Glycine max
  Clone ID: PAT_MRT3847_117091C.1
agtataacttactgaagttgctcatgaaagcatacaaagtgatccaaacatccctacatcgtcttcgtcaacctgacaaaagctcattataattgaatatggtataatttcatcgtgaaattagtacaaggtacgcaagaatgcttattgagtcaggaaactttcataattaacaggcaagtatatcgaagccaggtgcaaccccatcttcatgaaaaaatagcataaacaaataaacataatacaaattgcagatatacaacttaaattttgaataaaactaacacggtctaagaaaaacagacaatctgtcaaaaaaaacactagccatgtaactcaggatgccagccaaatagaagattcaatgcccttccttccaatctcccaaaatgtcacttctttgatttctttgatgcttgggctggcagggatgctattgcagatggagcacttggggctgctgatggcttctctccagggccttgagccaaacgctcttctctcctagcatttttcctctccctgctagccttgttcttggcacgctttgcctcaaactgatcagacaaggtcttttctcttgccttttcagccttggacttgtgtatgctctccatcaagactctcttgttcttgaagacattaccctttaccttcatgtacatatcatggtacatatgcttgtcaatcttctttgcttccctgtacttgcggagcaatcgtctgaggacacgcatcctcctcatccaaaggattttggtggggagcctagcctctcttgtacccttacgcttaccataaccagagtgacgtcccttcctcttggcctccttcattctgcgagcacgggaacgggaatgaatcttagttggcttcctgataatgaaaccatccttaaccaatttccttatgttttgtcgagaattagccatggagatttcattgacctcattagggtcaagccaaactttgcctctaccacacttgagaacgctagcggcaagccgcttctgaagtttcagagacaccatctatctctctctctctctctctctctctctctctctcc

SEQ ID NO: 18924 - DNA, 259 bp, Glycine max
  Clone ID: PAT_MRT3847_117092C.1
ctacgcttacttccactcttcctactgaatctaacatcacgctcaataccaaatatctcttacaaagcactcgtgttaaaaccgagaaggtattactccttccgcaaatcattaacccttcactccctctgctcaaacatcacctaatacaatcaatatttacccaaactaacttttcttcaattctatacacctcaactatacaccattatacccatatacttcattaaaaacttaaacacatacttcataaaatttt

SEQ ID NO: 18925 - DNA, 2031 bp, Glycine max
  Clone ID: PAT_MRT3847_117093C.1
ccaagcgacggcaccactcatcacagactctgcttcagatccccctcaccaaaaataaaacctgccaaatctcattacacacacagatacagtgcatgtgcatccataaacataaaattatgaagaaatctgaagtgggaaaaaaagtgtatgggtcggatcaaaccgacggtgcataggaaaaggatacaaataagggtgtggttaatcaaccaaaaacaaatgggtgtcctcgtgggtgtgaaaccatacttcctccaggttttgcactcgctaatccccctctcttccccccttcggcttccgatttttctctctcaatctttgttcatcaaagtgctgcatctctctcactctcttacttaactcgacaacttcagccacattattccatggatgccaaggtattcaaattccagatcctccaaggctccatcgctaagcgcgtggtcattcgctcaatactactcgcgtgcgccgtctcaattgtctccatctaccgcgcgcaatccctcttcgatttcggaaccctcgctcccatcgccacgtacttcgactgcgtttccggcttcgagggcgtcacctttcgccctggttcccacttgctccgaacccgcttctgggcctccgccaattgcgagaaagacgccaacttgaccctctccgtggtcaccgacctaactggtaacaatatactctacaccggagcgaaaagcctctgcgtcggatgaaggctcctcaatggccgtcacggcaatgaaacagttaggtttatccagcgtcagcacgcgtccaaacgcaccggttcgtgcagaggaacgtcatgtacgaggataactcctacaatttcatgttctccagagacctagacaaggtttctgtcccagcattgctggtgctcgaggttgagcgtgtccttaagccacgctggcattggtgccttccttgtaggcaccactagttctaacccaaatgacttgataagagcagccacacccgtttcctcgttgtttaaggtcttccaatgttgtgcatgttggttttgtcaacgaccttaacattgttgttttcaagaaacgagttggaaacgctacttcattttaccaacatggtaatttacccgctgattgtcccagtctcacattcactaaatccctcatagagttaatggagcctctcgtgagtgagaaacaaaaaccaccacctcttgagtttcacaagaggattccctatttgcctaaatttgtggatgtttccactaggaagaggttggtgtatattgacattggggtaggggagcttcttgatgccaatgttagtgattggttcctaccatcgtaccccattgatcagaaggatttcaatatttattttgttcactacaacacttcgattatgttgtcccatgtgaagcaacctggtattacctttgtttaccaccctggcttgtctggtattgataaggtcaatgctaagcttggtagtgatgatgatgatgacatggatcctttacttggggaggaggagaagtttgatttccttgcctggttcaaagaaactgtgcaatatgctgattttgtggtcctcaagatgaatgcaggcagtgttgaactcaagttcctctctgatatatttgagaatggagctatatgctatgttgatgagttgtttctcaagtgtcccgagaggggaggtgatgccagcaagggaagttgcatggatatttacaaggatctccgaagcaatggtgtctatgtgcatcaatggtggggagactgaactgcattgtacctttgatgattattgtggtgttagagaaacctgtgtatgtacaagtttctcttgtgtttgatgtatttggattctagtcgtccaactttgtctgtgttgttgttgtgctgtgtttgttgtctgtgaaagtgtgtaggatgctatgaacatccgagtgctttatggttgggcgcttaattctaaataaacaaccaatgtcgttgtcgtttgctaataaaattaatctgtgatgattgtgtt

SEQ ID NO: 18926 - DNA, 237 bp, Glycine max
  Clone ID: PAT_MRT3847_117094C.1
taacaaccgctctagcaactcagctacctttctcaatgataccttctccaactgttggggcggtaaaccctgccgctagcctccatgcaagctacatacactggcctaaagtccatatatggataccacaccatattgaccaacaacgacattacctccattaatagtatcagaacacgagagccttgcatacagttatggccaccacttttcattaatacgctcagactctttcct

SEQ ID NO: 18927 - DNA, 279 bp, Glycine max
  Clone ID: PAT_MRT3847_117095C.1
cggcggagtttccggggggacccacacgcgcgccttttcgtgcgaacggatgcgagaaggcgacagaggggggtatcgcatgtgaatcggaggggcttaggaccacagaaaataggaaaccaaacactagtataagtcccagatcacaatcacagcatgagtagagaggcatgtggaccatggtgaagtgtatgcagttcactcctgtacgagtccaaccttctgcgtttgctggggccttgcactccgtatgctaagcagcgcgtgaaagcactgcag

SEQ ID NO: 18928 - DNA, 301 bp, Glycine max
  Clone ID: PAT_MRT3847_117096C.1
aaatcagaaatttttttttttaagggaggaaacaaaactttagaaacccttgcatgcttgacaattggaagtttaaaaaaataaactattggttaaccgggcaaatttccaacacttaaagagcagaacttttaaacgaaattggcaaaaggtaaaaaaacccaaattaatgggaaggaaaacccgatcataaggggggagccacccgaaaagcagcaaatgtaaattaggggagggttaaaacggggcccggacaaaataaaccccccattggaattaccaatacaaaattgcccaaaaa

SEQ ID NO: 18929 - DNA, 560 bp, Glycine max
  Clone ID: PAT_MRT3847_117097C.1
agattttggaattttggttaggctagaagtggatccaactgaatctcaaggagggatttttttttgtgactgatagaaaaatatatatttgagtgtagttatttacacatgcacttgttaaaaggcttacaagaaaatttaatgattgaatcaccattgaaatcttgtgttttggctcagtagtttattcactttattgatttagagcttgttcaatcgtactctatccaaaaaaaagaatttaccttttgattttggagtgatatgactcattatgttgatcgtattaataacaatacaccattcacctctgcatggattgaatttcttagatactgacaactttagttttgtcctaagttttgtttgtttggtattctttgcctcctactttagttagtttgcaccatttttagaaatatgtttataccatcagttgcaagtcttccttagtcccaatgatttactctaaagtgcaaaacaagtcatcctttatatattttctattactaattccagttccaagactttggcataaatttgatctctctttttatttg

SEQ ID NO: 18930 - DNA, 460 bp, Glycine max
  Clone ID: PAT_MRT3847_117098C.1
acatatatattatattaattatgtactctcctttaaggagggggatattggaaaaacgcatcctaatatgttcatctcgtcttttgaactaaaaaaacgtgaagatgggatcatattacagtgtaaattacgttacccaatcatctttattcgatggatgatatatttatttgcaagtaagggatgtaatattaacaataaacagaactggccacaggctaacattattatttacaagaaccaaaacttgaggggggacatttccaaactaactcaaactataaaagctatctttgctaaatagaccgacactgccttggacttaatatggccactgctgtcacataacacctaaattagacaggacatgatcaagcaattgcacccatgaacactcttagtacatttttgacataatctacatatacactggtgcgcccattgcattaccaagagttag

SEQ ID NO: 18931 - DNA, 329 bp, Glycine max
  Clone ID: PAT_MRT3847_117099C.1
ctggggacccatttttctacaataccaaaagataggaggtacccctactgatttttctgtttcacaggagcctctccattaatgatattggtgaaaaacacaagggacctgcaaagggcaccacaagactgcattgtatgaaggtgtactcacagcctacggtcgaagttagtgctagaaaccgaagcatccttggcaacaggatcagccacgcattcggaaccgttctgaggaagtccctggccagagtgtatcacctgagttaatacaccctgctcggacaacatatgctatcgaccaagcttgagctccttgaccttcatctcaga

SEQ ID NO: 18932 - DNA, 475 bp, Glycine max
  Clone ID: PAT_MRT3847_11709C.1
gaagaatctacagatattctgcctgaattggcagtagcactgaagccttcccccaatgtgcagtggccgaactctcagcactatatatcagcgaagactcccattagggcagcctctagcgctgcacatgccgcttacttggatccttgtatgaggcccatggctggggtgtcgtctgggatggaagctgagttagcagcgggctcttcagttgttgcaaccattagctggagtaatgagcagggaacccggagggatatggatttgctgggtcaaatatatactgagccccaaatacttgagccgtggatgaaggaacatgggactgcagctaccacaggaagtgctttctcaaatactggggatatacccacttctgggatgaagcctgctgtaccatcagagatggtgtgcacacccacacctgatgtgacagctgcatggactacacccacgagtgcagtgggttcattac

SEQ ID NO: 18933 - DNA, 356 bp, Glycine max
  unsure (1)..(356): unsure at all n locations
  Clone ID: PAT_MRT3847_1170C.1
ananaataagaaatcaaaccaaacatgttttcagaattcaaatcttttgaaaatganaacagttttcagaaaatggaatcaggaaatgaaaacagaaaatgaaaatgcaaaccaaacacacccttagtgttgggagttgtttgtgttaatagcataaatataaggttttgttcctattcagcttagaacgaaaaaattacgtgaatggatcacctacagttgtattttcaactgcacctcctgtagttacaatctaagggccaaatttgtttttaacacatttagctttaacattttaacttcaaacaaataaagttaaggtcaggatctctgcatctctttttaaactgcagagg

SEQ ID NO: 18934 - DNA, 525 bp, Glycine max
  Clone ID: PAT_MRT3847_117100C.1
caaggcttgtactgatctactaaagagagctagaaaagatctataaaatgaaggagaacgaaacctacaggatgccatgcatgttgcaaggaacattataaaaaatcctaaacttgttcctggaggcggtgctacagatttgacagtgtcagctgcctcgaaacaatatagctcatctattgaaggcatcaaaaaacagccttataaaactggtgccctaacttttgaagccataccacgaactttggctcataattgaggtgtaaatgtcatacctactataactgctatacaatgaaaacatgcaattgtagaaaatgcatgaattgttattgatggaaatactgtcagtatcactgtcatgaaagaacgcaagatttgggatgcctacgatgtgaatgcacacgctttttatactgtcattgaatccaattgtatgctcctgaggattgatgatataaagagcgggatcaataacattcaagcccctggagctgctgctctataacctagggttgataccga

SEQ ID NO: 18935 - DNA, 764 bp, Glycine max
  unsure (1)..(764): unsure at all n locations
  Clone ID: PAT_MRT3847_117101C.1
gttcctgcaaaccttcccgtttcgactccttcccttcttttttctattttttttatttttcctctggcgcttttaacacattgctactaaacaaaccccaactcgaagaaaagaagaacaatctgttccatcacaagctttttctcctgccccaaacggtttcaatttttgttttctggggagatctggttgatccgatccacttggggttggtaaccgcgtaacgacgccgttttgtgtttaggtttttggactcgttttctgaaacctcgtacaaaacatcctcggaatcgtttgatgttacaaatggagacgctcgtggttgtggcgcagcataggaaccaatgttacaccaggtcgaaatcccaacgccacgctgagtttggttcctcttcaccctccaatgactttaggggcataaattgcagaacttttcaaacggggtgtggtattctaccaaccccactcaaacgccccaaaacgccgttaactccttcaaaccctaacaaaacccgttgcaaaaccactcccagtagtgccccggttcccatcaatcgcaagaaggagaagaagggtttcaatgttgttcctgatgggggtattttgctctctgaactttgggccgggcccacttactcgaattcaccaccgcctagttcgttgcctattccgaaattttcagtgaggcctaagaggagtgtgtcacttgatttccctggttcttgccctgaagtagagatgcagntacgtgctaactctgcgcc

SEQ ID NO: 18936 - DNA, 383 bp, Glycine max
  Clone ID: PAT_MRT3847_117102C.1
tttcattcatccgtagatgtggaagtggatagggagaatggatgacctagcactcggataccaactgtgctgagggtgctaataaggtctttgcctgactgtgggagaagtggatgtacatcgtatgcaattggatgatacacggatgacaaaatcattcttctataaagaagagcttaatctaagaacaacaaggtaagtactttttactatggagttcatatgttcaggtcttatggagagtatacatggttaacgaggtttaaagagaccaaatagggacaggcttagttgtgaagagagattcatcacatactacatgtaatgggctgaagagaactattgagtactgtgttagggaacagaaattgtgtgtggcaatt

SEQ ID NO: 18937 - DNA, 131 bp, Glycine max
  Clone ID: PAT_MRT3847_117103C.1
gtcccattacatgttaaacgtaatggtgcttgtgagtacctatcaccactttttttgttggttggcaacttgccatttaattagtcaggttaatgtcttttttagtgttaatctctcagctttcttgcaag

SEQ ID NO: 18938 - DNA, 535 bp, Glycine max
  Clone ID: PAT_MRT3847_117104C.1
aattcggcaccagctcgctaccctttcatcgcagtctcgcatctttagttctccgtctaccctttcatcgcagtctcgcatctttagttctccgtcctccgctgcacttccgtcgcagtccattcctctctctctctttgaccactcactctgtctacatctctgctagggttcgcagttgtttggtatctatctctgcaagcgcctctctcgtcctcattgcgtttcacattctctgccagcctttaacgcagatcctgaaaccattctatgaactaatcaagtgtggaacaatgatgatgagaactgcttctcagaaatggggctacattcggatcatggctggtacaatctttggaggcatccttggattctatgtcatgcaccgccttgaaactaactacaaggagaaaatgaatgaaaggctgagagattatgaggctgaattgaagaggaagaaggatgagagattgaatgagttagaggactcctcccggttttgaatcattgtttttttactttttgatgtagtcct

SEQ ID NO: 18939 - DNA, 803 bp, Glycine max
  Clone ID: PAT_MRT3847_117105C.1
atgaagctaattttatgtttttttttatctttcactggactagtataatataacagtttccagaattgagatatgtttttcatttcattacttttgtttgctttattatgttgaatattcaatatcgattatggatatgccatttaattatgtttgggtactaagatatatttcctaaatgaatttttaatgcatgtaaacttctacaaaattagattcatgtttacttttctccatgagtttacccaactcttgagtttgacaaccttacaggaaaggagaaagagcaaggagaaagagcacagtataagagagtactagtagtgtgattaacaactgtcactgacggatcagactggtgaagctttggttcttgtaaatcggcgttccacagtccaataacagtatgtggttgtgcgtcctgcaacctagaatatatggcaagctccaacttgtaaggcttggcaagagtacgggagccaactggcaaaacaaccacccaactgaaaataaaattaatcaatagtgagcataatcaccagttttgtacaaataaaaagttcacccataaaacaattgaaaaaactaatttgcaggttgtgtgaatgcaaggccatccattaagcaataaagctagaactagccataaaatagcaaatgtgaaagtgaacttagatgcttcaacaatatgccacatgatacccacactttttttgataccaactgaggagctagtacttctagaaacccaggtccatgaaactcgcacagccaaccagagaacaagcatagatgactctaca

SEQ ID NO: 18940 - DNA, 444 bp, Glycine max
  Clone ID: PAT_MRT3847_117106C.1
gcacgaggggaagaaaaccacctataaccagaggcagctgagtaaatcccattattggaattactccaaacccaactatcattaatgtctggccgcagttatagggtccaccttcttaagcagctccataaagttggtaggaagggttgtatggatatcagacaacattcattcaccatcatgaataaggtccttgagacacaggtcgacatccgaaatgttcacatagggcccaaacagtgctgcaaccactaactagagtccagaccaacttgcccaacaaggaaatagtagtgttgaaagcttaggggaggacaccttatccaactaacccaagttccatccatattgagaattaatctaaataatgtaggttctatccatattacggttgaaatatatttgtaaattaaagattatttttatgaataattagattaatta

SEQ ID NO: 18941 - DNA, 386 bp, Glycine max
  Clone ID: PAT_MRT3847_117107C.1
ccacgcgtccggtggtacaatatcgccacaaatgcgattgtaaagtgatgtgcaaccggaatacgattcattggttttatattgttctactacactcccggcttttagagctgagcctttcacattgaaagtagcacagaacttgcaagctgctatagaagattgatctagtggaattgcgagaaaaaaacaaatgttaacagtgtagcaagacctgaaacttgaaagtatcacgcaaaaatcttttcgtttcccagaacacctagcactcatctaactgaaaacaaaacatacaacacttttcattggtagttcatttgtatcaccaaaaattaatcgttttgtatttgcttatatactacaatcaaccaattatatttctatta

SEQ ID NO: 18942 - DNA, 291 bp, Glycine max
  unsure (1)..(291): unsure at all n locations
  Clone ID: PAT_MRT3847_117108C.1
gtagcnnanacttcaganacatagggctgctgttattatacaaaagcggatgaaaacagtacntgcaangnacagaatganaagtagtaatggttgctgcagncagtcatacaatcatttattccgtggntggntagttcagaagatgcncaggagatataggactatcaaaacctcggggcantangactaatgagtcagatgaggttctggtgaagtcatcttncntggctgaatnacagcgcngggnacttaaggcngaagctccctgagagagaaagtngagganat

SEQ ID NO: 18943 - DNA, 242 bp, Glycine max
  Clone ID: PAT_MRT3847_117109C.1
aaagcatctaagtgacagtaaagcattagaaggccacttttcagatcattctcagtcacattctgtgggatcaggtgatggttgcctgtcattgttgaagaagagacattctggaattaggcctcatgctgttcgaaaaaggactccccgtgtccctatttcatattctattggtaaagatatgggataggtttttttcatctgccaggcaaggctccaaacaaatggttgatgctaatgat

SEQ ID NO: 18944 - DNA, 588 bp, Glycine max
  Clone ID: PAT_MRT3847_11710C.1
ttaattccacgagctacctgctcactaggtcgcggtcgcccttttttttttttttttagtctgaaattttcatgcaagcatagatgatattgcaaacaatcttgcacaatcaatgctaattggtcggcaaataacacatgcaagactaattttacaatatgaacacgtttatgagccactaagaattccttggccaacaaagatagccatgctttatatgaattaataagtgggcaacttggaccacacatcatttttttgaacaggggtctctcttaaggtagacacagttaaaacctccagcattatcactggagggataatggatggattttttaatgtttctccatgggaggaacccgtctgatagaatatttttggaaatgtaaatccttaccccataatagaatgggtcaatgtatgtttaaaaatgaagggtgcccctactgcatttgctgaaagcgccgctttccctaaccactgggatcaaaatcattcaatcttgcggtttttcactttggaatattgtaactccgtctcctcataatatgggcaacaaggccccaaaccatgttcaactttcttttt

SEQ ID NO: 18945 - DNA, 454 bp, Glycine max
  Clone ID: PAT_MRT3847_117110C.1
gttgttccatatatccaattctacttacaaagtttctcgctggctccattccaaattcactctttctaatggaccattgtttttctttctaatccttgcttctgttccatatatcaatgcactttctccattatcggttcattgatcacaaatgacgcgtggggaagcttcaacatagcaaataattcaaaagacctggataattctcaagatcaaccactccctccaggtgttgcttcgtggccaaattacgcctttgccacttccagtgccccctacaactttcaacaaggaaccctctctcactatggtttttcttccaatgctaaaccaactgaacaacacgaagaaaacaaggcctttcattttaaccatgttgagatcaccgcatctgatggtgccacattgagtgcttccaattactatggagcacattttactgggtcgcgcgacg

SEQ ID NO: 18946 - DNA, 234 bp, Glycine max
  Clone ID: PAT_MRT3847_117111C.1
gttgtctccttgaatgtaaataacttcacaaccacgccaaccttggctggtcaatgggacacaaaaataagcattgacaacccgaatgacaaacttgtcgcttatttttccaacttcaaggttgacgtggcgtacaggatggcgttatggcaattaatcatgcgcctgggtttgtgttgaatacaaatgatcatatggatgtgaacgtggcaggtttgtctaactaagggaatg

SEQ ID NO: 18947 - DNA, 350 bp, Glycine max
  unsure (1)..(350): unsure at all n locations
  Clone ID: PAT_MRT3847_117112C.1
ccngcacgcgtacgtaagtcggaattcggctcgaggggaganncngnacnangacgggggntgangaaagnggaanggnnnanggagcgatccnngnggtccaagcaacnnnanntanaacccagctgccacctgaagagtcacagaaggntgtcctgctncaaccacagagagagaaaagtcntgcngtggagnaancancttcattcnnnagcccganangtagcgncnanatgnctcaagcaattcngnngcgagatggancgctannantttgngggnctcagagaggggccnagactacatctnccacaatcccaaagatgcaccnagaatgcccataacctcag

SEQ ID NO: 18948 - DNA, 116 bp, Glycine max
  Clone ID: PAT_MRT3847_117113C.1
cttccttaactacggaatccgctccaattgaattcacaatcgggggtctccaccttgaacaagaatcaaggaaggacaatcatcaccataaccaatctcaatggtgatcataacaa

SEQ ID NO: 18949 - DNA, 381 bp, Glycine max
  Clone ID: PAT_MRT3847_117114C.1
caactcatcacctttttgatcttctacttttcacacaccatcaacttccccatcctcctcaacttctttcacacatgacacaccatcaacttccttatcctcttttactgctcccaccccatcttctttcctatcctcgtttttttctgccaccccatcttctttcttatcctctgacgcttcttccaccccttctttcttatcctcttttgcttctttcaccccgccttatatcttatcctcttttgctccgttcaccccatctactttctgatccactttagcttattccacagcaccaactttctagccctcttctaccttggccacgctatcagctttcttatcttcaatttgttttacattattttctttcaactc

SEQ ID NO: 18950 - DNA, 495 bp, Glycine max
  Clone ID: PAT_MRT3847_117115C.1
aaaaaagggggtggtaacccaaccttttagagatacaaattttttgaaaaaaagccctgggggaattaacaaataacaaggggtccccccccaaccccttgggttgttcaaaatttttttccctacaaacatagatagatttttattatagtattttccaaccaagggcagggaaaagccccggcccaaaaattagaatctttccctgcccccaagttggccactccacctttttttattttctccaacaatttttagcccgaaaacagaaaaaaagccccccttgtcctatttttgtttggaatcagcgggttccttgaaaaggaaaccttccccgaatggttttttggaaagaaagaggccccctccggggtcggggggggagcatgaaacgtggtacaacaacgagttgttcacacactgcacgttggtgttcatgtccccaaacattggaaacgaaaaaaaacccggacctttctgatttttatccttttt

SEQ ID NO: 18951 - DNA, 400 bp, Glycine max
  Clone ID: PAT_MRT3847_117116C.1
ccacccggggggtttaaaattcttatatcagtgtaattcaggcttacaagccaaattttactgagaacaattcccaacgtccagcatttagctcactctgacacaaaggaaccgcttatattaatcaaagggcacagaaaaatccttctcaggatgttttgtttgctcgcgcttcactaacccctacatgctgggagctacaggagtaacttccaatagaaaatgcgggaggattcttcttctgagatagaggccccagtacaagatactgcagtacaataagagtgagcctgcttctccgttgacatgatgatcgcgattacagtgccacataacatggggcccattttttatctgcagtgtggcgtgggcgtaaatggggtctccaaaagcacaatat

SEQ ID NO: 18952 - DNA, 523 bp, Glycine max
  unsure (1)..(523): unsure at all n locations
  Clone ID: PAT_MRT3847_117117C.1
aaaaaaattnaaaaaanttttnatatatnnacacacatnatnatnattaaaaaaantaaaaannaatggcccccaaaaattttaatgtnataccccaacagctttccaaaaccccaaagnaggggtatacattaaaaacattttattttaaaattncgggnccaatattancangggctttttncgccnntttnatttgggatntaggggntanntaaaaangngnnntnnaaaaaanntaaaaaaaaanccatttnnnacaacccnntnnntttttaattgagtaaaaattattttgtcccgtgggaatttgtggggccgcgcgccattaattgttaaagagaacaaaaaaaaagttttttttttttggggaaaaaaaaaagggggaggggaaaatccttttgtccttacatttttnttttttttttggggaaaaagacggggtaaaaaacacaaaaaaaaaaaaaagaaggggggaacttgngggtaaaaattaaaaaaatgggaggccccccccacaaaa

SEQ ID NO: 18953 - DNA, 109 bp, Glycine max
  Clone ID: PAT_MRT3847_117118C.1
gacaccgagtcgcccacaagcagaacagcgatcatagtttcacttcggccttatccagtttcgggtttcggttctctaggggatctgtcacgtgtcgaagccttaaatt

SEQ ID NO: 18954 - DNA, 579 bp, Glycine max
  Clone ID: PAT_MRT3847_117119C.1
agtccgtcgtgaacttcctggagcgtcgccggccccttcgactacggtcctcccggctgcgccgtcaagtccaacgtcctctccttctggcgcccgtttcatgggtttggtgatttgagattagggtttatggatgggttcttggtggaatttatttatagttctttaggagagaaaatgacatcaaaaagggaaagggaagcgggtgatagagtagaggatgaagggcttgataatgagtcgaaaaggcagaggctggatgaggattcttccccctctcctcctcctgtctccgttgcaaatcctctttctgggttggccaataattatgctgacattgatgaggaggaagatgatgttagaagggaaaggggttctgtaaatgagaggagcaatgatgggtcccatcataatgggcataataaatatggagaggctgatgatagtgatgaagaagatgacgattcacacgaacaatttactggaagaaatcgccaggttgaggttcggaaggactgtccttatcttgatactgataatagacagggtttggatttggactttgaaaaattctgtact

SEQ ID NO: 18955 - DNA, 1198 bp, Glycine max
  Clone ID: PAT_MRT3847_11711C.1
ttcttttctggaggttcttctgaggttttgattgaatccttggaagagtctcaggatgacgtgtctgactttgttgtttatcagtcggaacctgaggaggaagagttgagtgaatacgagttcgataagaaacttggacttcctcatccgtttattgatccaaaggttaataagccgatagaggggacactttcgaatgacgagctgtggtggaattggagacagccggagaaagaacaatggtccaggtggcagaggaggaaaccggatgttgaaacggttttcctgaatgctatggcagaaaccgggcaaataaagcttcacggtgaacacccaacattaacagaaactgccctttaccgagcaaggcgtgaaatttataaagaagaaagacttcaggccgagcaagagagactggaaagagatggtccaattgcatactattcagaatgggtgaaagcatggaaaagggacacatctcgcgaagctattcaaaagcattttgaagagaccggagaagatgaaactactcaactaattgaaatgttttgccaccaaactgaccgagagtatcgcataatgatggggactgatgttcgaatccaaagggatcctttagcaatgcgaatgagggaggatcagataaagcaaagtactaactataaaacttaaatatttgtgtcatgactgtatccattttagtcaatttatgtcatatttgccattcttatttttatgattcaaaattgacttcactttatttagcgttgtttgttgaagaactgttgaataattattttttttccacaggaaacgattgactacagggggccagattttcatgaaccaatgccaaatatggtggcttatctgaaggagcaaggaaaactcatttcaagggaggaatttgacaagattatggctaaggaaaagactgaacaaattgagttgacggagatcgatgaagctatggccaaagctgttgacatttgagaaaatgatgatgaagaggatagtgatgttgatgagggagagggagaggaagagaagcttagtgattattggagtgtgttgaaaagtactcctgagctttgcaagtcaaagatattcttgtaaatcaaacatttcctagtagttttgtctctgctggtgtaatctgattgatagtcatcccaataataggagataccagaaagcc

SEQ ID NO: 18956 - DNA, 500 bp, Glycine max
  Clone ID: PAT_MRT3847_117120C.1
ctcgagccgtccgtcgccggctaagctcgcaaacgtaaacgaacttgagttggaacttctccgacgagtacaaccaattggtctcaaaccctatcgccttttgcttcaattcaccgcattctcgaatttccccttctctgtgacgcgtggcaaaaattttccccttaatttcttttctttaggagagaacatggcatcgaaaagggaaagggaagcgagtgatagagtagaggatgaaggggttgataatgagtcgaaaaggcagaggctggatgaggattcttccccctctcctcctcctgtgtccattgcaaatcctctttctgggttggccaataattatgctgacattgatgaggaggaagattatgttagaagggaaaggggttctataaatgagaggaggaatgatgggtcccagcattatgggcataagaaatatggagaggctgatgatagtgatgaagaagatgaatcacatgaacaatttaatggaagaa

SEQ ID NO: 18957 - DNA, 221 bp, Glycine max
  unsure (1)..(221): unsure at all n locations
  Clone ID: PAT_MRT3847_117121C.1
atatcaaacccaaacantaattaacaattatgtgttatttttataccccttattaacccctttttttataactttaaatttctttttacccaaatttattaaagattttaatttatacataatcatgtaaaatttaatcatcaattgatataatgtctaacccttttctcctaaaaaaaatataatagccaaccttaatctccttaaatattatttctccc

SEQ ID NO: 18958 - DNA, 953 bp, Glycine max
  Clone ID: PAT_MRT3847_117122C.1
gactacatcagaattcacaacacaaaccaaacttgccattcttctcaaaaccacaaagcatggcatcaaaactactactaagcctttctctgctactcctaactctcaccctccacacgtcttgcaccaccgcacttgccaaacgaaccaacccaaacccaacaataacaacaacaacagacttcatcaagtcctcatgcaaggccacgcgctaccccgccgcgtgcgtgcaaaccctctcgggccacgccagcgcgatccgccagagcgagcagcaactcgccgtcacggctctctccgtgagcgtgtccaagaggcgctcatgggggtcgttcgtgaagagaatgggctccgtgaagggaatgaagcccagagagtacaacgcactgcgtgactgcgtggagaacatgaacgacagcgtggaccgtctcagccagtcggtgaaggagctcgggctcgtcatgggtaagggcaagggtaagaaggactttacgtggcatgtgagtaatgttcagacttgggttagcgctgccatcactgatcaggacacgtgtcttgatgggtttgatgggccccacgtggacgccaacttgagggcttccgttaggcccagggtcgtggatgcttctcaggtcactagtaacgctcttgcactggttaatcgctttgcctccaagtatcgttctgcttcgcaaacttaaacttcatgagtcttaactcgtcattatgtgtgcttaatggtttaatttgttcaattctatcttcgtggtttagtaccccaataagtctgcatgcggtttaagctggttctatgctactgtattagactgtggcgcatgttgtgtaagtgtaaatggggattataatttatttggtttaattgtctcgtgtttaataaatttgtgatttggaaggcattttgaacacccacaaaaataatttttattttgacc

SEQ ID NO: 18959 - DNA, 486 bp, Glycine max
  Clone ID: PAT_MRT3847_117123C.1
gcccttcatcgtgtgctccgacagtccgtggtgaacttcctggagcgtcgccggccccttcgactacggtcctcccggctgcgccgtcaagtccaacgtcctctccttctggcgcccgtttcatgggtttggtgatttgagattagggtttatggatgggttcttggtggaatttatttataggtcatttggcctttagaatactattcatgtgcttcttgccacagcatttttagcttctttcactatctcatttaagcccttttgttagataaaggaaaactttttttttctttctttttgtcagtgtttaaatttgtaggtgatttgaatttgaagtttaatgtcttaatttattctttatctgctattggtttaaaagttctttaggagagaaaatgacatcaaaaagggaaagggaagcgggtgatagagtagaggattgaacgggcttgataatgagttgaaaaggcagaggctggatga

SEQ ID NO: 18960 - DNA, 469 bp, Glycine max
  Clone ID: PAT_MRT3847_117124C.1
aattcggctcgagcggctcgagcggctcgagtacggctgcgagaagacgacagaagggggtatccctaaaatacatcattctttacacctgtcatcaacattttcttaaaagtgaataacctaagtatcacatggaaaatatccaattataactcatcacataattcagcttttattatttttccacttaagttggtttgattaacagtctcggtatatgttgcttagtcatttcaacaactaatagaagtggcctcccataattgtagcaggtaatttttagaagtgaagcccaaaaaactagaaacaaattcaaaccttctattttttaggatcccatagatcaaatatcacaatagaagttgagatcatctgaggcactgtaaaaagtttaactcacctgtgaccctgcaagagaaatctttcccccttcggaactcttttaacataaaagaagtttgaaatgaat

SEQ ID NO: 18961 - DNA, 228 bp, Glycine max
  unsure (1)..(228): unsure at all n locations
  Clone ID: PAT_MRT3847_117125C.1
tttatgtcattcacattaactccaactctctanacaagtcccgnaacaggctatgggcngaatctggttgtnctnttnttccttnggnngagnncagagagcccgngtttttgaaaatttttttttgnnnaaatngatatttcgggggggggttngcttggcactgnttnnngacnnanagagatccagattggtacggnctctcctnnnnggatncaagagagaaac

SEQ ID NO: 18962 - DNA, 2765 bp, Glycine max
  Clone ID: PAT_MRT3847_117126C.1
cccacgcgtccgagcacagacacggtgcattccagatatgcatggagtctctctctctgtatgaacacgcaaaagaccattgattgtccgagagaacgcaagcactgacatcagtactccatatatttgctactctgcatgaacataacattcatacttaagttttgctggttgtgtgtgtgttttttgttcttggtcgagccttgtactgattaacgagaatggacaaggaagtggagcttggttcccttgaaggtgaaatggccacccagcacatttcacaaccacagaagcgcaagggtggtcttgttaccatgcctttcatcattgcaaatgaggcacttgcgagggtggcaagtttgggccttttgcccaacatgatactgtatttgatggggacctacaggcttcaccttgcccaagcaacccagatacttctctggtcccatgctaccagcaatttcacacctgtggtgggtgctttcattgctgattcttatctgggtcgattcctcgctgttgggttgggttcggccatcacttttctgggaatgacactgctgtggttaacagctatgatcccacaggcacggcctcccacttgcagtagcaataaagctggaggctgtaaatcggcaacaggagggcaaatggcaatcttaatctctgcccttgctctcatgtctgttggaaatggtggtctttcatgctccttagcatttggtgcagaccaggtgaacagaaaagataaccccaacaacagaagggtcttggaaatattcttcagctggtattatgcttctgctgctatttctgtcataattgctctcacaggaatagtttatatccaagatcattttggatggaaagtgggttatggagttccagcagcactcatgcttttatctactgtctccttcctccttgcctctccactttatgtaaagaataaagtagaatccagcttgttcacaggatttgtacaagtgattgttgttgcctacaagaacagaaaacttccattaccaccaaacaactcccctgaacattaccatcataagaaggagtcagaccttgtcgttccaaccgataaactaagtttcctgaatagagcctgtgttatcaaagatcgggaacaagaaatagcctcggatggttcagcatcaaatccatggaaactctgcacagtagatcaagtagaggaactaaaagccattattaaagtgattcccttgtggtctacagggatcatgatgtcagttaacattggaggctcatttggattgctgcaagctaagtccctggacagacacatcacctcacacttccaagtgccacctggctcttttagtgtagtcatggtacttacaatatttttatggatagctctctatgaccgagccattcttcctttagcatcaaagataagaggcaaaccggttaggatcagtgcaaagagaagaatgggacttggcttgtttttctcttttatccacttggtaacttcggctattgtcgaatccgtaaggcgaaggagagcaatcaaggagggatatcttaacaatgccaatggtgtgttgcatatgtctgcaatgtggcttttcccacaactttgcttgggtggaatagctgaagcattcaatgcaataggccaaaatgagttctattacacagagtttcctaggaccatgtccagtgttgctgcttccctttctggactgggaatggctgcaggaaacttggtgtctagttttgtcttcagcgttgtacaaaatgctacttcaagaggggggaaagaaggttgggttttggataacattaacaagggtcgttatgacaagtactactgggttatttctggactcagtgctcttaatatagtgtattatctaatatgcagttgggcttatggacctaccgttgagcaagtacaagtacgtaagttaggtgaagaaaatggctcaagggaattagaaccttcaactgaatttaggaatgggagtcaggttgacaaagaattccagattagtaaagaaaatggctcaaaggaggaagaagagttaactaggtgatatgttgaattgctcctctaggcatattgttgatcgggcaaatacacttaatgcccagtgattcactctcaaataatatcttttttttctctccatgttttgaccagtagtcgcatttataataaggctatagatgaatatacacacatatattatgtataatcggttagtgtatgaagatgcgaataatactataaaatgctgtagaccataaatttttctggaacccttttggttctgttgagaaaaaaaaaattatttaagtcttaatggtttttttaatttcttgtacttttttttctttacttgaatcattcaattttagagttgttctcctcctgcgagctgtttaatatgagagcaatgaatcgtgagattctgccataaacactattaactgattgaatttaactttagtgttttcaataaataaataagaatgttagtgttttctatttccaagaacaagcaaaatattcttatttgggagcctcgcccttcattcctttgtgggtcatccatacaccaatctttttggtgatagctgaaattgaccgatcatgggttgaactctgttctgctttattattaggcaactcaaaccggttgttgatattgtacgaggcaatgtttcatatggtttgacaagattcctcaaatccccctacataaggattgctcagcacctaaaaa

SEQ ID NO: 18963 - DNA, 326 bp, Glycine max
  Clone ID: PAT_MRT3847_117127C.1
accaggtttcagaagatatggatccccagacgaggaactaccaggctggtcaggctcagggccaagctcaggaaaagactaacaacttgatggacatggctggcaatgctgctcagtctgctaaggaaaccgcacagcaggctggtcaaacagtgatggcatcagcacaaggagcagctgatgctgtgaagaatgcaactggcatgaacaaaaattgaatgaagagggatggatcctgatcattcagtttcaattaatttttgtttttccttatttgttttgcaaatttcttgttgctgccagggcattgtgtaagaacatgctct

SEQ ID NO: 18964 - DNA, 156 bp, Glycine max
  unsure (1)..(156): unsure at all n locations
  Clone ID: PAT_MRT3847_117128C.1
acggccacgcgtaacatccacggcctcccttttattcttatgaagagacgctgagcaaaccagggtgggccatttaaaatgccggcgggaccgntctattctgtaagagaactccgacggacttttaggccgcctcccaacagtatctctatctaa

SEQ ID NO: 18965 - DNA, 355 bp, Glycine max
  Clone ID: PAT_MRT3847_117129C.1
tttttatttttttttttttttttttctttttttttttttttcaacaaaatgcagccctaattcatgatggggaatattatttgttatgatcacaacattgccacctggattttccctccaccccgaagctaataaagttggttcgcccctgttcaccctcaaaaaaaaggtagaattttttttcccttaaaatctaacgggaaatactattctcagggtggcacctactcggtggggcaaaccatccgagcccaacattgacaatggaaatttttaattccgggggcctttcatgggacctacaatttttacttttaaaataaaaacatgtacacacccgaaataaggtgttttt

SEQ ID NO: 18966 - DNA, 209 bp, Glycine max
  unsure (1)..(209): unsure at all n locations
  Clone ID: PAT_MRT3847_11712C.1
gagacaatgcaaggtggttcattggtttcagggnatatcaggtgtgatccagagnagagagaaatagtttgagctttgacacacggggggtcggcaggtcccgcccaaagaacacccgatggaccccaccaaaggggtttcccatgatggctgcctcctctctttcacggttggccggcttctctctttcttctccctctccctctttt

SEQ ID NO: 18967 - DNA, 1065 bp, Glycine max
  Clone ID: PAT_MRT3847_117130C.1
cactggccttgttattgctggggcatcattggttgcagtgaatgttactggaaatgccatttatgatcccataggttctattgtagttggcaacttacttggaatggtagccatatttcttatccagagaaaccggcatgctttgattggtagagccatggatgaccatgatatggagaaagtacttcagtttttgaaaaaagacccggttgtagattccctctatgattgcaaaagtgaagttattgggcctggattcttcagatttaaggcagaaatagattttaatggagaaatggtggtgcaaaattatcttaaaaggactggtcgtgaagagtgggcaagacagtttcgtgaagctgctaagcagaaggatgatactgccatgatgaagattatgtcaaattacggtgaggaagtagttacagctttaggaagtgaagtagataggttagagaaggagatccagaatcttgtgcctggtattcggcatgttgatattgaggcccacaatcctccaacagaaacaaccttgtcaagtgaaagttttcaataaaatcgacactctcttcacattcatttatattatcaaagcatttatgaaaaattgatttggttttatccagtatcacgagttctgaagaaatccggagttgagttacatgcctcgggttgagtcgacactggacagctcttgatatatttgtgcgcaagtaagtactcatgttttcctcttcgctgaaacgtgacatctgagcgaattcgagggtgaaagactagaaggcatatattgaacaatgctacgatgctaagctcaatgaataattagaagcggtaacgttttctgtgtgccctgcagttcctgtcactggcggcaagtatatcatagttaatgtaattgaggaatgttatgaacgcattctttaatacattgtttttgacactaaaacttattctggcttaaaaatcacgtatgtcactgtttaatgaatcttataatttggtgagtcattagttaataataatgaatgtattaagaattttggtagataaagtcgattacat

SEQ ID NO: 18968 - DNA, 397 bp, Glycine max
  Clone ID: PAT_MRT3847_117131C.1
attaaagaatgcgttcataacattcctcaattacattaactatgatatacttgccgccagtgacaggaattgcgcacaaatatatcaagagctgtccagtgtcgactcaacccgaggcatgtaactcaactccggatttcttcagaactcgtgatactggataaaaccaaatcaatttttcataaatgctttgataatataaatgaatgtgaagagagtgtcgattttattgaaaactttcacttgacaaggttgtttctgttggaggattgtgggcctcaatatcaacatgccgaataccaggcacaagattctggatctccttctctaacctatctacttcacttcctaaagctgtaactacttcctcaccgtaatttgacataatcttcatcat

SEQ ID NO: 18969 - DNA, 791 bp, Glycine max
  Clone ID: PAT_MRT3847_117132C.1
gcttgcatgcctgcagtacctggccttgttattgctggggcatcattggttgcagtgaatgttactggaaatgccatttatgatcccataggttctattgtagttggcaacttacttggaatggtaaagaggattcagaagacagcaaaaattccccgggcatttgaagtggtatctattttattttaattccattctgaattaaccatgcaggtagccatatttcttatccagagaaaccggcatgctttgattggtagagccatggatgaccatgatatggagaaagtacttcagtttttgaaaaaagacccggtacaagctttttgctagtttctatggaaatcacataatttttttgtcattcatttgactaaggtgaatttttgctttaggttgtagattccctctatgattgcaaaagtgaagttattgggcctggattcttcagatttaaggcagaaataggttcctttctcatctttgttacagaattcagataatgaattatgcatgatggtgttaagctgatcattcttaatgaaacagattttaatggagaaatggtggtgcaaaattatcttaaaaggactggtcgtgaagagtgggcaagacaggtagatacgcattataatgttcatgtaaaacctctgataatatgctgctatgttctgctgctgttattagtattattcacctactgctgcttttgattacatgctagcaatgcattgcacttgtttaaaatatgtgcgtttgcaatttgcaattaacctacatgaaattatcgt

SEQ ID NO: 18970 - DNA, 617 bp, Glycine max
  Clone ID: PAT_MRT3847_117133C.1
cagtgtcaaaaacaatatattaaagaatgcgttcataacattcctcaattacatggaactatgatactgacctcaagtaacagtaactgcaggacacagaaaaagttaccacttctaattattcatcgagcttagcatcgtagcactgttcaatatatatatatatatatgtgccttgtagtctttcacactcgaggtcgctcagatgtcacgtttcagtgaaggggaaaacatgagtactaatgtatcaagagctgtccagggtcaactcaacccgaggcatgtaactcaacttcgtatttccttcaaaactcgtgatactggataaagccaaatcaatttttcataaatgctttgataatataaatgaatgtgaagagggtgtcgaatttatttaaaactttcacttgacaaggtcgcctctgttggaggattgtgggcttcaatatcaacatgccgaataccaggaacgagattctggatctccttctctaacctatctacttcacttcctaaagctgtaactacttcctcaccgtaatttgacataatcttcatcagggcagtatcatccttctgcttagcagcttcacgaaactgtcttgcccactcttcac

SEQ ID NO: 18971 - DNA, 457 bp, Glycine max
  Clone ID: PAT_MRT3847_117134C.1
ccgattccgttccaaggaaggtttcccgtcatcactgtatgacgtcctccttctttggggggggggggggggttgttgtgcgtgccacgcagaattaccaactggtgtggggagtggggtgaagagattgggtggtgttggccttgtgttggtagcagcactattggtattacgtgttaagcagctaataccgccgccgccaccaccacgacgactgcggccttgttgtgcgtggtggcgctttcgcgcatggtgttggaagtggcgtcaccaattttggtggggttgtaatacgcgtcggggtaataattgtaatgggtgtaatacccatatggcgcggttgtagttggcgcagcagcagcagtatttgtgaggggtgttgtcagtggtgtgggtactttgggtggggttggtggtggtggtggttggggtgtgttagtggtgttggttgttgtat

SEQ ID NO: 18972 - DNA, 794 bp, Glycine max
  Clone ID: PAT_MRT3847_117135C.1
cccacgcgtccgtacggctgcgagaagacgacagaagggggctgtgcccataatttctgaggctgaggaaagtgagttaggatagccccagaaatagaaactcgaagttactcacttactcaactaccaccaccaccaccatgttctgatattcccccaaccacacacagtcactcttaaaaaaataattaaactttatgcaaatgcaaagcatgtcaaccaccatggcttcgttttctcctccgacccatttctcagccgcaccttcttcctcgaaactccgtcttgtctacaagaacaacaatttcttctctctcaggtcgaagagtcttgctttctctcccttgaaggctgctgctgctgagaacggcgttgggaccgccgtggagccgccgccggagcaggccgtttcggtgccggagctgcctccgccggcggtgggaaattctgtggggaccaatgggtcagctgctgttgcggtcgaaagtgaggaagttaaggttaaaaccggtttcgtggatccgaggtgggtttcaggaacatgggatttgaagcagtttcagaaaaatggaaccaccgattgggacgctgttattgatgctgaggctagaaggagaaaatggctcgaggataacccggaatcatccagcaatgaaaatcctgtagtttttgacacctctatcataccttggtgggcgtggatgaaaaaggtttcatctccctgaagctgaactactcaatggccgtgccgcgatggtaggaattcttatggcgtattttgttgatagcttgac

SEQ ID NO: 18973 - DNA, 456 bp, Glycine max
  Clone ID: PAT_MRT3847_117136C.1
gcctcgtccatctccttgtaattcggcccgccttttacttgcctcttgtatcattcccttctagactagtatgttattcgttcctcttatcgagatgcagagactctaaaatcacaacaattttcgcaattgacgcacatgtttgatccggtgaggctggtactgtgaaggcttcgagaccttgtgcatttcaaaactctgattcatagaaaatgcggagaaaataaacctttggggttctggttgccatctttgctgaacgctgaatctgacccttatacagaggttgtgtggtgttgacagcagcattctgcattggattgtgatcttacctcctcccgttattgattgcaaaagccggctctggaatcttattgatgatagccgccagatgacgagtgcgatacgaggctttttgctgatcttaatgctccaatctaccccggtgtcactctc

SEQ ID NO: 18974 - DNA, 248 bp, Glycine max
  Clone ID: PAT_MRT3847_117137C.1
tgaggccatctcgactacaacaacggcagccacactactgactgaagccatcatcatgataaccacaactgtgtgcatagcgatacgcaatctctcttctacacacatgcatttcttacgccactagattcgtaaccgttgcgcgtacactcatctaggcgcattcgttcggtcagatacacactgctcaaagatgcgacgacggcatcgtaatctcaagattcgaccttgacacttctgatctcgtc

SEQ ID NO: 18975 - DNA, 505 bp, Glycine max
  Clone ID: PAT_MRT3847_117138C.1
cgcctttgaggtttctgagatcactcctccctacattaaatgcactgtctctatcttcatagcatttggaaatttggctgctgacaccattgattactgaggcttttccccacacgctggtacagtttggagagattcacgaaaaagttgccttgaaattttcacaagaggattgtgttacagcttggccaacccaggtgcatgctgcaacaactctggaggatgatgggtgtccatatttgcatgctatggtgcatgatggttcagtggctacaataccagaagattttgtcattggccgtaagttgacaaccataaaccatatgcgtgcgtatgggctcaatcctggggtttgaggttctcgtggtttgggcaccatgcctcactccattgcacagacaactgtttggaatcaaatggcgactgtgagaacaccattggatgttgattctaacgagccgagcttttgtcaattctctattgaccttgtgggtggaggaatttt

SEQ ID NO: 18976 - DNA, 327 bp, Glycine max
  Clone ID: PAT_MRT3847_117139C.1
gatagcacaacttatctaaagggatttatgagactcaccttttagttccttggtaacaccactctggggttgcttgttttattagatatgggaatctctataatccttataatatctttaatccttaactattactaccatgcaagttcatatttttttttttttctaatttactactcacaatgacgtattcctaccttttttctttaaaatactatttattcataatttaacttaatttccgtgtcaaacttttttctttcttaattaaattctaaaatagctcaatttaccaccacaatatttctttttttttctgaaatttta

SEQ ID NO: 18977 - DNA, 594 bp, Glycine max
  unsure (1)..(594): unsure at all n locations
  Clone ID: PAT_MRT3847_11713C.1
ggtttgtctatgataaagtattgcatgaaccaaactcgaagatgccaagctcaacacttaaattctacagtagaagttagaacacgtagttcggcttccatagagcaaagagctgaatcccaatctggaagtagccatgcaaaagattgtcttccaattacaatccaagtcctcggcttctcaccaccattcacaaacccaaggcacagcaccttatcatcactcacactcaccatcgagtttgctccaaatatatatcctccaaaccgtcttctgattctgcagcacaagctcaatggtaggcaccgccgcccccaaacgcgtggcgaccacgttctcactgctgaagcacacctcaaatggcgccacagaagccaccctcgttatgttcctagcagcagaagcttttacaaaagcctcagtcaccgctttgaagatcgaagcctccaaaacagtgtaagggttaacggaactgatcttggttccgccaacgccgctgctgtttatggacaacagagtagtgttaacgcgcacaganttttcatcgattttaatcgatntcacgccgatgaaatactcggcggaggttctncc

SEQ ID NO: 18978 - DNA, 251 bp, Glycine max
  Clone ID: PAT_MRT3847_117140C.1
aacctaccgaaatggctctttaaagaagggctttattcacaggaaaatttggagagggtcgaccagtccatttatcatcccaccactcacccaagcaagctcaggagttcaggtgctttagctgcttgaagcccgatcgtcagtaacttccacctaagagatcttgtttttgtccttctcgggttccagtccaatcttctgctgcaacctttgcctctatctctacttctgggtctcgatctcgaactcaa

SEQ ID NO: 18979 - DNA, 478 bp, Glycine max
  Clone ID: PAT_MRT3847_117141C.1
gcttcgaactttgggctgagttatgtgcttgcatggaagatgatagaagggggactctatggagatggattctctctctgtgtggatgtgcgggcgcagtctgtctatctctaggtctctgtgtaattttttctctgcggatgtgccgccgtagacttctgcctgcctctgtctctctgtgcgagcccccgaacccgccggctcacgcgtaggattagttttgaatcttcgtctaactttcgcggactagtccggcatctacttacaacggagtccgggtccattcccatccccgatcgtccgacgccccaacgccatctcaccccgccccttaccgcccccaccagccgatttcgaaatcccattaccccgcggcccggctcggcccctacagtactgacccactttcggaggaaagccaataaaacttcggacaacagttctccggggtccccaaaccgaactgaggacgggagat

SEQ ID NO: 18980 - DNA, 419 bp, Glycine max
  Clone ID: PAT_MRT3847_117142C.1
cttcagcgaacaaaaatacccctttatcaggctcccccattaaatgactgtttgaggataggatacccttccgaaataactattccagaatataatttttcatattccaaaatacctattctaggataggttttcgaagtgattctattttggaataactattccataataagatatatttctagaatagttctttcggaatatagttttcatattttgaaataactatttttgaatgtagatttccatattttagaatagttattttggaaacatatattccagaataatcgttctagaataggcaccaaaccctctttgtctttttcaaactcgaacttatgtcgctaagtcattgtgtcatcatgcactaccttctcacatcaaccctgggtcgccacgttggaatggtagggaag

SEQ ID NO: 18981 - DNA, 370 bp, Glycine max
  unsure (1)..(370): unsure at all n locations
  Clone ID: PAT_MRT3847_117143C.1
agcggccttccttttttttttttttggataacaatgtatttaagttgtctgaaaggaaaatccgcgtggggtcattaataaaaanacaagtgatacacgtgatcactttttgacaataaaaaaatgaaacacttcttatctttaatccacacacttcatttatggaacataaacagtattaccatcatatcattatttgttatcaatgatcaatctatcttccacacaaagacattactgatgggcgcactcacctgtgtgtgcaccaccaggcatgacatgatccgcatcatatgcatcctgagctagatgctggttttctcctaatatcctcctacatgtagacatcatggagtgaagttacctcaca

SEQ ID NO: 18982 - DNA, 481 bp, Glycine max
  Clone ID: PAT_MRT3847_117144C.1
ttttagaatatgaagcagtgacaaattttattcaattattcacttattaattgagcaagaaccattccaagtaccaataatatccaattttgaaggaaaaagaatgggaacaaatgtggttccatgaaggccattggtataagaactagattatagtttttatcctcctgatcctgaacaatgaaatccagccaatgatcctatgcagcagaatgataccattacaatgctcggtgattatttggatcacaaccttgaagtgcccccggttgatctctcctgcataacataaaatgcaaacaaataggtcatccaaataatcaattaaatgatttgtggcattagcacaagtaatattcataaaaattaataaaggatccaattaagagcagtatttgtttgggtcttctgcatctaccaccttcccaccatgtcgcaatgtgaaagaaattaaagagaccaagctggggacatgataata

SEQ ID NO: 18983 - DNA, 495 bp, Glycine max
  Clone ID: PAT_MRT3847_117145C.1
actacatgacacttcagggtgaggcagcatcattgtctgatagatatggactgactattgggcttcctgcagctacagctgttttattgaaaaaacagcttctatatcgattctctcatggaatagaatactcatggacatatatgagggctgatttagatggtttaattgagattcgaaagctatgtgaagctgggaagatgaagatacctgtgtataaaacgtttcccataacccaagtaaaagaagctcatgaggcaaaagacaagaagctcattcctggtaaagttgtactggaacttgattgacgtcttgaagctgatcagagttggttaaactagttttttctttttttcttttttgcaatggattgttccccattttattgagattgataggtgttttttctgggttctctttgataggaagtggaacttgttgtaaattttgatccagaataagaacatctgtaaattgattgagaagtttgtgtcc

SEQ ID NO: 18984 - DNA, 797 bp, Glycine max
  Clone ID: PAT_MRT3847_117146C.1
gaattcgagctcggtacccggggatcctctagagtcgacctgcagtggccttttttttcataaaactacactctcttagtgtaacttgcttccattagcgtccttttgtgagtgtttgttatcaccggtagtgtacgtgcgttgtttaccgatatacggtgaaattcggtgatttttcatcgttgaaaaagaagaagtgcgtatttctttttcaaacatacggattggcaatccgcatggttcatacggattgccaatccgtatggccatacggattgccaatccttatgttttgaatttttttttaaataatttatttagaatcttttatacatttaatttatttataaatttgataattaaacaaatttgatatttaattgaatgttgtatttagatatttattacaataattaatagttaaaaaaacttggtatttaattgaatagtgtatttagatgtttattacagtgattgaaaattaaaaaaatttggtatttaattgaatgatgtatttagatgtttatatatatataaaaatacattattagatcaaaattaactgtaataagatcaaaaaatacattaataaatttatgttaataatgtattttttttacgtatgtaaaaattaattgtcaaaaaatttattatgtacattaaaattttagtgttacatataacaacattaattattttataacataattgatttgttagctcagttggttagaccgtcatgctaataatgaaaagtcatatgttctatgggaaggcaaaattggaatttcacatgc

SEQ ID NO: 18985 - DNA, 110 bp, Glycine max
  Clone ID: PAT_MRT3847_117147C.1
taccggtaccgtgcaggtggtaccagcgtttgcctatagtgatggcgtattaggagcgttggggtaatgagtgggcatagggtgtggtgctgggggaaatggggatgggg

SEQ ID NO: 18986 - DNA, 140 bp, Glycine max
  unsure (1)..(140): unsure at all n locations
  Clone ID: PAT_MRT3847_117148C.1
ttgctttagatataatttatccccccacgnaagaacagcggggtagctgcattccgtaccagatctggccaaaacacnaccacatttaataagaccatgacagttcatgtaactggtctctaaacaaacacactgacctt

SEQ ID NO: 18987 - DNA, 606 bp, Glycine max
  Clone ID: PAT_MRT3847_117149C.1
ccacgcgtccgaataaaattaactttctctttttgacctcaacccttcctctctctctctttctttctttatggctcttctgtctgttctgcttttgcaatgaatgcagcaccacaacgcttatcatccacactaacctttccttattaatactcaaaccctctctttctttcactccctttctctttatcttcaacctctcactccaactctcttctctgatccacaaccttaactttctgcattctgagaaaggtgatgaatcttctacttcttccatgaactctcaaaatcaccaattttcttcttaaagtacccatctctagttagttgcacttgttcagctagtggggatgagtttgttttcttgcttgtgcttagtacaattagcaatggaggatctgcatctctgcatgcttagtttttcagttttttttttaaaatttcactttttgattttttacctttttgggtttttgggtttagggtctgcattctggctgagttttctttaacaacacagggggttaaagtgtttttttttttttaattctttttgggcaagggattttcaggtttggtacttactcttactctcactcactt

SEQ ID NO: 18988 - DNA, 496 bp, Glycine max
  Clone ID: PAT_MRT3847_11714C.1
ctcggtgtgtctcctagtggacaaaactggagattggctcacactaatacaaaattctgcaattagtgacttgccgtgaggtgctgcttggcagacaggctgcttaatggttaacattgtgatgcatgggaatgctgcagtcaaaaggagtgcttgggcctcactgatacacgtgcttttaacagacagcaacaatacagagcattttgatgcatgtgagtggacaaaatcaggaaccacattcctgggaattgatctttccaatagaggcatgtggacctaataacggttctggaatgtggaggtctgagtgcgccaatcaaactgtatggcctctgagtttacttattgacaatgccaaacagtctacagttcttgatactctcttgggaatatctcaggagtccgcaactgctggtcatactctcatgccagctgtctgtgtggcacatgctactggcagatcttctgaatatgcagacatctgtgcatgatc

SEQ ID NO: 18989 - DNA, 444 bp, Glycine max
  Clone ID: PAT_MRT3847_117150C.1
acgaggttgcccccatttatatactctatcttggcactatctttagccgatgtaggacttgggttttttccaatacaccccctcacgctcagttttttttttgcacagcaaaaatcaaaatattatatatatagttcagtactaggtgtactgaaaaaacagatacaaagcaagacaaatacaatctcaacccagtaggggagaccaaaaacagcccacaaagatacaacccaacccctctaagaaagaacatcctttagattggatgaccaaaaattaaagtgcatttggaagtccttctccacacattttaaccaagaccaggtgtggaacagggcatcatccatgaccttttcaggagagaactgctggttcttgaagatattggcatttctatggtaccaaatggagaaggacagggctagccacagaaattcccatgct

SEQ ID NO: 18990 - DNA, 255 bp, Glycine max
  Clone ID: PAT_MRT3847_117151C.1
actaagcgttcgtaacccactgatcatggatttccattatcgatacgatctgcacctacttggctcagcttacatagccactagagacatatcatcttctgaattaaagcctaatgatccatactactacaaaattccttagatacacgtattctaatttacttaacgtactctaatgcagtcaataatgccttacatgccaataacatcaatgatgacacggcaactgcaaaatatatggattagacaatcata

SEQ ID NO: 18991 - DNA, 1085 bp, Glycine max
  Clone ID: PAT_MRT3847_117152C.1
gcttcttctatgttttgaaagcttgctacgctgccgaaaggcgccggatgggacccgtttgaacattgaacttgaacttgaacaacctcatctccaatgagttaacgttctccactcgtccctgcttctgcttctgctcattcttctccttccacagggatggcttatgttccacatggaaatgcaaattgcaactctttattccaaaaatttgcaaattcccatgtgggtatttctgctttgcccttcctgcaaccgggactaaaatcttgtacagttttcaacagaggaacactcattcccctgtgcttaaatggaaagaggagctttgctttatcagaaaagggatttaattgcaagttttcaaagagagagagattctctatccctagaagtagtagttcttctaactctagtggaagtacggatgaaacctctaaggagacaaatgtaaagacaccatttggatatacaaggaaagatgtcctattaattggacttggagttactttacttggcattggcttaaaaagtggactagagtttgttggagttgattcactacaagcaggaaatgtggttcagctagtgctggttttgggcctcacagttgggtggatctcaacatatatcttcagagtttcaaacaaggaaatgacatatgcacaacaactacgtgactatgaaagcaaagtgatggagaagcggttagaatccctaacagaagcagagctacaagcactgcttgaagaagttgaggaagagaagagtcgctagctagtggtacgcaggtgaattggagtagcttgtttgtatatatacactgaaatgaagttttgccaaagtaattgaaacagaaatttcaatctatatggactagttcagaaaggttttagctatgctttcttcaatttactcagacaaaaggatgagacttcaaaatccttagtgttctgctcacaaaaaattccagatggaagcaactctgtaagatatgatgataatgcttttaagttcatataattttgtggctttttttggagccgttcaccactgcacctcatgctatgatgaataatgttgaa

SEQ ID NO: 18992 - DNA, 673 bp, Glycine max
  Clone ID: PAT_MRT3847_117153C.1
tacggctgcgagaagacgacagaaggggacaggtaaatgtttcatctttatgcttatcacttccttaggacgcacgtttaagggctcgagatgttttgaaagcttgctacgtcagctgatttcccctttctccaggaatggcttatgttccacatggaaatgcaaatttcaactctttattcctaaaatttgcaatttctcatgtgggtatttcttctttgcccttcttgcacccgggactgaaatcttgtacagtcttcaacagaggaacactcattcgccagtgtttaaatggaaagcggaatttttctctatcagaaaagcgatttaattgcaagttttcaaagaaagacagattctttatccctagaagtagtagttcttctaactctagtggaagtacggatgaaccctctaatgagacagagaagacaccatttggatatacaaggaaagatgtcctattaattggacttggagttactttacttggcattggcttaaaaagtggactggagtttgttggagttgactcactgcaagcaggaaatgtagttcagctagtgctggttttgggccttacagttgggtggatctcaacatatatcttcagagtttcaaacaaggaaatgacatatgcacagcaactacgtgattatgaaagcaaagtgat

SEQ ID NO: 18993 - DNA, 148 bp, Glycine max
  Clone ID: PAT_MRT3847_117154C.1
ctcaaaccgaaaaggcagcaatgaaggttaaggcctctgttattattagctatacttaatatggacgagctgcacggtttaattgtatcttattctataatgccactgtattaaaaagacttcttatggtctattgtatatccaattc

SEQ ID NO: 18994 - DNA, 169 bp, Glycine max
  Clone ID: PAT_MRT3847_117155C.1
cattctagggggtttttagggcggaagacaaagggaggcttttggcaagggggcccaagctgaacacgttcgatccaaggaggaacaaaacaggggcgacgaaagagaaggtcgggcagaagaggaagactggtccagaggaagtcttcagaagcagcaggagaaaatg

SEQ ID NO: 18995 - DNA, 592 bp, Glycine max
  Clone ID: PAT_MRT3847_117156C.1
aaaaaacagggaaaaaaggcttgaacttgagaatggatcatgtgggtcagtgaggaattgttgttgttattgttgttcatttttgctggggtggttttggatcctactcaatttctcaacattcacttccgtcatgataagcagggtggctggcatgaaactcatatttctgatattgttcagagttttacgggatagtctacgagggatttatgaggcccttgaattgagagatggagcaatttcttgtcattcatgacgtttcttatctcaaccggagcagtttcccacaaggctttattttcgggtgctgcaagggaaggtggaaaaggaccgagtatatgagatactttcactcataaatactcaggtgtcatgtatgatgcctcagagttaaactttatacaggtagacaagcagaacttttctttgctacgttcttcggtttgttatgagaagtcaaggtttttggaccaatgatgttgtgcgttcatgcatggttgtgtttcacttcgtattcgctgtcttgcttttgcagttgtatttgatcacttcttcttctcttgcttttgcgtttcgcttcttattggtt

SEQ ID NO: 18996 - DNA, 586 bp, Glycine max
  unsure (1)..(586): unsure at all n locations
  Clone ID: PAT_MRT3847_117157C.1
aggaaacataaaatattactcaattatcatcattgatattagcaggacatgatcttttctgtggcaatactttacttacaagagagtactggggcttaaatgccacattcatggagatgtttttagtaatcccgacagaagcagactgcaatggtagtctgttatgtaaagaaaaaggagtgggcttttgtttaccgttctgctttgacttgagtaattccttttttggatccttttgctgtagcttgggactgataatagattcaacgggtaccagtcgtccgttaacttggtttgtgaagacaaaagtcacctcatcaccggctgaagcctgaagtatagcatctggtacagaagttgggaaaaaatgatggccccaacttcctaaatcctcttccaatgggctccctacctgcttttctgatctttttaaattctngaagcagccagcaatttctgcaaatccaccaatatcagaggtttcttcatcagattcactatctgttattgttgactgggcttcagtgcttcgagggccatcaaatgtttgacaccgactgcattgcatgttttcatgaatctctga

SEQ ID NO: 18997 - DNA, 306 bp, Glycine max
  Clone ID: PAT_MRT3847_117158C.1
cttctgttcactggtcacaggaagcaccctggagagccagcatctaaaacgtgtcatcctatacatctctcttcttcacccttctgtttgattaacacttcaataagaggagaacgaacactccgtttaattaccaatggaattgaagaagcattttctttcatgccaactaggaattggatgctcataaggcgtattgattgaacagatatttactgtagtagacttacaaacgatagccaagcaagctattgtgttctctgtcaatgattcactagaatggaaggactctcccaaaaggctcat

SEQ ID NO: 18998 - DNA, 298 bp, Glycine max
  Clone ID: PAT_MRT3847_117159C.1
ggctcgagttccaattaattctggcaccacattaactctaaacacttcatgtttaccctcaatgacgtactcacaggcgaattcttacctcgccgctggaggggtggtcacctcatcaaactcctatagtactcctgattggtccataccatatacagaatatagataagcctaaagagaaaagaaaaaccaattcacttcaaattgtattggcatgacatagtgagtggtcacaaccacacatctgaatgaaatagacacccccttctctcgaatatttacttcaaattcattaagg

SEQ ID NO: 18999 - DNA, 196 bp, Glycine max
  unsure (1)..(196): unsure at all n locations
  Clone ID: PAT_MRT3847_11715C.1
ttttactnatagtttacaactctcatcgctaccattacgtggattactgatccatcattgagcccaactttntgttatgcgtttgcttccatctttttgatatggatttagagtttgaatatcaagaataatacatgatgtactcaaagggagtgcaacccttcacttgcaaatgattgactttctcttttcctaa

SEQ ID NO: 19000 - DNA, 945 bp, Glycine max
  Clone ID: PAT_MRT3847_117160C.1
acgaattcggcacggcggagtccgtgccatgactgttggcacaattacactctttgctggtgcagaggtaggtgtcttttttgcttggagaggaagctctaaagccgattctccttttgaactggttgcgtcactcactggccacactaaagcagtggtttgtctggcggttggatgcaagatgctgtactccgggtccatggaccaaagcataaaggtctgggacatggatacattacagtgtacaatgacactaaatgatcatactgacgtagtcacatcccatatctgttgggatcaatatctgttgtcaagttcatctgaccgcacaattaaagtctgggcttgcattgaagcaggatctttggaagtgatatatacacacaccgaagaaaatggtgttgtttcactttttgggatgcctgatgcagagggaaagccaatattattttcctcgtgcagagacaattcagttcacatgtatgaattgccatcattttcagagaggggacgtttatttgccaagaaagatgtggcattgattgagttaggtcctggtggcctcttcttcactggagatgagagtggtttgctgatggtgtggaaatggttggaggtacccaaggtggcatcctcttgacatgttttcctttcaacattggagttgtattatcccatctatttcctcttgaagcagatggtgataaggatgaatttatttgtctgagcagtaaattcactgtaaaaacaattgtatagaaattgacaattttatagaaataccaatttcattcttttatattcttcccagcagatgtaatcttctcctgctttgataaatatattactattgtaagtaacatggtttgtaatgaagtctgttttcaaattctttccatcattatcaaagaatacatatttggagtccaaatataagttcgaccc

SEQ ID NO: 19001 - DNA, 2462 bp, Glycine max
  Clone ID: PAT_MRT3847_117161C.1
gcttggttctgcctcgccccaaattccaatccttcaattcaataatttagtaaaaatgttgtcttctctgcttggaccctgtcgcggcggcggctggcaagtagtagtattaaaaaagttgatgggataattggcattggttgagtttggttcaaattgagaaaatcattactccattaaccattcattcaccaatcctccatggcttcctcttctctgtttcagtctctccctttctctctccaaacctctaaaccctacgcgcctcccaaacccgccgcccacttcgttgtccgcgcccaatcccccctcactcagaacaacaactcctcctccaagcatcgccgccccgccgacgagaacatccgcgacgaggcccgccgcatcaatgcgccccacgaccaccacctcttctcggccaagtacgtccccttcaacgccgactcctcctcctcctcctccacggagtcctactcgctcgacgagatcgtctaccgctcccaatccggcggcctcctggacgtccagcacgacatggatgccctcaagcgtttcgacggcgagtactggcgcaacctcttcgactcgcgcgtgggcaaaaccacctggccttacggctccggcgtctggagcaaaaaagaatgggtcctccccgagatccacgacgacgatatcgtctccgccttcgagggtaactccaacctcttctgggccgagcgtttcggcaaacagttcctcggcatgaacgatttgtgggtcaaacactgcggaatcagccacaccggcagcttcaaggatctcggcatgaccgtcctcgtcagccaggtcaatcgcttgagaaaaatgaaccgccccgtcgtcggtgttggttgcgcctccaccggtgacacatcggccgctttatccgcctattgcgcttccgctgccattccttccattgtgtttttgcctgctaataaaatctctcttgcccaacttgttcagcctattgccaatggagcctttgtgttgagtatcgacactgattttgatggttgcatgcagttgatcagagaggtcactgctgagttgcctatttatttggctaactctctcaacagtttgaggttggaagggcagaagactgctgctattgagattctgcagcagtttgattggcaggttcctgattgggtcattgtgcctggaggcaaccttggcaacatttatgccttttacaaagggtttaagatgtgtcaagagcttgggcttgtggataagattccaaggcttgtttgtgctcaggctgccaatgctgatcctttgtatttgtactttaaatccgggtggaaggagtttaagcctgtgaagtcgagcactacatttgcctctgccattcaaattggtgatcctgtttccattgacagggcggttcacgcgctaaagagttgcgatgggattgtggaggaggccacggaggaggagttgatggatgctacagcgcaggcggattctactgggatgtttatttgcccccacaccggggttgctttaactgcattgtttaagctcaggaacagcggggttattaaggccactgataggactgtggtggttagcactgctcatggcttgaagttcactcagtccaagattgattaccattctaaggacatcaaggacatggcttgccgctatgctaacccgcccatgcaagtgaaggcagactttggctcggttatggatgttttgaagacgtatttgcagagtaaggctcattaggttagcattgcaagttttgctcctcctgagtttgctcattatttacttacttttaggcactactgctgtattgtcttttctatgagctaggtttgagtgttgtaataatttgcttgctgcattatgtatgccgtctagtgttccatattggggcatccttagtatttgttgtagattttctttgctgagcatttgatataatagctcaagtaggaaaatgaattgggtactatgaggaatgcatatcattggcttgttattactggattccagaccaccccaaaagaaaataattccaaaaaatataattagaacaaatttcgtccttgttatgctgttggcattaagctcagtgtgggtattaccaagcaactcgaaatcaagagaaaaaaaaattgacagcaaaggagctgcattgttggactgagtcacatcacttcattgctatgtcgtcatatttcgttgaattacgggaaggcagcatgcacagcaatatgcagcgattaactgaagccacaccgcacacattgaagtagtagtcaatttagacactccatcttgtactttctacaaaaatgaatttttcttagccattaagtataatattttattctatggaacttgcgtataaacaggccatcaactgtatcgggttatatacacgaatggagttgaatgaaaaaaaaaaaaaaaaagaaaag

SEQ ID NO: 19002 - DNA, 642 bp, Glycine max
  Clone ID: PAT_MRT3847_117162C.1
gagaccaaacaatactcagaacctgattaatgagagtatggcacagtttagtggcaaaactttggtgcagtggttggtagcaacactgctgattgccttgttgggtggtgcacaagctgttgtgttatgtagcatcgactcaagtcaactaaacttgtgtcgtgctgcagttactggtcaaaaccctccaccaccagatgagaaatgttgtgcagttattcgccaagccaatttaccttgcctctgcagatacaagtctattcttcctttaattggaataaaacccgaaaaggctttggccttgcctggtaaatgtggtctccaatcccctcctaattgttgagtgtagtgaagcaattaatgaaggtcttgttcattacaagcacttagtgttcaggtgtttcattaacactgaagatgcttttatgttttatggaagcatttatgtccctcgaataaagatgcagtttattttaatcagtgttttatgcctaatttgcaagcagatgtgtgtggtgtattaaaatagtgtctgatgttgtatacaagatatctctactcctcaatgagacacaacagtaataattaatatggatagtaattgtttcctgcaaaaaaaaaaaaaaaaaaaaaaaacccaaa

SEQ ID NO: 19003 - DNA, 223 bp, Glycine max
  Clone ID: PAT_MRT3847_117163C.1
gagctggaaagctcgagatgttgatgttggaaaaacaactgaactttcaaggcgtgaaagagaggagatagagaaacagagagcccatgagcgctatatgacgcttgctgagcagggataatcagagcaagcacagaaggatctagagcgtttagctcttatacgtcagcacagggaagatgctgctcatcagcgagatgacgagatagctgcgatagaccag

SEQ ID NO: 19004 - DNA, 349 bp, Glycine max
  unsure (1)..(349): unsure at all n locations
  Clone ID: PAT_MRT3847_117164C.1
ggggggagaaaaanccnnanaacctttatttaactttgttattcccaccacgaaaatctatcgtttgctgtttttttaataatagccggccaaaaaaacaatgcacccccaatcgatcttcaaattccatacttattcacccctacatactctcaaacaacctctccatcaacactcaccccaactcctacgaatactctctcatctccttcaacattaactaccacaccaacaccagcaacaaacatactcaatctctatgactactacaataccttcactgtgtagaaggcggacgatctcacttaatcctcttatagaattctaaatgacaatcaagatccattat

SEQ ID NO: 19005 - DNA, 330 bp, Glycine max
  Clone ID: PAT_MRT3847_117165C.1
atcatcttgaattttatgttttgttggttccttcacctaaaacaatttttactcccacctgaaaagctaaaataatttagttcttaatcaattctactcacggctggattgattttaagaactccaaaaattacctagacaactattgttagtttacgaataaattcttttgggccttaaacaaataggacattagttggaagttcattttaacaattttttttttcttgttttgattacagttggtgaccttaaccacctgatatctgccaccatgagtggagttacttgttgtctacgtttccctggcaactgaactctgatcttcgc

SEQ ID NO: 19006 - DNA, 299 bp, Glycine max
  unsure (1)..(299): unsure at all n locations
  Clone ID: PAT_MRT3847_117166C.1
gttgnatncacncgtacgtnagcncnccagtccggctcgngattcccntngcctcactcntntnannttccaggcagtcnnattncncngcgtnnncntaantcagagcggctgannggtnnggggtnngctcacatcacntcgtntggccnttnggncatgtngattgccgtcngtncnntatcactgntgnggtggttctncncngtnngntntnttgancagcntgttattgagngtttgcgtnggtatnncntgtgtgttcncnaggnntnngaagtctggtgggtgttggnacn

SEQ ID NO: 19007 - DNA, 826 bp, Glycine max
  unsure (1)..(826): unsure at all n locations
  Clone ID: PAT_MRT3847_117167C.1
ttgcatgcctgcagtggtgatgacctactaatattaatgaaaacaaatttgccaagtctacataagttaatttgttcagagttgtttattcctattttaagttttngaaatatgcttgcatttgattgtatttgtatgaaggattattattgttttttatataaattatggcaagctgaacagtagtgagtataatgttggcattttaggggcagtgtacttatttttgttttttatttttattttttttatcagcaaagatatttttttttttgctcagcaaaaatagatatgtattagatagatgaaagagtaccagaggtactgtgagtacaaatatattttgaacatagctggtacacaagatgaattaagtaccagctacaacccctgacttaagtacatatgtgctgcacctcttggaagaggtctcagccagtacattccctttctaattacataaaggcatctgccagattagaggaccactctatagaaacctaagaaaagtacaaaactagtagccaaaattgtatcctctattagtacagaaaagcttgccaatactactgcaccagtgattaaaatgttctgtgaagcctttctcaaagttcctaagctaggtccaaagaatgaaaattgcatcttcctcactgtccctgcaaaattggcatgacgtgtcagcaacctgcacttgcctccgctgcaaactctgtcttgccggaagtctatntctaattagtctncatgcaaagattgctatttttcttggaacctttatgctncataatttgacaaaacattnctnctgngttattgctgctgc

SEQ ID NO: 19008 - DNA, 361 bp, Glycine max
  Clone ID: PAT_MRT3847_117168C.1
agtgggtcgcgaggctgattgggcagggccagggatggtgccacgagaattgtattcccacactcattatgacggtctcccatatgcaaggaaagctaactctaatttctaattgctgcgaaaagccgcacagcctaccatatcacacttcgaagattctccacctcagcctaggactaagggaggtttcagagacaacgaggacaccgacctaatatcgagcgctgagtcgaccggctagctaggtgtagggctggctgtgccaatcattaatagccgtaacgaggaaagcaggctggctaacaaacattaatgctcagagggcatgtttgcagagagaatttgggtaccaattgttgtg

SEQ ID NO: 19009 - DNA, 165 bp, Glycine max
  unsure (1)..(165): unsure at all n locations
  Clone ID: PAT_MRT3847_117169C.1
ttatttatgtgcatttttgagcaaatgaggagcgatatcagactagatatactgtcgatgatcaagatggttcacttanggaagtctatatctcgagaagcaaaattagcattgtgctgatgcaaaatgtatgataaatataaaaatttttaatcaaaatgattt

SEQ ID NO: 19010 - DNA, 288 bp, Glycine max
  Clone ID: PAT_MRT3847_11716C.1
caaaaaccaacttcgtaggttcaagaattaatttcttgaagcacccagaaaagacagaacgccatgctctcgttacttcctgatatgatggaggactcatgggaaaactggctctctcacctggaaatgaatgatgattttggctgcaccaacgctgtatcctttgatgagatggtaaggttcaacaatgatagctcaaatgttgtggcagctattgggccaaaagtggaatacactgtcttatttgaagagcagcgaagaggaatttggaacaagttgttattggcc

SEQ ID NO: 19011 - DNA, 270 bp, Glycine max
  Clone ID: PAT_MRT3847_117170C.1
aacgagctctctcacaaagcaagcagccttaaccttcgatgcccccaacgttgtgccattggcacccacaaagagtgcgtcccataggaccatctgtactgccaaatggaaggccccgccctcctcacctggtgtctctccgatcagggatgcaaccgcggagcccgacactctaactgtggactacaactgtgcggtctcactgattactgcagaggcctgcgaagctgcaggaggggaagcctagatggtggagatgaaccctgaaac

SEQ ID NO: 19012 - DNA, 694 bp, Glycine max
  Clone ID: PAT_MRT3847_117171C.1
atcatccctctcttctcttttcgttgcatctatcttctttgcaacctttcacaatggccaagggtgacgttaaccagggcgacaagtccttcatgggcatgcccggcttcgttgtcgacttcctgatgggtggtgtttccgccgctgtctccaagaccgccgctgcccccatcgagcgtgtcaagctcctgatccagaaccaggatgagatgctcaagcagggtcgtcttgaccgcaagtacaacggtatcagtgactgcttcaagcgcactgccgcctccgagggtgtcatgtccctctggcgtggtaacaccgccaacgtcatccgttacttccccacccaggcgctgaactttgccttccgtgacacctacaagtccatgttcgcctacaagaaggaccgtgacggctacgccaagtggatgatgggtaaccttgcctccggtggtgctgccggtgccacttccctcctcttcgtctactcccttgactacgcccgtacccgtcttgccaacgacgccaagtccgccaagggctctggtgaccgtcagttcaacggtctcgttgacgtctaccgcaagaccctcgcctccgacggtattgccggtctctaccgtggtttcggtccctccgttctcggaattgttgtctaccgtggtctgtacttcggcatgtacgactccatcaagcccgt

SEQ ID NO: 19013 - DNA, 471 bp, Glycine max
  Clone ID: PAT_MRT3847_117172C.1
taggcgcgagaagacgacagaagggtgctgtcacaatacaccttaactgttggggctatgttgtataatttcaaaaggttttttgcggaggatgcagttccttgtgtaacttgcaactaaaacaactctattgatgatattcagaatgaaatagttcattattttaaaaaaggagttatgcaactcccattagtgtttctctaacataccctagatctcacatatgattaacatgaagaggcaaaaagccatcaatggtagcatgcaatagtgctgaaactgaagtccaaacaatggcacatggcatgtgtgagggaatgtgacaaaaaaggttaatgagtttaagatcaaaggcaaaggaccaaaaaagttattttgtaacaatcaagcaaacaataagcactgcaaagaattcaattttttacaacaaacaaagcatgtggagattgatagatagacacttcattgtga

SEQ ID NO: 19014 - DNA, 260 bp, Glycine max
  Clone ID: PAT_MRT3847_117173C.1
aaaaaacaaacaaacactcacttaaaaattaaaaataaaaaaataaaataactaggaaagaaaatctacttcctctcttacagatccatgctgactctgtcactcacgcgatgcacatattagttccacttcatacctatcttcaacactctctcactgttcatacctctctgaaattcaatacacgctgattgctctcgcctgcatggtctcgcataacattgaggtctagagctttaacgtctttgccacgtgaacca

SEQ ID NO: 19015 - DNA, 356 bp, Glycine max
  Clone ID: PAT_MRT3847_117174C.1
tacggctgcgagaagacgacagaaggggacgattgacgagtttctataggtttgtacttaacaggaccgacataacacaggtatcctctctctgagtctaggatagagaacgggtgagggaagccgacgacaccgaatacttgtaaggtgacatgactctgaatccgatgcaccttcacattctaacttctccagactccctgttagcattagtcgtcactctcgccgtgactccgacagctactggaagaacaaatccatgaagcctgactcctagtcacattcctattaccactcctactccgacagacgccaccgtaacatcagccgccatcctcagcggcactctgacgacg

SEQ ID NO: 19016 - DNA, 765 bp, Glycine max
  unsure (1)..(765): unsure at all n locations
  Clone ID: PAT_MRT3847_117175C.1
acgagctcaggctcagtctccaacgcttcctcggagagccagagcctgaggctaaacgacaacgtttcagaacacgaagtgggaaacggttcagggaacccttactaccatcaccgcaaggtggaagcaggggaagaagacgaccatcacgggttcgagctcgtgagcttgctcaccggctgcgtcgacgcaattggatcgagaaacgtcactgcaatcaaccatttcatagcaaaattgggtgatcttgcttcccccaaaggaacaacctcgataagccgcatttgcgcttacttcacagaagcattagccatcagagtcacgaggctctggcctcacgtttttcacatcgccgccgccaccacttcacgcgacatggtggaggacgatgaatccgccacagcattaagacttctcaaccaagtaaccccaattccaaagttccttcatttcacatcaaacgagatgctgctgagggccgttgaaggcaaagacagggtccacataatagacttcgacagcacgcgaggccttcaatggcccagcttgttccaaagcctagcttcgaggtccaaccctccgatccacgtcaggatcacggggatcggagagtccaaacaggacctcaacgaaaccggagagagactcgccggttttgctgaggtcttaaacctccccttcgagttccaccctgtggtggacagactncgagacgtgaggctgtggatgcctcacgtgaaggagcacgaaacgggtgctgtgaac

SEQ ID NO: 19017 - DNA, 245 bp, Glycine max
  Clone ID: PAT_MRT3847_117176C.1
aaaaaaaaaaaaaaaaaaaaaatttttttttgttcctttccccttttttttggggcccggggttttttaaattattatatataataaccccacattataaaaaaaggggggcccgtttaaaagttccaaacttaactaacccgtccttgcaaattaaaatctttttatttgtgtacccaaaattaatttaatggcccgccgtttaaaaacttgggaccgggaaaacccctgcctttaccaaattt

SEQ ID NO: 19018 - DNA, 393 bp, Glycine max
  Clone ID: PAT_MRT3847_117177C.1
tttttttttttttttttttttttttgagacaatactgcatttttcattggggaaaacacaatctttttggtacagcaaaccctgcatttctctaagtagagatagaagaagatttgtctacacttgttgtgttccataccggtggtaaaagtttcctaatgaggggtcctaaagggcaccactttcttactataaacttttatattccctgatccgcataagaaggactctggtcggacattatactctgtgggcctgacggcggcatggctaatgggaaatctaatactatccttcccttctgggtaataaggggctgcgacaaaccataatttcccctatctggaaggggtcacgcccacaatcgcttttaaaatgaggccttcttttgcg

SEQ ID NO: 19019 - DNA, 250 bp, Glycine max
  Clone ID: PAT_MRT3847_117178C.1
aattcgattcgagtaattgattccacacaattcaatggatcatcaaatgctgatgaccctactcgaaaccatcatatacgacgctggcgtttttaatctcaccatccacacgattcccacgcttctttaagccatgcactacctgatgacgatattcttgggactcttccacaatgaccataaccagcaccaccacctgtatttgaagacggaaatgccgacatttcaccaacccattacactgaggtag

SEQ ID NO: 19020 - DNA, 628 bp, Glycine max
  Clone ID: PAT_MRT3847_117179C.1
gtgaaaaacttatttactagatatttgacgggcagaaaagtagaaccagagtttgtgaatggtacaagttaacaataacatcgatgattcaagcaaaatgacaatgaagaatttgagagtttctgtttattttttcttcattccatcttcttttcttctattttcattcttcttccctagaggaatggcattggaacctgacgttaaaccacgatttccatagcctcctcgtcctgttgagcgaaaacctccccctgatccaaattgaccagaaccagctgaccgaaccaatgcagtcaacgcaggactcacagtctgaccagcatcttgtaaaatcttaatcagatccctagcaaacttaacattggcatgtgtaaaaaaggtgtatgcagttcctttagcccctgcacgaccagttcgaccaattctgtggacataatcttccaggcttgttggaaaatcataattgatcacacattttatgtctttcacatctacaagcaacagaacaaaacatcataaggaattaagtgtgggttttaaaaatggagaaaactgcaaaaaatccttatccctgcactgtaagattctagagatcaaatagatcaaactcatcacattcattaca

SEQ ID NO: 19021 - DNA, 365 bp, Glycine max
  Clone ID: PAT_MRT3847_11717C.1
gttctatcaatatcttgtgattgtcatatgatggaactgtttgatttctattagatactaaagttcatatcttcatatgaaaggcagttctttcttccctgattctccatcccctctgttctttctatctactttatggagcactactgtgtcgcttatgcactcaatgatgccatggctctccatggggattgaggaattgtgaatgaaaacagtgggctgacttcctcatgagacacggggatacactccaatagcctatatatggatattatatatcactctagctaaggatcggacgccgctgatactgctaatacagcacgtgtgacgggggcacctgccagctcacttgatgggatgtt
